United States Patent Application Publication US 2025/0297208 A1 - sequence listing, part 13

SEQ ID NO: 2530 - DNA, 21942 bp, Xanthophyllomyces dendrorhous
atatagatagatatagtaattccattaaaaggaaaccggactgttcaatctgttgatctgccatgtacgtgcacagtgacttcgtccatcatgtctatgtaggtcaccagcttgtcgtcttccggcgacccttccatccgatatgactgacgcgttggtgaattggaagaaaagtcacacatgtatacgtgcgccagcagagctctatagatctgaacagcagagcatattgtcttgttcttccataaactatctctctctgcagacccgctctgcgtcttgcctcttgctctgttgctaatccctctgccgttgcgccagactaccgtgatgtctctagaagaagaagagtccaaaggctatgacgagactagacgaaacccaagttttccaatagaacgactagacaaaaatcgtaatgagaaatgtcgtgatttcaatttcttcactttttctttttcacctccaaactttcatctagatcttcctcgtcatctcatcctggcagcattctttgtagagctatcatgacaactcccgtacagaccacatacaagatcatcccgcctacatccaggtttgcttcgcttattgccacacagacgatcgttcagatcccttcgtttactctcgaatccggcctcgagattagagatgtccctgtggcgtacaagacttggggaagactgaacgagagaaaggataattgtatggtgatctgccatgctctcacgggaagtgcagacgtcgacgattggttagtggttctttttcttttctccagaggattccttttgttttctggttcgccttgctgttcattctttagctatcaacggtgaactcactatgcgaggtttttgttcgtttggagataaggtggggtcctctcatggggccaggtaaagcattcgatccatccagatactttatcttctgtgccaacgtcatgggttcaccttatggatccttctctcccgttagttctcttgcctctggaagtatgaagcttttttatttcgtcctcttctgatgcggtccgtatttttcttggctatctcacacccatctggacatttaggtaaccaccaatcccgacactggaaaaccctggggacccgaatgccctcttaccaccgccagggatgacgttcggtgagtgtctgttcgactgtgtggtttacatgtcaataaaaactcaagaacctccctctctctcgtagtattcataaagtcgtcctagactcgctcggagtcaattcggtagccgccgtcatcggcggttccatgggaggaatgactactctggaatggcctatgaatacacctcctggctttgtgcgaaacatcctgcctctcgcaacgtctgccagacattcggcgtggtgcatctcttggggtgaagctcaaagacagtccatctattctgatccggcatacatggatggctattacgccgatgacgcccaaccagcatttgggcttgccgcggcacgaatgacagccctactgacttaccgaagtagagacagttttgagactcggttcgggagaaagacccaaggaggtctcgccagtggttcgatcgaggttggcgctaggccggaaagtcctgtgagccccggagcaggagacgacgcgttcaacattcacaatgacggccacaaaggaaagaaagctaggggaacagattctccactcacaggcgccacacccggaccgactcccactgtgttttccgctcagagctatctgaggtatcaaggtgaaaaggtatgctgtcaaccggtgtttccgtttctgccgttcgaaggggttcttgaatgttttcttacacacccatccaaatacctttccgtcgttcatcgaatctagttcacgaaccgattcgatgccaactgttacatccatcttacccgaaagatggacactcatgatctcgcccgaccccacttgtcgtcccctacctcgacctctgcacctcctcctctgtcccttccgacaacgacacctgaatcgacccttgccggtgttctgtctcgtcttccggccaacgcgctcgtgatcggtgtagcgaccgacggcttgttcaccattcaagagcaaagagacctcgcaggacacattccgcaggctgagcttgtggtaatcccctcgccggatggacacgatggattcctgctagagtttgaagtcatcaacgaggcagcatccggttggctgaaaaagaggttgccagagatttatgaaggagaacctttgatgaagggtgaggagactgaagggttcaaagctcagaaagagagtctgtttggtgaggcagaaggcgaggatgtgagcagatggtgatctttcttttcttttcttttttcttttcgtccttttcttctttttttctttctcttctttcaatcagcaccttagtttgtatcgttctgtccttgttgcatgggagttcaaccctcctttcggtcctattagttttcttttcattagacagacaccaaaccctcttttttctctccttcatagcaaatgaaacatgggtttacaaggaattcaagaacgttcggcgatcctcatctctgtgtgcttgaaagaaatagtcttgatatgaatgcatacatctcggatcgttcgcatatggcacaaacttccaacaggggcgaagaaaagtaagaaaagaaaagacaagcaaaaagaaaagaaaaaaaaaactagcataagaaaatacaaaaccccctcctcgattctcaacttatactacaggcgattcctgcgctctcattctcattgaccacgttttaactcggcttggaaatccctgacggcatccaagaagccagtcttggggtcatccctgatgaatcctaaagagagcgcggcttgttgattaaacgagcctggccagaaagccatgatcgacaagacctgtaggtttgcgtgagcacatgattgttttcgagatcgattagccagagaacaagagttagtccgtgtactttgctttgatgtgggggagagaaagaagagaagagtagatagcagagcttgcagacagagacttgccttgggatcttttttaaagtcaatcagattgagggcttcactaccgccgacgacagctagagcttcgatgatatccctcgtggtgactgtgattcctgggaagttcaccgttcgagaatatgaagggaaagccgatgcggggagcgagaggacgtgaataaagttgtggatgacctgaagatcaaacaattcgatcacatttaagcagagaaagaagagcagaaatatgaacaataagtgatagatctaaggcagagagagaggaagaaagaaaaaggaaaacacgaacggtagagacccttgagaggtaaagcggaaagttgtcgagattgggatcatcaattgagtccgctaccggacattcagatcgttgaccttgcagaggttctctgatcaatcctgagatgaaagatgaagctgccgaagacggggcctgtgtttgatcaagaaggattcgagccaaacagaaataggagagtagtatgagattggaaacttaagcaaaacacaattaaccagagactaggagaggcgaagaaaattacttacaccagacctgatggcaacggtaggcaatcggatgattcgtccgtcctaaccatgattaagaataatccatgttcgtccctgtcagaggcctacctagcattacgaaggacaagacagatctcacaaattggaacttacaatgaacccttttcgagtgtaatcaaaaacgtaaagctcgcagattgctttggcggttccgctattaagatatagaagatgacgccgtgcggttaggctacgttctacaagaggacatgcgcaagtatttagaaggatcgatggagatcaaacaaactaggatgtctctggaaacaaaggagtcgtcctgaaaagagcctcgattgatcatcagttcaagtgatcactctttgaccccgaaaagacacacgatctgtccactcactcaggttcaatctcagcctcaggaatacacttctctccaccgtagacggcaagtccagacacatagacatatagaggcaaaggagagccttgtctggcttgaatatgatgcgctctggtagcggcgaggagagcggtatgcgagtccacgttcacttgttgagaaagatcaaagtggatacatatgtactgtattaaacatttgcagcatcatgtcaagagagtaagaacgactaaccttggtagccaagatcaaagtttgcctcacttcctccggacatgattccgtggacggcgctacccaatatgatcaggtccgagttggccgatatgttgattaaatataaagggttagttccaaagacaaaaaaaatgcagaaaggatggatacaagacatactagatggcgtcgatttgtctgccttcgaataggttctttacttcatccttgttcgatagatcagctccgagcgaagcgatcctctgcttgaactgatcgatcgaggcaggaatcgaaggagctctgacatcggttatgatgaaattgatgttgggaaacgattccgatagagagatcaaaagctgttgaccgacgaatcctctgaagaacagtaagaagaacaaacggatgagccgatcagactgttaacgatcttacacacacgcgcgcgcactgtctagtacttaccctgctccagtgataaggatggtctgtacatgggacggaagggtcacctttggatacactgcggcagacataatgggagtgtgatgggcaagaacaacggttggttgaggtcaagaaaggacagatccttccgtccgacttcctttaaatcggcaggttgaacagaaacggtccaaacccggcccggtgagccgatagccggatagatgaaacaattcaaatatatatgctgactatctaagatccttaggtaaattcggccttctctcacctcgcctcccagttcgtctttatcgaccatctcaccatcactatcaaccatcaagaaaccgccgtctttgatcatcatcgtgagtgtttctcttggctgatgaggtcgtagagagactgtgttggatacccggtgccttgtagtgtcgagagagactttgtcttgctttgatcgagtctgtcgctcacctctgggaacagacggattcttctagtaatttctccctgtcaccgaaagttctttgatcgtcggtcgttttctcttcagtcatttgagctacggagcttcctacatcctcgcctttgccctgtataatctcactcgtacaagcttgcaccaagaggctgaccgctttgtctctgtgctgttctcgttccgatttctccgtttccgtacgaacaaaaaactctaaatcctctgtctacgtgcctgtccgctccgcttttcgtgtgggggtcatctttctcttctttgttgcgctcttttctctctatcctcgccagccgttcgtccggggcttcgaaaacgatccgaacggagataattcggattctacaatacgtttcacctgctaagacacgctccgtagtgctacctcccagcacggtcctttccttacctgggtctcgatctctgcacgctccagacaatgtcctcatcgtccggcccgttccaagttctcaaccgacccaagtttcctcagctgtcgacacctgcatacacacctgccaattcatctcgttattcgcccgaaccttccgtgtcgaatacatcgagtggcattggtcgagcgctcagcttcggagctccgagaaaaccgagaagggagagcttgggagaagcgagtttgaagacaaggccgagaagcggaaaagatggctccatcgattcgtacggggttgagagtggactgaacactgaagacgagagtgatattggctttggggatgaagtgtgggtgtcctgttgcttcataaagaacattccatgtagcagcgttgaactaattcttcctactttctgtcttttcgtctcagcaaagagacggacaccatccttcgccggaaggacccattgactgggatcacttctgttaatcagtacgagatccttcatgagcttggccgaggccaacacggaaaagtccgtttggccagagatacgatcgataattcgttatgggtaaggtcaccatgattcttccattcttttcatttccattcactggttcatccatcgtccgacactttgcgtagaaacttgcgagacagagaattcagactgatacaggcggctggtttgtctttaggaatttcaaaggctatcaagattgtcaaacgagatgagaaaaaaaggctgcccggcctgggctcgcggaaaaaagcaggggtaggaaaaagtgtcactgaagatgcaaagtgtgtacttttcctttttagatcttccaaacgtattttgacagttctcctataaatttcctttcatcttcgcaagattgaaaacagaaatagcgatactcaagaagctccgaaatcggcatgtggtccggatgagagaagtcatcgatgctaagcaggcgagcaagcatatcttcttaggtatcgcctccttcttcgttcacataatctgagttggatttgagtgactgaccgatgccttcttattctgtctgaatagtgttcgaatatatggaaggaggtgaggttaaatggaagacggaggacaatcaaccattgttggccgttaatgaaacacggagagtgttcagagatgtcgtactgggtttagaatactgtgcgtccagatacttgccttttctaattgcttttgcgagcaaaactccctcatctgtccgcctatgtcctcattcttcaacactgtctcgtttgtttgacaaatagtacaccaccagggaatcatccatcgcgatatcaaaccggcaaacctactctggtcaaaagatcactctgagatcaagatctcggattttggcgtttctcattactcctccgttcttcgtttggcttcatcttccggagatgatccagacagtccggaaggtcgatcatcaggggatgcttatgctcagatggacgaagaagctttggcaaagaccgcaggttcaccagcgttctttgcacccgagctatgctacaacggtgaacttaccccattagggaccggctcgccagccgatacgatccacaatcaacgcgaatcattcttccagaatctgcgcaacgcaaacgggctacattctccttcagtcagtaccactggacttgggcagacaaacactacgacagcgacgaaagcaacgaccccgcctgcaaccgcttcgtcttcgggtctcatagtttcgactcgaccgggtgctagaccaatgagtcgggaaccttcccggcaatcttctacattctccttccagcagcgatcttccgagcgattcaactccggtcgacctaagatcaccaaggcgattgatatctgggcgcttggagtgactctctactgtatgctctttggcaaagtccctttcgaagccccaaatgagtttgcattgttcagtgtaatcccaaacgaagactatgagatcccagatagcatgggagctgacaagttgcgttcaagtgatgatcgggacgggatggatgctttggatctgctgaaaaggctgttggacaagaacccagaatctaggattacgttagaacaggtcaaggtgagatattttcactttgctttctcctcaaaatattgtcggtctggataagttggttctcatatttgagcggttttacatattttctagatacatccctgggtccttcgaggattggaagaccctgacgcttggcttcgtcttcacgaacctggctatatcacagttactgtcgacgacgacgatgtcaattccgcgtttaccctaacaatctctcaaaagctgaagaacacagcatcgaggctgaaaaataagctgtttcattcggcttcgttctcgtcacctagacgttcaaactctggtttgagctcaaccggaggttcactcagagtatccagaaaaagtctttctagaacaaattccacggttgtgggtaaccagcaggatacagatccatcttcatcactgtcatcccggcagcagcgacccacccagcataaccggtcgttctctcaggtgtcccaatcgctttcgtctcagcccgagcagcagcaacgatcttcatcctcttcatctcaaggccaattttttctctctcatctccacccttccaaatcatcgcaacaacagcaacaacagcaacaacagtcattctctactcagcatctatccccaacttctcaatttgacccacagcatcagacccagaaatcactcgagccgcctttggcaacatcatgtgcctctttatccattcatcatccccatcctcatactgcctcgcatcaacaacaaccagagccacatctacaaacacagcaacaacctcaaacgcaccttcccttccagatatcaccaagaccaacccctacttcgctcaccagcatgatgcgagagagagaatcaagaattcccagtggatcgtcgagtgctgcgtccgatcgttcacgagttttctatactgacgacgatgacgacgatgacgatccgaggagaataggaacatacgacgatggagaggaggatggagaagacgaaggattggaaatctcgataggacggagaagggatagttatagggttgattgaagtcttctgacgagtccttttccttttttcctcctttttttctcttcctttcgagtttgtctgtttcttttttgccctacacttccctttcactcttgcatagactttcacatactttccttgaaatccgatcccgccttgttgtccttcctgatattatctcgagaaatgattaacagtcgttccaagctggagcaaaagaatgtacccatgcgctcgcttcctgacatcatgttcaatctttaatcctacttttatctcttcgttcgcctttgaccgttccctcagttatactacgaaagaaacaagaaccactcgaatatgattataccctgtccaattacttgagcgcacattcatcccatttttgaatcatgaataaattcttcttcttcaattgaaagatagactcttcttttacttcttcttcactttcgtttttgttaacactatcagtgttgttcaaacaagaggggggaaggatgaagttacgatagataaacgaattgtttagaatgtagacggattgtagaaagaagaaaacaagaaaacaagaagaaaataagatactagagaagaaggtgaggtatgctgtactttccaatgcgatcgtggtgattttgaaatcagtttgaaagactgatttggtggatgtttagtatgaataaggaatggagatattgatcgagtcaacaatagagacgagacagaagatttgtgcctacatacactgactcacaaaagaatacacagcgccacaagcgacagggaagattggaagggaagacattgtaagctgatgagacgaaagcaagtgggtgatatatctaaactagcaaatagaagaggaagagggaaacttgtttcaaggtttctccggaacgctgaagctgacagtaggcgttagattaacgttatcgtccggatggtagccacttctgaatgtcatactcgtatcttctgctcctgcatgagaaagcggattgagaagaaggccacctccagaagaagctgatgctctctgtgacgaagcgtccgacagtcttctactcgagatcgacttcactcttcggtgttgattagagatagggaacggcttgctgctcgacatgtcggtcggtttatcctcgaacaagataggtgagggcgatcgagaaccacttcgagcagagaccgcttcagaagtcgaggcatccatccttcctctcaaatcgagagcattcggaatgtcgacatcgataggatgagcgttcatcggtccagagatcgatatccgaggaggcgacctagtactaccagaagatctggaaaagatctttttatgaagactctctcgtctccgaccggaaggtcttgagtgtataaagatggctgaagattttgatcgagatgacgcaagcgggagggattcttgggaagaccggccgggttgtccaccgacaggcgatcgagaagactggccttttcctgcttccctatgtctctcatccgcccaatcagtgctctttgttcgacttccgctgggcccctcgtcatccgagtcgacttcatcatgctcgttttcgtccgcgtgcctctcctcagcctgctcgatcgattccatcagatgtttgaacttttctttgaattcgtgagatagctcctccatatcttctttgatatgctcgaagtaaagttttaactcggtttgaacttccttttctggaccccggaatcgatcgacgtgtctcttcttctgcttgcaataccgatttcggatgacttcaacttcaacctaagtttatcatttgagacgtcatcagtgtcaggagaacaatagactcaagacatcaaggaggatcagtactcacttcaccaccgtcatcaacctctctctccacaatcagatggggaccctctctgaattttcgaagaggcggcgtctttcttccttctctctccagctttctctcctcgtccgattcggcggcctcccgggcctcaccttctctatcatatgccgcttccctcctcctagttttcaaggaacccatcgaatcctcgtcgtcttcttcgtcttcgtcttcatctactctcttcgtacgactcagagccaagttccctggtctggatccagccatggtagaacttccagaactattcgaattctctctactgattttctcctcgtcctcgtctatctcatccattcgggtacgtctatttcgcttctcgctcatcgtcttctcgtctctatcgtcgtggtctagcgcgcgttcgtctctatctccaggtcctcgctccagatcgtcgtcatcgtccctgttgatggtgatgatatctccaggtaggattcgtcgaacaccagacagccaagcaggttcaggtcggcgaagacctgaaccttcggatcgacgtgaatcgttggttctagtcaacatgatggagtgtgtacgagagatagtgtgcactcgacgaccgagtgaaaagaaggggattgaaagtccatctgcggttgtattcatttttgagcacaacaatccgggtttagtttccaactagaaacggtctattgagaaagcatatgagatacacatacggataaggacggaagaaagcacgaaaaagtgaacgataggctggatggtagcggccagcaactcgacctgaccttcggggggatcatggggttcagggagcttactcgcggccagtgtagagataaagattgcacctaagagtcaattgtagcaacaatataagaattaggcggttatctcaatgatagaacactaagactagagaaaggcagaacacataccaacaccgattgggccgaaatgtccggtgaacagagcttccctaaacgtatgaacatctggcatccatctataaagcgccatcatgatcggtaatctccgaaggagcatgatacaaatcatgaggacgaccaatctccaaaccgagagtgttaaactgctatcggcaaacgaatcgaatggaaggatggcaccgatgtaaataaaagcggtcgtgttgaacagaagatcgatcacgttcgagaagttggattcttcagtctgtttgttgaagaacccactgcgtcacattaagacatgatacaaaagatgtcagcaaacaacagaagtgggctgattatagaaaacaagtgaggaataagataacgatcacatactcccaagcgaaagcggtaccacaagcaaacgcagccaagagatcatcgctacccaacaaagtggtaatacctgatgggcgtgaccaggaaaagcaaaaggcaaagtcgtcacagatcagcggacattgtcttttcgcctgttataggtggatgaaacagaacagattagcgcttaccaatgatcaagatggccaaactgatgtattgagcgacgaaagactgcctgtcgactaaagactttgcttcgcaaaacttcatgagccgtcgggcagcatagccgagcaaggctcccaagacgatgccgagcgcgacctcatatctgacatgatcgaaaagcgggaagagaagaaacagaggttaactgagatatttaccagataaaaacttaacggatgaacagaatttgtctacgcacaaccaagtgagataaaactggtgtgttcgtgtatacgagaacaaaccaaacgatcgatgttaaaatggaattgacgggcactttattttctttctattttttaaaaaataaaaaagacgtccagacgaacccattctccgacggcatgcttatcatccacctccaacgtaagatacaacgcgatatagagtaacgggaaggcactgttgagttgcgatcaccccaaatcatacgtgtatggtcagactaacgatacgtttgattctatatgataaggttctctgcatcgaaagtaagaagaaagaaagaagaaatactcacgctccgtcattacaacctgattcgcaagcgaggatgtgtcggagatgagccgggacgtgtttgtctgcgaatttacctccgataacagcttgggcaagaatctgacacaaaaagaaaggtgaccatattgacatacagaccgatcacgatatgagttctttgttctccagcatagatgaaggaatggatgttgacaaaaacaaaaacaatcggaaacgaaccggatccgtcggtgtgacacaagcggcaacgaccaagctagaaagaaagctgagtccagggataattccccagatcaacaaagccgagacgaaccagccgaaaacgaagatcggacctagaagaaatgcgactgatttccagtgtttacgcatataggcctttggtaattctatcgagcgattgaccagatagacatgaaggacccgacagtcaggtctctaagacagatctattcaaaagctcaggaaaggaatagaaattcagtacgaacctacaccaacaccaaacacagagacagcgatgaccactctggtcaattcctatacaaatcaatggccaaaataaaagtttagtccaaacggaaaactctgtgcggtcgaacctccacctgcgccgcactgcagccattgtacgtaccaatgtgatttcgttcgtgatttctgaacctccgtttccccaactcctcggatcaaacccgccagtcacataaggaccggcaataatacccacgactaattaaccgataatcgggattaaatcagcgataacggaccacaccagcaagttggtacaaagggaagacccactggtggcgatcacggcttctccaacaaacagacgttctttgataaacaaagagaacattccgaactatcaaattgaggaagaatagatgagtgtttgcatgtgtgtctctctgaaaaaacctagcggaaaacttacgagcacgacgaacgctctaaacgagaaattcaagagcaaaaagaagatgcaacgttcatatcagacatccgatgagcacgacgatagccatgttcaaagtacacaaagtaggaggtcaagaacgtgaaactcaccccaggacagtatatgtcagatggaccgctattcgacatccaaccaaccaaacaagaagcggacgataacaagaaaggcagtagggacatccgttgaaggtcgaatcagctctgaggactttctatcgacgaggttctcttggcacgatatctccatgtgcccattcccatccttccttttcctgcccttatcttttctacctcgcttgatatttccattggaacaggaacgatagaacgctactttctgtcggatcagagtttcaagttctgatcacctgtctggtttctccattcttagcaactaagggaagggccatgatttcctcctccacctgctcgtctaactactgaatccgcagaaaagagagaggaaactaaccattaacctcaaacggatggaacgccatcagagaatatcttccgaaggattaacagttggcagttactggggggatgtataaacctatccttcaactttcgttgtggatattgaatcaaacacgagagcaagtgggttgtaggagggaacacgggtatcaatgtcgataatgggggcaagaggaaatatgtacgtaatgcggtccgcagcgcttatccgttcgatcacctccagtcaaacacagtcaatctcgtcattcatatcatgatcagtacaaagaacgtactgaatcaaattgcacgatcggaatgaaggagataagaaaagggtatagacaagaaatccctatccgccaccattgcacacgaaacagacttttcaagaaagatcaaatccagcttcacttgttatcgcggtaagaagctttgctcggagcgtcgcttcatccgtatatggcggaagcttcaacatattcctgcgaagccaaaaagtttcccggatcatatttctcaagttagcttacacatgtctcgaacccgagagagagaagaacaaccaaacctacacgcaagtcgccgagctaggtagtcgagctacataagatgatagacaaacacgaacacgtgagtagactcggagataacctacaagagacgtcattagaaaagaaagagaaaatgaagaaaaaaatgaaaaacagactggtatcggacgcgcccgctcgtatacagaacaatggatcaagttctttgaacccaagcctaatcgacgcacgcgcggcaagaggttagtttgccaaacgaagcaagatgaagcaccctcgaaaagagacgatgttaaacactcacatcggtggacgaggacaggacgtaacaaactttatgagtgctctcttttcctccccattgaagcgactgacgacattccagaaagctatcgtccgaccaagaaccaatacggaagagaggcagttgatttctcataattctattgaattctagtcaaaactagaggaagaagtcgaaaacgaaccagtctcggttgtctcgctcaatccatgcgatacactgtttcgcttcaggtcgaccagatcaatctccgtgtccactccgcctagcaacatctgaagttctcgttgatcaaacattcggatccatttaggctcaattatgtccgccaggccgactttgacgcgcacatataagtgcgggtcccgaatttttgattaattcctcgccaatcatcatcggagcaacaaacaatagaagacaagacgtacggaagaacgcttcagactgcttcttgatctgagtgttaagtttgtatgcagcgaccagatcgatgtactttaatcgattctcattcgtcaccggtacggacgcaccgtcgggaatcaagtcgaccgacgtggtcactccaaattctagatttatcagaagcgccatatgattgatcaacatttgaaggtccaacgaatcaaagaacggagatccttaccttcaacatcaatagtgaacgtcaaagcgagttcttctacatttccatcgaacgtcttgagtttgatgagcccgtcataaagctgtagatccaacgaactaagatcgtcaagatagcattgccttccaagccactttttgactgtatattatctcaatagtcagatttcagcattgagaagagaagtgtcctaccagcctgattgtagaacgtcttgggtgataagaagagacagcgtacgcacggaagaacccagctaaagatacatccaccagagttccttcgtacaacgcttttcccaggacgcgaccaatgaactgatacctaacgttcgaataacacaaagaactcaaatcaagttcaatataaccctcttttaactatcacgtttcttcgagacagaagaacgacgaaccaatcgagttgatgactttcagtcgcatagttcgtaggcgctggatacaactcttgttgcttcgtagcctgccagagacctcggtccgtgttgaacacttcggcgcttagtctaagaaaccaaattggcacaaaaaaaaatgagagtccatcagtccgaatgtatatcatcagacagggtagcgcggaatggaaagagagacaagtgaacatggtggacatacgatgtcaaaaactctttgaaaacccctcctccatcaattcctaatttaaaagagttgtacacgaataagagtcagaaccttcctctctttcctgggttaccagtaagaatatggttaaaaccgaccggcttcgggctgtccgaatcgatcgataaactcaattgagattgttcccttcaatccagctccgattgcgttcagttttgagtacctgttacgtagaaacctcagatcagggagagccctttcttttctggagaagaacaagaagagataacgcgggcgaggaccaacccgtcttcggcgactttgtcccgacggatcgtcgtttggtatttgggagaccgtcttgaatacctatcgatccccaatcgggctttatcgtttctagatttgatcggataacggtcaatctcggagattgtagtctacgagaagaaacgggtgtgaggaaaaaaaaagaatcgaacctgatgaaagctctgaatatctctactcttaattcgaaggggatctatatcgttgttatcgttatcattaattaaaaacgatgataaaacgaaacacacaaatatgagtcaaacgagatccagtccctcgtgtctcaactagcagaagaagcgtgatgtaaacgcaccgtttgtggaatgttattcaagacgcccaaccgaggacttaggaaagccatccgccgcttggtcatcatctttttcgcgaacgatcttatccctacgggaggacctgtcgtattcgggtctggatctacatccatccggttcgcagaatcttcttcgttgatagaatccaggtcctgctcttcggtgctatttgggtcagaacccatatgacggatactttcgttatcagcgatgactagtacgaccaacgtagccgaattatagcataaaacagaggtgaggaaagacaggctcacatggcggcttcgacaaatccacgagtatcgaagctctcgctcatcaaccaaccgccgtctccgacgaatggcttccgttggtctctctcgtacacactggccatcgatcttctcatgatctctctgacgccctctactctccagcccgctagccattcaggagaatctgttggtgtatttgctgaatcagaggtaggtagtgggttccagtatagggcaaatgcaacattccgccagagagaggataagagcgtggtctcactcagggtgagaggattgatcgttgaagagaagaattcatcgtcgcccagagaaagaagaagatgcgtatgaagaagagtgagaaggatgaaaggcggccatgaagatgctagctttgggtctggtcaagatacatgacgagtgtgaaacaaaacaagggtgatttcttcagaccaggcaaatgcggatgatagaaagcaagaaagacgtaccatgcaaagcgtccagaacagctttgcctccattttttccaccgagatccaataccctcctcatgaccggtcccgctctgacctcggtcctccaaagctctttgataacacctccgttttttctagcactgccgacgagcgtaagaacggtctcccttttttctggccaggtcgagagaagggccagaacaaactgtacgacgggtagcgtcagactaattgtcagcgccgagaggtgggccggttggataagcaaagacaggtgagcgagcagctttgtgttgagccccgattttcgccctaccgattgagggcggaactggcggtcctcgagcgattcgtgagtgtcttcgaggccggttccagctcgtcctcccgacatagaggtgtatccggtggaaacgggacgaccttcgatcacccatccggacagtcttgacagaagaccttgacccaacaatgaggcccacgcctctctttcagaggtgttccatttagctacttgaccggcaccgaaggcagcaaagttacccaaagtatctaggatcgatgtatgatcgccacgtggaggcaggacgttttctgggatgaaggcaggagatcggatgaaagagagaatagactttaggtcaaatgatttggcaagcagggtaagagacgggatcggcaatctgttgggaagaagagggatagatagaatctctgaaataagggaaggaagtaattcggggagcgagtttgagttgagaagatgggcgagtgaagctatcaacgacggcaggttcggatgtttcttgtctgttggggactgttggcacgaggtttaacgtcagtaccaaaacgggacggaccactttgcccaagaaacttacgatattcatgagcgctctcctgatcaaaccgaggacgtttctacgagctaaataatcagacaactctctgtttaaagtttgagcgtctgcctctgtcatcacggacttgtaggatgagacatcgagaattaatggaaggatcgcgagttggggaacggtctctctagagctaagacaagaaaggcagagacggaagagtcgtagggagttagccttttaagttcttggacaaagaaggtagccgtggatggaagtaccacatactgagacgaggtagaggctagctgaagaagcttgaaggagagaagcttgagaaggacaatgtatcggggagcggtaggtgcatgaagtgggagcaagatgatcggtggttctgaagaagacaagagatccgatggtaaattacacagagcaatacaaaggacatgagaacaagggcgaagaggactcactcccttgaccgactgccgaccaccaagccttctcatccgcgtgtgcacccatgccgtcggctccccaaccaaagacgaccatcctaagcgcatcgatcccggcgacctggccggtggacacctgggatctccattgagtgtacaaccgatgacgctctctggacgaacggtatatcctttgaacgactctggcactggcatctttacgtctttgatcgtccctggtttgacgttcgagtgctgctctctgtaggacgtcctgagccgagctggaagattgcccggaggagagattgatattttttggagcgcgggttgatcctgtaaagtagtgatgattcataagaagtatgagctgtgagtttgggtgacgacaaggaaaagcaaggatcaagtgggctgtaatgagatattcccagtctatgtgggagaagacgattgagcaggaaagcgtgtaaattggagatggggtggagaaggaatgatgccactggcgaatggatgcttatgtaatcgattagggttattggtgcctgggtaggagacacgccgcgacagagactggacgcgagactggacgcgagactagacgcaagactagacgcaagactaggaaatatcacagtggttagtaccaaaggagctacaacaggactgtatagataactacaacgggactatacaagtgactacaagtgactacaaacaagactaggacacattctatcatagaatctcgacaagcgagactagaagaagttacagtgccagctatgtaaccagagttatcccagcttcggctgtgtctgtgtgtgtgactcgactaactgcgctctcggctcggctatagccgatcttgcgataatttcgataagagcgaaatgacgataaaaaaaaaagaaaaaaaaagacactgggagtcagagacgaagaagagagaggatcaagaggtcaagagagcaaaggagcaaagaagacagtcagcagagaactacagaacacacacaacatgtaccaacagtatgcacatcttgtgaatctgagaataaagacagtgactcattcccatccaaggaaacataccccgagtccgctcgcttccgaaaatatttacaaaattctcgcttatacatgagagatttgaagacagtcacacatgcgatacctttggtcgtgtctttagacaatcctcgcggtcacaacatcatatgctctctctttctcttctccttaccgctaaccgttaaaaacccacagggcatcgagcccactagagtccacggtcacatacagcacatgcaaggcattcaagtcttactcatgtcaaccggttcgaagcctgacctggcgtctcaagagctcattcacctcgtcttccctcccgtgttgctgttctccctactgttatctttgggtttacagatcacccaccggccaaaagaacgtcagatctcccttcctctttacactagtccttcttccgaacaggaagaacaacaagaagggacccatccggatgaactcgaaaaagaccctttcaactttgacgatccggacgtcttcatcgacggtacaccctccgatggtggtatcgccttctggaaggccatgttgatagtcaaacccgtcctgcttgtcctactccttgctctcgtctccgtcaagctaagctcgatccttggtctcggccgactgtttggtggtgacgttggctccatcagtctatctttggccaacagcgtggccctcgttgcgtatgtctatctcgccggactgtgtgtcagatatatccgtacccaggacatcgagcaacattgggcagacacaaagcatctcgccagtttgttagccatcggaactacaggtcaggcattagaactgttgttaccgcaaacaaggaaggcacatgccgagcacaagatcaatctgctcgatcgcatagagctcggaatattgtttgtgagtgttcctcatcttttctttccagacatttgctctgctctaaatgaatcatatcgattgactgagcgacttcttgtctacaggctgccctaatcgtctccatcttcatcccccgaggcccttcgctctatatgccttacaccaagatctacgactccaaaactattcaaaccatatcctcaaccactgattctctcgacaaatacagaccaaatgtatcatccgaagcgtccagttcgatcgtctcagcccttcttttcgactacgcgaagcgagtcgtcgtccttggaggtcggccaaaggcgatcgaggttggagatttaccgatcgtaaaagcttccatgagagctttgccgatgtataccacgatgagagccgtctacaaggatctggtcggccagaggaaacagaaagaactcgagaacaagaggaagaacataaggaccaagagaggcaaaggcggttggctcttgttgaaaatgattctgcgggccaacaaggttgctttcatcacgttgaccatcttggccctcattacatcaatcctatactacggtcccgcgttcttcctcaaccgactactcatttacctacaagaagatccagaacggaaggatcctacctggggctggatctactgccttggtttatttggcgtttctgcaggaaactacattttgatcgggattctttggtcggttgcaaacacattggtcaccactaggacaaaactgatgctcaacacgatgcttttccaaaagactctcgtccgaaaggatattgctggaggaggagcagccggtgccgggccaacttccaccgaaaccgaagaaagcaagaaaggtggcaagggtcagacagatgaagacgacaaagatgaagaagaggacgtcacctctaaatctcaagtacagactttgatgactgtcgatgtcggtcagcctacccttcttccatctttcttctcttatccaagccaactctcgggtgtctcatttgtgaatgactaaac

SEQ ID NO: 2531 - DNA, 8677 bp, Xanthophyllomyces dendrorhous
tttatatttttaatttaatcttatcttagaccgatgcgctgattttggaattgaagtcttctctttggtaaatctaatttctcgcttggttccctccaactcgtgaatagaatctcattcatacccttttatcgctcgaaacagattgattcaccggcagagatcattgttgggtaagtggttcattattgtgacaatttgagagcgtatcgactcattgctgttatcttattaaaaatatatatgttcgtttgaacatgagtatagtggatggttcatctacaatctcatgggcgcctctgccctctatggactagccgctaccttgtgtgagaccttctgttccttcctatctttcaatcagatttatacgccctcagattgtcataataaagaaccacgtacccaaagacgatctacgccggcaaaccaagatacagaaagatatggtcattgctaaaagaaaaaacccctgtctttatttggttgtatagtgtttttaccgatcaaccactatgcaagtaaattcatcttgttgtccgaggaaaacgcgatgaaaggttagtaaacaaaacttgttcttctttccagctggcatttcgaatcctattgcgcactctctgatctttgttcatcgcaaaacgctgtttacacttgtagcgagggatgagaggagtggtctgatgaatgagattctggccggcatccggatgatcaaggttcgtcctttcgtatagtgattttatctgtcaacaaaatttgatcgacagctgaatttgtatatgtgtaaaccattcatcaagtttatggcttgggagagatctttcgaggaaaggatctcaaaagttagaaacaaagaactgttttggcagaggtccgtcttccttctactcctgtcttgcttccattggaagactcacactcaaccttatcggcgttttgttaggcgaaattatcatatcgaggttgattatggttttttaaatcaactggcagccctcgaaatgctcatcgtttctcatatgtcttgatcgtgcgtgtaggtcttcttgaacggaatcgttaccttcacacccgtggctgtcacaattattgctctgttccattatgtgtacatcagagagcaacctttcagtccttcgatcgcttttacgcaagtctccctctctctcttttttcttcttcgttttactctgattatccacaacgactcgaggatattgatcctttgactttatcaacagttctgtggctattttccgagagttgcagttcgctctgggaagtcttccagagactgtattaacagttatcaagagtttcgtctcattccgacgagtcgagaaggtgagcttttgtcttctttgtcatgaggtggcatcgagacatcaccgtcgccttggtgctgacgtcccccatgcaatgcttgatgaataaatgtaaaagtatctcgctctggaggagattgagctggtcgcaccttcaacctctcaacgaatttatatgaactctctcactgtgacttggcctcgagacagggtcgcgctttcttatgcttcctcatcctcagccgacggaccttctgttccagcaacgcccaaaaactccttcatcctagaactgccatcaatcgagtgcccggtgaatgagctgacgttggtttgtgggccgttggggagtggaaaaactttgctcttgaaggctttgttgggcgaggcagatatcttgacaggctccttagcttgcccaaggtcagcaccggacgcgatggtaagcctctattctttggttgacgactgtcttccttttcaaagcctaaagaattgatgatgagttttaaaaatcgatttgcaagtccaatttctcgaacgatgtctcaagtgagaactggattcaaaagtctatcactgcttacgtcccccaggtaggtactaagaggacgaatgatctctttcgcgtaatattacctatttaactcggaatgtcgttgcttttcttacacgaaaggtcgcgtggctccaaaacgattctatccgaaaaaacattttgttcaatctaccaatgaatggggctcgttaccatgcaactttagaagcttgtgcacttctttctgatttagagatcctggaagatggcgacctcactgagattggagaatctgggtatgtctatattttcttccgagatggttttacttttccaccttcatctctgattcagcaaatgagtttgctgttcttgcaaaaaaaaaaccaaaaaaaaccctagtctaaacctgtctggcggtcagaaagcacgagtcagcttggcaagagctgtgtactctcgagcgtcaactgttctactagatgatgttctctcagccgtagatgctcataccgctcgacatttgtatgaaaagtgcctgcaaggaccgttgatggctggtgttcgaacggtaatcctggtatctcatcagtatgtctctttcatgtacattctttctctttgtttgtgcgtagcaatactaatctacttgcccttataaagtgttcaactttgtgctcctggagcaaaatacgtgattgcgctgaagaatggagcggtggagtacgctggagatccacaaggattttctgatagctcaacctcgtttgacctgttgatccatgatcctgcttcaaagggcgatgaagacactatcttgtctatcgagaaggaatcaatcgagtcacttgattccaaaaaggaacggtctgacaagaaggcggaacaggttgttctagacggtagcgatttgtcgaaagtcatgtgcgtctttgaatattcgtcttccgttcaaatcgtggtgcgaggcgtagccagcttagtccattcttgtaaaatctgggaacaaaacacagccaaaagacgcctaaaaagctggttgaggatgagaaacgagttgtcggacgaatcaataaatcgacttgtaacttcaatacagactgcaagttcacgaggttcttggcatcttgtactgactccatgatcttggttgacagggctatattatttccgatcgaacggaggcgtcatctactggacattttttgtgttcagttcgctctgtgctatgctcgttccttacgttcgtttattgtctttcttctcatcgtagtcatgttacatctgatgatctgctggtcttactgacatttggtctcctggggacagttcgagaacttttggctccagtaagtattcatcatataaactttgcgtatagctttcaagtcactgatacagcgctctatcatctagaatttggtcttcggattacaaacaccctcaccattcggcgcttttctacgtcggaatttatgccgctgtgaatccttctttctgattagctaccaagacagttaacagtcaagagtctgatctcttacaacgaatgttgttctctagatctctcttagtggaattgtagccagctgtcttcgtagctacattatcttctacggttctctttccgccagtgataagattcaccggaagatgctggagagggtcttattctcaaccatccgattccatgataccgtgagcaaaggaatgttgcttaaccgatttggtaaaggtatgtgtgtctttccatccatgtgcaagatcttcttatacgctctattgaactaatgacatgtttgtgtccaaagatctggaagggatggatactcaattgagtttcgcttggatgaatacgtctacctactttttgagtatcctgatcatctgtacgtacacgtttcccttgcgcatatccacgtcgcatgacttgctcaaaatgactttcttttgaacagttggcagtattgctaaagtgggaggatggagcttcactttctctgctcttgctctcggtgttctatactacttttttggatcttcttatggaccaacctcaagagtaagcaggctactatgtcatgaatcttgaatcatccactgacatatctcttcaaacgacgtataggatcttcgacgactaggtaagcggtcctatgtgattcgtgcatggtatatcattcttctgaagccagattctctgattcaccatctcaaaaaatacagattctgttacaaggtcacctctgtactcgctgtatgctgagactgtcaacggtgtctctgttctaagagctttcggagcttcgactcaaacgctacgcaagatgttctcctttgcagataccaacatgtctgtctatcgttcattgattttcagtgcccttggggaagatgctgactgtacagatggtatatgaatccagtgtatcgtactactggatgtggacgctcaaccgatgggtcactgccagatacaacattctgtatgtcgcgacaattttgattgtttagagtgagacaaatattggtattcttcttgtatcattgaaatcattcatcttctttagatcatcggccattctagggatgaccggtgtcgttgtgctcttgacgccttcaatctctgcccccactgctggcttcgctttatcatttgcgctcaaggtagcctctgatatgcttgccgttgtcagacgatatgtcggcttagagcaaaatatgattgccgtggaaaggttgaaggagtattcagagctccctcaggtgtgttctgcttattgtatctcacatcatcaaggtttaatcagaacagagttagtaaactaatcaccctctgtatctggggtttctgtctttgcaggaagctcgagaattaatcgagcctagacccgaggcttcatggccttctagtggaaagatctcggttcaagatctagtaatcaagtacgcgcctaacctccctaacgtcctccactctgtctcattcgaggtcgatacggagagtaaggttgggattgttggacctacaggttgcggaaaatccacgtgagtaacaatgtgtttaagtcctcaagcgctaccttgagaaccaattttgaccaggcatatcacccgttcagacttgcactgagtttcttccggtttgtggaagcgacgtctgggaagatcatgattgatggcatcggtatgtgtttgggtttgaacctctgatgaaagagatacgatcgactgatggtgtgtagtgtacatgtctgtgtagatatctcaaagatcgggcttaccgatttgaggtcgaaggtgacgatcattcctcaagatccgaccatcctctctggaacgtgtgtccctttgcctctttgctatcactcacgactataccacgcacttaatatctaccctaatttgaaccgttatgattctagtctccggtctacgctggatatctttggagagtatgatgattccgacatctacgaagcccttcgaagagttcatcttatccctactgaaggaaccgaatcagtggccttaagtgttgatgccgatggtgatgaggtgggtagccatagtttctcaagcttcgtatggctggggtttctttagactaacacacgagctttggatcgatgtttctagattaacgcgaacgtatttagaagcctggagagtgtcgtcaagtgagttgttaactcggaagcatatggcgttgctcacaacaggcacatcttagctgagatcgttctcttcctcctcccttcttagtgagaatggagacaacttctcacagggacagaagcagttgctctgcatggctagagctagtgagtgctactttgcagagtggccatggacaaaagtgctaaacacatatatttactttctaccttcctgttgatgtcagtccttcgaaggaacaaaattcttatcatgtacgttttctccaaacggcactctgatcgtattgcgtgattgatattcatatcactctcttctcgactacatggccatatgcagggacgaagcgactgcttccatcgattatgagacagatacacttatcaacaagacgattagagaagagttttctgactcgactatcatcaccattgctcatcggttagtacagcgttccttctcttggcgctcgaacacggtgcagagcctgaatcgaatgatgttttgatttatcggcaggcttcgaaccatcatcgattttgacaaagtcattggtacgttgttttatgataatcaagaggaatttaactagatgcaagagctgacattgattcaattcataacagtgatggatgcgggtcatctgaaagaatacgacagtccttacaaccttctgcaagatccagactcgaagtttcacgccctatgtctggcgactggacctaatgagtttgagattctgctcaaggtgcgttcgcaatttcccatgaaagatttacgtgtcttcttgaacaacagactgactggttcatggcaatcatgtctgactactgaacagcttgccgaggaagccgagaaggcaagggaaaacagaaagtagagagcacgctatataaaatgacgtcagggttgtcctggaccttgtgaatgatagagacgcagtagacggaagataaactgtaaccacggctgaattgaaagatcaattggttaccatattaattaacgaaacttgcggatcattcccctgttttgcccagagatgctcgcgtcatgatgcttgccatcggggctggatcggtagagaagtcttcgatcggcttacatacgcagacgccctactgctcactcgactacccactatgacctgtcgactggatttttcctcaccttctttttccaacgtcgtccgcaagtccattcagtctactctttccatcgatagtcaagacctcagattgatcaggatcttggggatacattcgctctttctcccttcccctcctccttcgttcaccctgtcctttcgttcctccagctgctttttgctcaaagtttcctagctcgtctctttctttttgggtttcttttttgttctctttccaccctcattctttatatctcttcgccatcccttctttaccctcaagatctatcggtctttgtgggtgatcgctcacgtcgacatcgacatcaacactcatccccaaagtagccatgtctagagcggactcatcaccaacgccttcgtccgcgtcgtcttcgtcctcatcgtctgcctcatcatcgacctcgacctacaacgtcaacgcatcgtcttcttcgagggataaccatctggcgactgcccggacagagtgtttacccgtaccagcaggcgaacagaacaacgacgatgactctgaggttgacgagtctgacatctttcaacttgtctattgctcgtcgtccatctcgcctgctatgccgagggatgacttgatcgacatcttgagtgtatgcagaaggaataatgcagccgccgctattagtgggttattgatgtagtcagttcacctgttttctttctgtctttctctctgtgttcattcatctctatccggtcaaccgaggatatgccgtgtcatacatgtcgtcgtccttcagtttcttctattatgtctttgttcatgtctgttccttgaattttagttttgaccaagaacaaacgtgccttcttctcttcctctctcttgattcctccccggctcttaatatccgacacaccttctcatccggctcacagtaaggacggccagtttgtccagttcttagaaggaccagaacatcgcgtgaggcggatctttacaaaaatcaacaaagacgaaagacatagtggggtgtatgtcctacttgaacaaaagacaaataagcgtgattttccacaatggtccatggcctttcggttcgtccaccccttctagtctccttgcacatgctctgttctgccttcttcttcattggctaggccgccgttgatgtatgaaagctgtgtctcgtcgaaccctatgcttatgatatacaaccgacttaaggtgactggtcctcttttctaatcatccgcccgcatatacagagacctggcccgttcggaacgtttacctccgaatagagaaaacatatcgcttgatgaaaagggcgagttgatcaaggacgagaacgacgcgtttaatgacatcatggtgaaaaacaacatagagtacgtctgttcttgtctcggtagaagattttgtcagaattggttgctcatatttactctcttcttgttcatatagatcaacaatgttttcaaataacatgaattacaagataaaaagtctggttgatttgtatcatcgactttttatgcgtaattgatcgttattccaccatccgctgttcccttccttctatcattatcccgagtatcctctcatccggatgaagtcaaagggtagggggttcgggaatgaagtaagaagtagttgacgaagagagtgcaaaaggagaggaaaagttgacaggagcggacggctgagggctagatatacacttattaacaaagaaggagtaggtcaacccccttttttcatctctactgtacacgtgacagggaaagcgtgcctgaactcgcctttcgacgtacttagatcggacagccatccgacccaagaataaaaagaacagggcgaaggaaagacaccaaagcaaccaatgcatcacctccatccactctccccatcgagactcacaactcttgcacgctcaaacgcacctatacataaacccatacctctattaaccttattattacatctgttaaacacaatcatgt

SEQ ID NO: 2532 - DNA, 8794 bp, Xanthophyllomyces dendrorhous
ccatatctttgcctcccttaccccctctcccctcccctttgtcttcatactttgtcttggcttctcgtctctttcttcacctctttttttcttctgctcttcctcttaaatcttgacaacgtgtgtcactttcgtgtgtcttcgcctctctcttcatgacctctgttcctcttcacttcttccttcttcaattttttatcattcttttggtagagacatcgtccttcaacacttccgcccttgtcctttttctgccggctcgtcttgacaccattcgttgctcatctcgtgattcctattctttcataatctcatcactcttcctttgcccctttgcttctgtatatatctttttcttcgaaactctttcctccctcatttttcgtctctacaccccaatgcataacaatgacggtagacccttcgcctttacaaaaagaatctgttcttccctttacctcttccttctttctttcctccgtcctttcgttttccttgttttctctataagttaactttttttttctatcgttctctcttaacttcgtttggtctttctttttcttctgtcttgaatatttaaatggtaaacccttttatattcgtctcgcagtttcagtcaatcgtctagccgttcagctgcctgcccactcatctaggttgacaagcagctggatgatgaaaactgactgtcatacatcacatctgtggttcagagtcttggtgtcgtcatcttcatgttggtcttcatttttcatttcgataattaaaagaatcatcaattacgtaatctggaagtccattccctttttctcccaatcgaacacaggccgcggtcgatcaccgggagcggatcccggcttattgccgctggctcagtttacatttccttcgatctaagattagataagattagacgacctcctttgatcccagttcggagacgcgattaggtttttagggtcggaagactggttaccatcgagatcataacgtttcatgcccgatcaatatcatatcaaagcaaagaacaaaaacgacatgagattgtgagatgacgataagaacaagataatgggtgttgaatagataaacgatcggaggggactcacggttctctggttgagcggcccgtctggcgattgatgtgtatacccatgccatcgatatgatctctgtcgagtgaatccgtcaaaaaaaacatgcgagcgggtagtgagtttaccatgaagaaaacacaggcttgtctatcgactatactcacgacgtcgtcttggcctaggacgatatgaagaaggttttcttcgaggtaagctgatggttggataagatacacgaagcaggcaagaaagcacgaactctttggtgattttcgactaggaacgacacaagacaacccattccacattagtaagatttccaaacttgacaaacaggcgctacatacaatctcagcaaaccgatctatatcactggtcctcatgatgatatgtgtagctatggttatatcgtctaccaactttccaccatggatcaatactttcgattgaacgcggcggggcaaaaaatcaatataataaacaacattctctcgaagtcaaaggggaagtgcttacagtcactttcgattttctcgagactgttgaatccaaaaagaatgtgtcaattttgctgtgttcataatctgagggaaaaaaaaagagaattgactttgtagaaacgttgtcggctaaactgataggggtgacttgtccttgttgtgaattagcttcgttgtcaatgtagaagatcctacaacaccaagaagtcacaaccagtcagtcagccatcggttgacttcagacaaaagacgagaaaatgatggtcaaacatgttttcgaagtactgatttccaacagtctcttggcctttatatgagcttgacgtaggcgagttgtccatatatcccagaactccgtcagcgtcatgttctacatcggacgattcttcgcctgatccttgatctcggtcatccggatctatatatgtttccggatccatcccaaacgctggatcttttaacgtgagttgcgtgccaaagatcacgtatcttgcgagagaaaagagaaaacaggtgggcgtaagcgcaggaagacgatggcaacagagcgttcgaatatcactttttgaagaaaggaagagatcttccagccttgatagaatcaatgatccattgaggttttaatatatcgacgtcacccgcagtggcgatcaaatctgttgaggcagctagggtctcaacatggttaccaagccatccgtatcagctcttgagcgattctggttccatcacaatagagaggtaagaactcatcaaaactcacagcttttattggctatagccagtagagcgatattgccattgcttaaagtcctcaattttgcatcctgcttgaaagaacctccgtgtttcttcacgatcttttgaagagcagctttattgcaatctatggttccgctcatgatgactgtagaggaatgattgttcagtgaagatactctagatactagcaatagtcggttgacttacaaaaagtggttttgtcgaagatcttgtcttgaggtgcaatgtcttttgagagtctcccagaagatgcagctgagaactttgttctctattacatcaaagatttaaacagaaaatcatctgttagagcaattgattcggagaacaagcgaacaagccaacaaacgtactgtacttctctctgctgcatcgaccgaagatttcctatgataaaaaccatagtgtcaagatcaacgcgtccagcgctgaacccaagcagaaaaatttagatgagttctaacctcttgattccagcaggtttctcggccataagatctctaacactatcaacgtatcgattgaaatctaggaaagccaacgatagaatagagatgatttgctcaggtaacaaccgaacacctcttaagcagtcgaaatgtccgagacagatgtattgtcgcttacctgatactgccatatacggtctctctggcgcatgtatgtcaggactgatattcatggcctctctggacgacttgtcaaatcggatgaacttgcatcgcggaaaacgcaaagtcgagcccattccaaactcaactgaaagtattattttgtgtgccaaaaagatccttgttagctaaagaagcgggtaagaaaagacagaggagcttaccactgggaataacctctgaacccttgacttcaacaacaaaggaatttgttctatatcgaacctgtcagcctctgccttcctagtttcgtgataacaatgattttatcacaagtatcttggacgaacggatggatccagacatcggctgcaccataaatcacaatcagtatacctgagtgtctaatcagcttatatttgcgcttcaaacaagaaagaggccgtacgtttatcatcactagatgttcctctatctgcaaatcggatgaatgatggccagctcgacctctgagatcgaacgaagggcttccagtgctgtccatgccattttctcaagatccatagtaaacgtgtttcaagatcagtaaaattagtctcaagatgatacaagagggcaaacacttactctatccattgatagtcgcttatactcattcctgtgccaattctgacaaacgtagagaacagtggtgttgtcttgtccttgtcaaattgattatctactctaagcccaaggagaagagaagagattttgccccctcgagtgccttgataagatatatcagcagggcatctgataaatcacaatagactcgatgcgctcaccgcttccataccacgctccttgatatttgaaccccatatgatacaatgaatcggtgagtataatgatcgggttgatgaagctgataccgtatctgctcaccgagaacgagtagatcacaggtatctcccagttcgtcctagatgttgtaccgtgataaggacggttcaaagatcatgaatggggattgtcagtcgcctcaccaaacataaaatacagatggtgcgatttgcaaccaaccatatagtccggtttgactttcatccaagctttatctcgcgtgtgacatctatattttgagtgtctctgcttcaatattagtccttctcctctgatcagataaaccagcaggaaaaggaactgtgagttggataaactctctttgcagataatgactgacaacactataccaagcactcacttccgttctataaccgcattcaattcatcccgaatgtgtttggcagtagaacaaccttcaactctgtatggaaattccaatcttcctctgatttgtttggtaatgacgcctgcttgaaatgaaccatctgacttgttgtaaccttcgagcatgtgttttcggtccaccaatttggtcggacacaaatcttgaggttcggggtcatcgcgcaatctaagataaagaacatcaaagactttgactgattgagaggtttagtggattgacagttgagattttagttcagaacagacatcgtaatcagagaaagcatggataccactgacagattggtcgtatagaatcgatcacgccgctatcatcttgaatcgtcaaagacaaccggttagagggttgaattgagattttgaagacaaacaagaactagttaccaacctagcgcagcgctcttcaatgacccaaaaggtactgtgttgtggaaaacccggttaacatgatgcctcgtcttgaagagattaagaagagtggagagagatagaagaaggtggcttacaacatctttctagatctggatcgtatgccagcatctctccactttagatataaatagttaatgttcaaatcgtctactagcaagactgtactcgagaagatagacatactccaggatacaactgatcacaaaaacatcttggcagaaagtggtgaatccatggtcagatcacaggaagaaacgatgaatgtgatacaagaagaatagcacaaactcgacaacttattcattgaacgcatctattatccaaggtgtcagactgccctcgtctttactagacccgtaaagatatgtataatccttggcttgcctgtccaccgagaccaaaataagctatggtatatatgttctaactcacgatatatatatgatgctaaacttaccttgaccaatattggaatcgatcgcctttcttgtgcagctgaattctttctccgtcaatcttttcctcgaccatctaccaaacaaccgttcagctcgaagatactgattgataacatcaatgatagcagtgacaaccttgactcacgaaatcgaacttcaagtctctggcggccttttcgagacttttgatcaaatatttcgatcgaaaacatatagggcgcagtcaagacatggacaaaatatcggaaggacgaagacatggcttactcggaactagcttgatagctcagcataggtagcataggactcataagttggatcttatccaggtcaaagcacgcatatttgattcagatcacgggtattagtaccaacaatgaatgggaacaacaactttaccacgaaccgtgctcttcttaaatccttctgtactggggtcaggaagggtataagctatcagcttcaagtcttgtgagactgtgaagagattgtatgattctgtcggtttgaaaagttatatgagaatataagagtctaatggtatctcaaggttcaaagtgcaagataaattttatgatgatattagtcctgacctggatgaaatatctcgaaaattgccttttcctgtgagaacgatattcttgcgctcagcaaatctttacgagaaaacaaggtttgactagtgttgactataactgaaaatacgtactctgatagatatcctgggatctgtccgatgttcgaaagtgtgttgagtatcttgtcttttgggatgaacgtcatttaaaacgaagttggcgcgcacctttcaggataatttgaactagccatctaacgatttgaatgatccagaataggttccgtgagcttgatactgatgaaatgagaaaggcatacactgactgctgttctagggcggtcagatgtctagcaaagtaactaatcacggcgcatcgagctttgctatgaaactcccgtgggattattgagcatggccacgcctatagaatactcaggctgggacggatgtctcggtacatacgaatctgtggatctactcagctcgtcctagaataatgttgtatagttcgatcatgtcaatgcgttgctacatattgattgaatgagtaaagttgataataagtccttaccaacttctcatttacttcgtcaactgttagagtactttctctcaagctgattcgcggttctaatgctgcaagaagaacacttgcgaaatcacctgtcttggtgttggtctgataggattcaagccacgaagttgctcagcatagattgttcatgtgctgaagaacatacttcggcagagttgagaacgcaaacagagacatgctaacctctttacctcctgaaagaggttgcttccagttgatcaatctttttccttctcccattttgggatcgaagttcaagacttctacgtaacatctagccaatgcctgttctttcaaattgtatgttgctcgatctctgtctctctgttttttcaaaggccatattcatgagatcagcgctataacgacgaatgagccgcaaaaacacagagggaaactagcctctggaatcaacaaccgtagtagtggaaacttgtattccggtgaagaaactgatgagctcaacgatcaagtaaagcacacaaattcaacatgtatccttgaacatacaaggtccttgccgacagtctgtcgccatttatcgaagaatctcttgagcttctctctcttcttctcagatttattgttgcttgtccgaaggtaattcataagtttaacaacttcgctgaaacaaggcgatgacccatgaggaacaagatctggaggtctaattggacgagtcgagccagagtatgtcgacctctgttcgatctctgagagggacatggaggctgtaagcaagagagaggataaacaatcagcccagatgagaggtggccggcgaagagactatgatgcgatgtatcgtacggcggcgtccgccagatgatttcatcttgtatcctgttcctagatcccatctcatttccatttagcgatccgtccaccttctctccttcaacctccatccgtagcttcatcaatctcatctctcggcagatattcatgacaatgacgattgaaagtactcctcccattcaccggcatctgtctctcccatcaacgtcaaccagaccgtctatcacacacactcaatctcaagcactcccatcagcatcctctcacacatcaacctcatcgtcctccggcacgctcacgcttcaacatccttcgcctctccgaccaaaattaccagcagcccatcattcagttgctcccgtactaacaacaacgcgtactcttggtggagatccaccaaaaccaataaggaaacaatttccttcctcctcattctcttctccttctactcatggtcgcccccagaaagttggccttccatctagcccaagcctcaactccctagcacccccaggtagttccgtcaagacatcctcacatagatcatcaaccgttgcatcttcctctcttccttttgtcttcccgtttggtggttcgcaaggatccagcgcttcatccgatgctggtttgacgccgattccttccccatcgataaatggtcccataatcaatggaacctatcgtcgaagcagttatatgggtgaattatcaactggcggggatcttaatgggcaggtactgttgactagtaaaaccccttatagagccgggttccagccaaaaggtgtatggagagaccgctcgggggactacgaagcggctaggctgaagagggaggaaggaagaagactcgaagagagacgattgggaaggagacttgaaaaggtaagctctgcgctttcacatccgatgttggtcaaagagacctctcaaagcatctactgaatagcaagcttcgatggatttgtttactcgtacagttgatagctttacatttcaccccaccctcacaaccactatcttcctcatcagctccatcagctccattatctccagccaagtcaatcgcctctcccccaccgacttcgcgccgatcgtccttctttcttcctgatctggatgctctgaagaacccaagtggaatatggaaaaatctgaaggacagggcaatggctccaccaccagatatgcatctagaaggaggaattgtggtcaaatcctcagaatatattcgaagtaagccgatcagcggatatagatgatgcactgaggactgacacctcggaatgcaatacgacagttgttgaacaaagtatcgtgaaatgggaagctgacaataccgtcaaacaatgtttcatttgcgggtatgtcattctgattctccgccttgctgatcgtttcgcagctgagtccgcttgccgcacatcttattcttaatcgtcatctcaatgtctcgacaaacatcagaacgaatttcaacctgacaactcggaaacatcactgtcgcttatgtggccgtataccctgctctcttcctccaacgcctccgccgctactggctatcaccccgcacggccaaggaggccggaaagagacttgcagtctactcatcgtggcagatcataaaacaggacagtgtgaagc

SEQ ID NO: 2533 - DNA, 60406 bp, Xanthophyllomyces dendrorhous
  misc_feature (18628)..(18637): n is a, c, g, or t
ttctcgaacttctccctactttttactccctcttaaattcttcctcctctcctacatcctctccactatctcctaacagcaagtcttcgcctccaagcgagatcgaaattcagctggcagcttaccgaaagacacttctcgagaactttgcctcgtacgatatcttggcaaagaaacttcgcaatattccttgcgagaaggggagcgcgcaggaaaagttacaagtcaatattggaatcatggcgggcggtttcttggcgagtgagatgggtggactgcaggtatgttctttcagaccggaggaacttaacagcaagttccgcaaatgaatccgtcagcttatattacctgtaccgtcaccttttcatgctcaacagaaatctctttcaaaacaaaagaggcaacacaagcactctacatcctcggttgggtctatctcatctcaaaaatcgattctgaaaggatcctcatctgacaacggtgacgcgagctcattcggctcgaaccaaagaggagcagctgagatagaaatggggctactgttacaaccattattagagcaggaggcacaattggagagcttcattgctgaagccgagggccaggtgtgttttggaattccttctgatttgaacttcgaaataaagagacaaggttgttctttaggcttagcctgatcgctcgtttcgtcttcgtgctttcctctgttatccattattactcgatctagagaaaattcgaggatgctgcgtcactcaaaacttcgctggaggaaattcgtgccgaaatcaaacgattggttgattcgggttgatgatttcatttgtcgctccttttttctttctgaaagaccaaaaaaataccaagccacagaatacccttttatacgttgcttcttcctagcgcagatgaatggaagcacttgtccgacagatatcatccatgataattaatgcttaaagcatctgaactctgaccatcgtcgtcgctgtctgcatcattctcctctaacgatgtactactctcctgttcgtcgtcctcacccaaccattgacttttgcaagcctccagaatggctcgttcacccaaaaccagactagctgccatcttttctattgggccttttgtttcatcctattgttccgccgtcaagaaaggaatataacgcaactagtgaggactagcacaacttaaggagaaaaggggaggagaaaactggaaagataaggctcacatccaagatgccacaaagcatgtccgaggcttccagtgtatcaatcttgctctggatcagcctgactacaccgtttttaaacctttctccttgatctccttctagccctgcgctcaaaacgtcccatccggcctgttctgaaccaagaacgttaatggcgattgaatgaaagagatcaacggagagctgtgcatcagggttgatatagtgtctgtctgcggcaggaacggagggaagagtagggacaatccagggatgagaggcaacgagaatggatgatgacgaagatgatgagcagagaactaaaggggaaaagtgaataaggtctgttggcagagtcattgcttcttcgggaagaaatcctgagagagaagtgatataatggtctcagtatggcgagagaggagagaggagaaggcagaaaaggtgatgggcacgaaaccgtaattgcaggccagttggatacttgacagatcgccatatgtgttgaagatttgttcgcctttaggaatgaattgactagaacacattcggttttcagttcagttgactgcttatataggaagagacggaacagaaactaactttacaacgatgtccccctcatcgatcccctccaatacctgcaacaattctgtcttttggatgttcttgaaatgtgctaatcgatgggggaggcctgtttctggagagagtatatcatgagagcaaggaacaagcgagccacactggtcgcacacaaaatcgtccgcttgaaaatgtacggaatggtttggtgaatggttgaaccttacgttccacaagatttcataaagaatctgagcgaacatacttcagttagagatgtgaagaaacacttggcacttacagatcagctactgggacgagagcaacatgatgataactatcaacgtgaaatgcccgagaagagaccatagagtacgcaaaaagaaaggaatcgaaggtcaagtatctgcattgagcagttctcagaacgggttctgcgtatagagaatagaactcctgaagggcagcctgacaggcaaaagacagagacagaacgccaatcagctcgtatgatggttgtgatcatcatttgcgtggtcctaaatacacgataagagcttaccattcgattccttccccactcggtgtcatgagcgtgtacttctattggtctctcctctcttcttactatccagcctaactctgatttctgagacaatgtccatcctctctctccatcgtcgcctgcgaacatctcccaaaagaatgctaaaggaggagattggcgaggtaatgattgaagatagcctgcccaatctgatttgggtcctaacgacagttcatacagaacgtggacagagagaacgaatgccggcgatgaccggcttggaaattgaggacgagaagaggaagtaagggaagatgttcggtgtgaaagcatgcatgtcattttcgggatccgacaaactatccttggaagagccagaggtacatggtttcagtgaaccgatcgattgaacatctagaggacaagtcatacaagttgatataaaagcgatgcatacggatctcttccgtctgaatatcctcctttgcccaaacgctccatccggcgtgtcctccagaggagaataagtcttgacgaagatccagtcgtgtatcgaacgtaacctcatgcgctcgcagccattccaaaaagatctctatcgacgtcggaggaagatctatcagaggagacttgagcattggatacgagagaagttgctaggaaagaaagatgatgggagggcgtgcagagtttcgacgcgactggacgcgtttaagtcttaccttttttcaaaaattcatttaacatgttcacctaagtccatgtgtgcttgacagtcaaggctatgttccatatcctcttgattactcctcaaccatcatcgaggccgtccatcgtgctcatttgttgcctcgtcttctcggtctcaactgtcgaacgcgcttgtttggcgtgaacaacctgggcgtaacgacattgctatcattttgacgcgtcggtaatatatcatctgtaagttctcaacgtttcgctcacttctcgtcccctgtcgcttccagtcattgtctaaaagaggggtgtatgcttctcctcagtttgtcttgactcttcgtagctagtatcatagtactggaaagaatcctgagaggtttcccggagcagtcaccatggctttctcggacgatgatgacgaattcgatgacatctcgttacccgatttggagatggtcgatctgacggtctacgatacgccgacccaacctatgtctcgttcaggtatcacggccctctcgcgaactccctcaatggtgttgtcatcatcaaagagcaaatcttgcgtcaaaacagaaccagcagacgcgtctgaatgggatatacctatcaggatcgactcgaacggagagtacattcagggttctcctctcccgcccgcttcacaagtagcctttccgaaacttcctcaatcatcgatatccaaacctcagtcgaatcacaacggacacacaagcactgttccacgtcagcctgcagttccgatcaaaaaaactcagtcaaatcctactccccaatctcgttttcctccacaaccatttgttgtctcatctattcagaatggacatttcagagctgtctccaaccctccaatccatccaaatccacgaccgccaagcagactgcgtagcaacgagattatttctccatcagaaggcgtcaacgaaactgcgaagcttactgatgaagctgcgggaagagagctcagagagattcaaagaaaaaacgaggtttgtttttccttgagtcccgtctcgtcagtgaaggattacaacacataatctgaaacgatgaatgcatccgaactgacgaattgtataggagctaaaccgcatattaaaagaacaagcccaggctcttttaactgccaagggggaaacttcaaatcttcgacgaagcctcaaagacgtatggatcttctgttatagtctttcattctttatcaagtcattttcagcagcgcggtcgttaatagagcggcttgttggatcacttgactttcaaccacatcccttcttatccttctagacggaaaccaaagccgctcaaaacctagctgctataactgctcagcacgccgccgaattagagaaacgaaacagacgtgatgaggagcgccgactggaagaagagggaagacgggccaagagtatctttgacgttagttttattctccctacctctggtttttatatactggtcaggatatcactagtcaaagagtttcaaaatcgtatacataaccgtaaatcgctctctgtatcatctggacccatactgtcaatagaatcacaacgcagcgacgtactccgctcgccgtcctcaatggtctactcaatcttccatccctcgttcccagtctcgagctccgcctccattcggtgattttcaaccctcttcgcagaccaacagagggggaggagccggacacaatacatccatggtatccagagtggatacgggggcgggtgaaggaggcagtcaaagttttgctagaggaagttcgtcaaacagggagagcgagacagttagtcctggcagagactttcgagtgaaagaagagaaaaaaggttcgttcgtttcgtttgtttccttatcctgatagtgatacctgtttggaaacgggtctctgtgggacttaattgttgcgttctggcttatacctttttcttttcttcccgtcctacccctttcttttctctttggagtatctattatagctatgcttcctccccctcccaagtttcgaggtctcaaaaatacgtttaacccttccaaatctctcggcatgcgtcaaccatccttctctcaagaccgaccacctcctccgatgtctcagtcttcacgaacatttcgagtgccatttaaaaaccctccttcattatctcagcaagttgatggaccgatggctccgtcttcatcgcccgaatcaatgatataccaaacagagcaggagagaggaacaaaacgacggcgagttaacgatagcgctatcagagagggggcaacggacgaaaaagaggagatgatgacggagacgacggtcaagggacagatacagggtgaagccggagaagtcgtggatcatccggatgcttcgggtcaaacggtcgttgatgagatagaggaagagaatcaggatatagaacaggataacttgggaatgcaggatctggtattagaggatgaagatgaggcagaggacttgttttggagatctcaggagaagaacatactattttcggtggtcttcactgaccaagtttctccttcttcgactctcccttctccttctacctctttatctacaacggcaccactcactccttcttctccttacactcgatctccggcctcgatcagcacgattcagcaaattcttgcgcctcttccaacagaatcaagttcctttagagatcgggcagatcactcgaatgcatgtgctagaattctcaatgctctaggtggggcatctttctcaggtttaggtgcggatcctctgaacgaggtcattagaggtctgaatgctgccgccaaagttttcgagagattgaatatggtaagctaattcgtaatctaatctggaagcgagtgggtttctcctgtgaaacatcatttgtgctgatatccgaatacttgatgtttcgaataggtttcgacattaactgtcactctaaaactcatacattgcattctcctacacattcctcgggcctctagaatccttctccatctccctagctttctttccctcatcacatccattaagaatacatatcttccatttcctgtcaagcctccttcatttccatcgtcgcgcccgcctcttctccctcactctcaggctttacccaatacggcgttggtagccagtccacccagcttgacttccaccaagcaagaacatgagaagtatgcagaaaggacagctgtggtgatgcgactactctacgttatcgaaagttgtgcgtgggaggcggactcaggaagcgattcagatgtgtgagtacccatgtttctctttttccgcgacatatttcttgattatctcctttttgactaacctgatgcctgaggttcgtatatcgattgatcaatttgcaggctctcgaggatcattcaactaccccgatttacgtcagctctattggatccgtcggttcctattcggattgtacttcaaacgatacgcatcatcaactatctttgtttcggttagctcacagagcattcaatcatcctttctatgtttgacacggatgcgatgaattgatcatatcaattatggggtattgttttagatgagcttttgttccgaccgttactatcctatccggaccatgcagttgaacagcctcctcccacaagggatccaacgcgtatacccttggtcgaacagctatgtaaactcgctcgagaacctccgatttctgcttcatcaggagaggtatgattatcttctctccttcctcatcccgatgactctctccttcttaataaattaacaactcgatcttccttcttactttactgtgcatcttgtggcgaataggttttactactctcactcgaaaccagttcattttttagagtactatgtgaaaagcacgaagatgaggccatcatcatgtttggtcaatctcgatcattgatacctaccttaattgtttgtcttgagcgggattcttccatcatttggggaatagatccctcttcttctcagctacaacagttcgtctatccctccattcctgcgcggtctttttttttgttacatatgtatatataacaccagaacaaacactgatcttgagttgtgtcatgattcttcacagatcgataccaagtcttttccctatgctaagtcttctctacagcctcaccgttcctgtaggctccttggacgaccccggtacaccaactgtgaatttgacggacaaactccgtcaggctcctcgacgagaatttaatgcgttgttcgaaaagtttatggttgccttcggtcgcatatgttatgcagatgctccggaggtggaagatatactagagcgtgccggttcagaagaagaaagaggggagtttgaagatgaggatgatggtcaggaggatgttgatgcgagacgatcagagaaggccgatcgattagttgtagaattggaaagagcaggaggtaattactctttctttttctgtctatttaggaacaatcaagcttaccgcgctcttgtacgctccacttgctacccttctcttaatccggcgaattcatcgattcagaaatcgcgcgggatatctttgatcaagtcgtcgaaggaccagaaggtgatctagtgtatgacgtgttttctgatcagcggcctctagatgacgtgccactcgaggaaggacagcatcaagaacaagaagatccggagggatttggatatccggatcatcatgctcgactggacttcccttcaagctcggtaccacctgaggaagcagaagctgtacaaatctcccatgaggtagtcacggaggaccagatactcaatgggaaaaggacgccaagatcatcctctacacggtcaggtgcaattatgactagaacggcggcagcggcggcggcagcagcagcgcaagtggagaggcggaaaaacacagaccagatgatggtaccagacagtgatgatgagttgacagaagaagagggcgacgatgagattcaagtcctttcttagattaggcaattttttattacataaacccgatcaaacaatctcgtccttgcctttgtcgattgtgttgtgtgtagctgaacgccaactctcctgtatcatacatatacatgtatattcaagaacgaattacgcctgtcccttcacttttttctttatcgccgtcgactgtttagggcaccatcgacagcgcctctaagggccctacctgcgattcctccagccaactcggcgacctgcttgagaccaccgctagctttcgtaaggtcggacacaaattgacccaaacttgggactacactggatgaggtaggattcgatggacgggaagggtaacctcgagagtcggtcagcgtagatggagtaccaccagattctttcgatttgacaatccagagaaaggaacaacaacacagtaagaaccgagagaatatctcgagaagatgaggatagaaagagtaagagagaactcgaggactcacggttgataagcaggcctttgacaccgtcgagttgctcgagaatatcgatacccgttcctctgatccacttgagtaacgggctcttcactctgaagactttttctaacccatccgttacactcaacaccttctggttctcaatccatctctcccgctcgtatggtttcaaactgaccgagcttcctaggtcgcctccgacattgagcgcagattcgattgtcctcgtcaatgctcggacgtccaacagaccaaggttgagacccataccggcatgggggtggacggtatgcgcagcatcgccaacaagaacaacccggtgggaaaccgatatgtaagtctcggcatgagagtaggccaaagggaatgaggcggtcattcggggctggaaggaggtaatcatcggaggaaccagatggtggtctgcaggtggaattcctagaggagagggcggatggatcatcgacaatgcagagtgaggctcgactttgccggatgaccgctcaacaagggcgatcagctggttgatctcttctcgagtgatgaacggctcggcctgagtcgtggtagtggctgaggtggtgatagcagaagaagcttttcgggaagcttccaggattcgttgaagaatcatctcgatcccatgctccggaagtctgaagcaagcgttgacaagctcggctagtccattcccttccagagattttactgccttggagagttcgggcgttcggatgtgccaagccaaactagctcgactttctcccaaaggaaggaaggccagaggaccagagggaaggaatcgttggaaggcagtataagtgtgggagtagccaggaggaagtggaggatacggatggtgagacataacggagacaatagtgtgtgtatcgtatgaatgcccgtgcgagggaataccggcaaactgccgagcaggcgatcgtagaccatcggcacctacctaatggttccaaaaataagcaaacgagaatcgattcagatcgagttcttcgctagagagaatgggaagggaagagaagattgagaaaactcacaatcaatctagctctgaggtttctatcaccctgtagcttcagagtcggccatccgccagccacaccagcctcgatcgactcaaccttccgtcctcccaagagctcgatattcttccccttctctttgatgagtttgagaagcgaatgctgcaggttaaagttttccacaagcgtcgacatatattccggacgaggcgatgtcaaagttaatcgagagtccgagagcgagtcccagaccttgaggtgtgagaacgcaaggaagagagaagaagaatttaggaacgcaaaggaagagggaattcagaaaatacggatcgcgcacgatcggatatcttgagcatggtgaacaacggacctgcatttcctcaataggacacgttcgctttggatcaacgaacgaccatgctcctatatctgtaggtcagaaagcaaatgagatcgatatgagcaagacgattttttccacagaacaaagcagtatgagcaaagtgggtaagatatagaaggaacggaccatgcagccatcttcggttctcgttcgtgaccgagctgatcctgttcgtccattcgtcttccttcggtttccaagcttggatcttgtcgagatcagatgcttcaaccaaagcggttttcagatgactcgttgctgggttggtcgagagggaagcaccgagtgctagacccgcgatacctcctccgatgatgacaacgtcgtgatcggaagagatctgactagagattgtagcgtatgatcttaaaggcactctgggtgcgacagcgagcagggcacgacatctgacaagactcatgatgggcgtgtcgttagtggtggtgatggtcgtcgtcgtcgtcgtcgatggtggaaggagagacaagaaattcacgagaaatcccccacagaaaaaaaaacatctttctacttactatcaccttcttcctcctcattccctttcggtttccttcccatcaaagcgagacattctcggacatatactcttcacacaacacacgcacgctgtgttgaaaggcaagtctgataccggccgacagagatgttgatgaatagcacctgttttcgtgatttctaacatgtgctctccctctcgttcgaaccgatctctttctcagaacgaacctatcgaacactatgcctcgcctgtttccttcttcgctccggacacttcctgctcgatcttccctcctcgctactcgagcttctggcttaaccttccgaccgattggtctggtccgaccttccctctccaccacatccctcctggtgtccagctctcgtctttccgcatccctatccccgtcttccgtcctttcctctttcagacagttttccacctcactagcattattgcgtggaaacgccagaggagacgaatatcagccgtctcaaaggaaacgaaagaacaagcatgggttcctctccaagttgaggacggtcagtgggaggaagatcttggctaggagaaaagcaagagggcgaaagttcttgagtcattagaagaaaagatatgtatgaaggagatagggaaaagaattttgaacacaggacaagatgtaaagagctctctttcttttctctacttgaaagtcgaccgagaaggacactcgaacagctcagccctatatcagtgtcctttctttaaccgccttctgaactaagcctcaccgacaagaggttcatctagacttctcacaaatgagctcctgttcttctataacaaagacaaggttgatatacacgagagaagcagaacagtacacacccgtctccaagctgttcaattggtctttctttcctgattctctctagagttatattcagaaaacatgcgataactggaagaaacgaagagacgacggtagaagcgaaagtacagtaggatattatagaaagaatggttacttgagagagaaccaaagaaaagacttgaaatggattcaaccaagcaaagatgttgagaatgagaggcggcgtgttgagaggaaggtgaaagtagatatgacgtgattatctatgggcacaacaggtaaagcagtggatagaaaggaacactggagaagagagaagatgatcaaaactcaattagatgttttgtactgaatccctttctacctctacctcttcttcctctccttcttctacagcaactctgcttggtccttccgttaatacatcaacatccacccctctcacatcacccggctcccctacagctctctcttcctctccaatctccctcaagaattcatctctcaggccgccattctcactcaacccacacacgacctgtgcgagactctcatcccagaccaacctcagaagaactctaagcttgatatctggcgggaggattgatgccttgtcgatgatgtttgttgcgcgcatctttgtcatcgtcggtccgtctgtgggtatgggtacaggtggaggtgtcgagttaaaagaagaggactcctcgatgggggtagagttgttggtcgattgccgttgttgctgctggtggtgttgttgggaagaaagccgtctagagagtgtgtcgacagactctgataaccgatggatcaaaccaaccaactgtctgatcgtcggttcgtcctttacagagacaggcgtcaagagacgtggccgtttgtctgatgaagctagatctgaagaggatggtcgtttgaggttgtttatcgtggtcgttggattcagagccgtagagtgagagtaaaggtacgtggcctacgtcgagtggtacgagagactaaatgagttcgggtagcgagcaaaatagaaggctgaagagacgaacgggatcttccatcaagtcatatgtgatatccatatcactctgtccttgttctcctgccaaggtctgaggctgagattgagactgtcgagtatgtgaagaggccaaatgaggtgattgtactcccgttaagcccgctatcggacgtttgtgtcctacaagttcttcaaattctgcaaacaatggaaatccggtcgtcttgaactttactgcgtgtggatgggtctaaggaggcaaatattctagttaagctcgtttgctaataattcgagagagaagggaaacaacggggagtctcatacttcaatgtatcggtcccaggtggctgtatctggcgcggtgaatcgttgctcatcttcgttccactcgaactcttcattcgatcgaagctctttgaatggaagatagatcgttcttatcatctgtatggatgtgtatgtgattcagtagaacacgcatcgagaggtgaagtgggaacaagaacgaaacacaactaacaagcttgtatcgatctttgcaaggtccgacagtctttggttgaccctgggaggttatcgattgaagtgcttcgacaactttattccaactagacggtagaaacccatgttcagtctcgtttcctgctctgtaaaggtcgagtagacgtccaagtgtaagatcaagatattaacccatgtgttagtgtctgagcgcaagaatgagcaagagtcttgtcggcctccgatgcgtagataagtttggaggaaggatgaatcatagaggggagagaccttttctcttgaagaagtaccctggtcataacggcatcgtccgcaggaagccacctacacgggggagccctcttcttggtatctagcgcttgatgttgttgctgttgctgaacatgttgtcgatgtctagattggggagacgatcgaggctccagtggaacggttggctgttggggcaagagttgagattgattggacaagtaggccagatgggtctgttgctgctgttgctgctgttgctgctgatgctgctgatgttgtagagaaggatggcctatcgaagattgttgttccatcgtgctggatagctctgagaagttgatggttcagacgtcgacccagccggttcgttcaggttcgttcggcccaaccgggctggttcgaagagactacaaagttctgtagtatgctactataagcttttgtagtcttttcgccgggcgacattcactacaaatcttgactacaaatttgacaagctcgaactatactgcattacagatcgggggaactacaaattcactagaattccttgacaaactgactacaaacttttgtattcgaagaatttagttcgtagttccaaccactcacctacccaacagagacatacacagaaacgatggcacccaccaccgtactctctcagtcagagtcatcgttcatcacaagctcgcttgtccttccaactcctatcagaacggacggtagaggccttcatgagtttcggccgttcgaactatcgactggtgtagctccccaagcgaacggatccgctcgcgttcaactaggtcatcccggatcgacaaatggcacagaagcagttactgccgtcaggctcgaggtcctcgaccgaccagttgggtttgggaaggacgaaggtagctcggttggttccagagtggacgtgacgtgcagtgtggactggtaagatcacatctttcgttcggctctgcttactagatgaactccacaggctaaaacatgatgtcttctggtcccggatagttcgccaagtgcgtttcctctgatggattccaaagctctcgacgcttattcaacttgtgtgttttgccgttcttcctgtctatccttgtttgtggacgatcgactttcgcttacgcctcgcccgactgggtacatctagacctgacgacgcttgtgcagcaaacgattccgccgttgcttcctcctctcccgatcacatcctccctttcgttccactacacgatcgatactcttcttacctcaaccgccgctgggaacatcccggacgtcgtcttcctttccattcgttctgcgttgtctgaccttcgagtacctcggacgaggaacgtggcgtaccaggccagcctatctatcgacgagaacggagagtccgacatggttggcattaaaggagccgccttgggcggtgggaagaagaagggagcagccgataggaaaaaagggcaggccttggcaaagggagcagagtttgagattgaagactattgggatgagggtgaacgattggacgaatcggttaggttggacttgccagtctgcatcactctaaacatcgtgagtctttctgtcttcttcagccggcatttcctctttctttcgccctcctcttcaactgatgatatttacatcgactctccatccatctatcatgacaatcttccctctccaccaactagctcccaaactcgacacactttctggacgcgacgacagctgaatcgttagcttctcctacgcatctattgacgttcatcaatggaaaatcagaagtcgtcggtcttcgactagtcggttcgacagaagtcggagtagccgatttgaaagctctattgaccgttcgtattttgttctgctaatttttttcctcttatttgcgcgaacggaaaactcatatcggccttgtttttcgaatctttacataactcttcaggccgccaagacgtatgctagcaatttaattacagcctccaacgcctcgctcgacgttcctgcggtccgtgtgcctggtgggctcggatactttgggtcgtaaccgtgtgtgtcgctgaaggattgaaatagaaaaagaggagcaagagaggggagaggaacgaaggaaatagataattcaagaagaggatgggcatatatgatcaaagaatcagacattgatctagagacggacagggatgacacaacgtcacgcttctttggacaagtcgatttgaaggagaacgcatattcatcaagattaatatcaaaagtgtttggttacagcattgaagacccgaccactactcggacgacttgattttgggaagcgcatccagatcaggcatactcctcaccacttttccctcgttctttgtgtggactctgaggctgaaagtttcaaccaaaaagattgattcaagatacagaaaaaacgattcagtatgagataacagattagaaaagcaaaagagaaaaaaaggaggtaggacaaactcctcgagaagttggctctttgcccacttggcaggcggcgtttttcgattcgtgcaccagtagtagatatcccaatctgcttcatccaacagctatattttgtgatcgtgaatgtgcgcaggacagcacggtgagcttgaaagtaaagaaacgagatgtatcttctgaatgaacaactcacctcatcaaactctttgacaagttccgggctcatcccctccaaccggtcccttgcaaacgtggccaaaagtagatcaccctccaacattcctctcttcctggtctggtaaatcaaccgtttacgagtagtctctatatcctcatgcgatcgatccaacggagggatctggaacgaattctcctcagagttaatttcgcccggtggggtgttgtggagcgagggagagaacggaagtgggtatgggtcctggatcggagggatcggggatgatgacgatgccgaacgagcgatcgctggcaaaccagagttggtctggttcgtacgggcccttaagagcgttctagctacgagggatggtactctgaacgacatgatgggatgcagcgatgtcgtcggaagtgttatggttgggttggagagagtaaaaggcggaaaagaaggagaggagttcgatctcgccgtgtacagcatgatatgtaccaagtcacgtgtttacaagccgccacaattttatttttcaccttccctttattttttttctctttcctcctcaacagaagacattcaccaccgatcttttcatctgcaaaaatggctttctctgatatcaagcagctcgaggagcacctcgccactcgatcctacgtcgacgggtgagtcttgtgtttgttctccttgttttgttctcaatttcgactggacagggcgagagaggagaagaagaagaaaaaggaacaagaagatcttttcgtcttctttttttttccctgtcctatgctctcctatcccatctccatttccatctcttccatctcccactcctcctttgacatgatgaatatccaagctttggtccgtgtttccgagttcagcggcttaagaccccgcgccttttataacgatgcggataacttaatcctagctttccgatcaactcttctttctctccgaccaaaccccgtctcgcacgttctttctgttcgtcgtgtttgtttcggtaactgactatactcttcatccatggatcttccgtatatagatacgctccctcccagtctgacgtcggagtcttcgccgccgttggatctgccccctccgccgccgagtacccccacaccgcccgatggtacaaccacatcaagtcttgggaggctgagcacaaggatgtgggttcctctttctttctttctctatctttgcggccttgtttgatcctgactcaaactttctaccttttcatttgcggaatctctcagctccccggagatgccgccgctgcctccaagcttttcggtggagcttcttcctctgcccctgccgccgccgaggaggaggacgaggatgacattgatctcttcggatccgacgacgaggaggaggatgccgagcgagagcgaatcaaggccgagcgagtcgctgcctacaacgagaagaaggccgccaagggacctgccgccgtcggcaagtctgttgtcaccctcgacgtcaagccttgggatgacggtacgtcggtttccttgcctgtatgacaggttcagcatgctcacttttatcgcattggttttttcttccttcagagaccgacatggttgagctcgagaagtccgttcgatctatcgagaaggagggactcgtttggggagcttccacccttgtcgccatcggtttcggtgtcaagaagctccagatcaccctcgtcatcactgacgatgtctctcttgatgagatccaggaggagattggcgagttcgaggactacgtccagtccaccgacgtccaggctatgcagaagctttaaacagctaacgctgtttcggtttagacccttgctatctctttcctaaatccacaccagaacctatctcttcgttcgacctctttgtttttctcttttgatgacatgaaaactgtaatgatcacaagaacgttccctcagtctttgcgtccaaccgatagacaccagaaagcttcctggctagtgcgtggcgagattgggcaggggtcatgtcacatgtatttgcaggcaaaactgggtgagagcaacctgaaccgatcgtgatcgatatgtagaccttcctggcttgggtgtcttcggaccaaaaaaccaccaagatccctaagtgatggacttatgatgccctatcaatggagcagcttcagcctcaccatcgccatcaacttcagcagtggcggcggcagtatcagacaatagcatcctcgccccgctttgggtttccttctgataaggggctagagggagcatgttgcgcgacgcatcggcatccctttcccatcgagtctaagagcaagcagagaacacggtgaacactcgagacactatcctgagatataacactagtgatggtcttacagttcacagacaaagagacagagagacgatgttgaaatcattggtttgatcgagccacgtgcagccgataaatctatattgtcagtgatatgatctacgtaacacatgcatgtagcctacaactgatacactactttgcgatcctcaatgtctccatttttcttatttacttatcgccaaaaagacatctaagacgtctaggataacgaggagatacattacaactatagctgtaggctggagcaagcagatacaacggtgaccagagaaatggccctttgagatgatagaaaaatgaaaagaaagaaaaagagagaaagagacagagagagatgaagagagcgaaagagagagatgagtggaaacaagagatgaaatctcgataactggttgctcgatctcatattacgctctctctctctctctctctnnnnnnnnnnctctctctctctctctctctctcacacgcctgtctgaccgagcaacgactctctctcatcggccaccgtggacctgaccctggcccgagacttcgacctagaccgagacctttctaactctctttccctgtgccgctctgctgcgatggcagcagcggcagcccttcgcttgcttttgatctctcgtctgtatccggcaaaaacagagaggaagagagcgaggatacagaggacggaggtcaggtaaaacgttgctgcatagcatttctacagagtgagaatgaacagtaagaaaacggacggaaggacgagtgatctgtcagccataaactttcgagcgaaatgcaaaacgcaggatagaaaaaggaatgtaaggaaaagagggacgaacgcgaccgagcagacaactgtgtgcttcatcaattcccaagccaccgccggcagcagtggtcatgtgaaagatcttgtttataatcaaagttgatcgagtaaagattttccctaatgtgtgagagtcgtagactctaccgtataccaggttcgtcactgttaaagtttagaggaatgatgtatcagacgcttgacataagtagagtagggtgggatatagaaggatggatggatggacggacaattggagccgacgatctgtgaggaaacaggatatgtgaactctggtcaatcgattctagagaaccaaaaagaagaaaaggaggaaagaggaacagggaaggacaaacaggcgccatggatacgaaactgatcattcccaggtgccaagagaaaaagaatgagaaaggagcatagataagcgatgagtcaaactcaagatgatgaggagcgcctgacagaagaatcgacacttacccccagtttaatgaaaagttggctgtaggttcgtgaaacgaaaggcaacaaagaatcgagacgatcagcacaccttgcgcgccttgagagccaaccgtatcacgaaaagcaagaacgaagagatatcccttcgaaacgaacccattccgaaccattcgagacagaccacaggacacaacccgaacattccaccgtaagcgagtccaagtaaactactggtgatccatagatattctgccttctgggtgaaaagcaggacgagctgggatataaggaacacgaaagagatgagtgacaaaaagtggattcgacggatacggaaattcttttttgccagatctgacgagattcctgagaggaatggtaagaagcggagagtccgagaaaacaaggtcagaatatttccgattaaaagtcattctgtagaaagaaacaaaaaagagaacacaaaccgatagagatccttcctatgcagttccagattgagatgaccgaaacctgggtggcttgaagtctaataagctcttcactgtcacacaatcttcctccttccgaaatcaacgccaatgtggtgagaccacagttgttaatccagcagattcctgttccactcagcaaacacacgattctggattgtttctcccattcaagcaatccgagtttggtcagctctcagcagagggatagacaagtgaaaagtaagaggaagtaatgaaggtttttgagacatacgaggtcaacaaccagaaatccatctcttgcaacaacgcccacccattcaggtcaacctcatgaggtaagaaacttctcactgatcctctgctaatcaccaaactcagcggctcgtgtaagctagctattgatccaggagtctttgccgatcctgcggggtattcgtctagaattgcgaccgactttgacttcttccctctctctcctccttctaacccctgttctcttgtaccgttcgagtaggtatggtagtttggtgtatcatcagcatttaaaagatgggatagctcccggatcggagacgtcggtaccagctgcctgttctctctgtcccactgatcttcgtcaagcgaagacgatagggaggacgaatgttgatcggcgtagttcatcgaatcttccgacgggcctgcgacatgattgagatctgttccgtcaattcgattccagccggactcgcaagcgttgtaggctggactgtgaacgggagggatcaccggttggatgataaatatgccgacgaaacatggaatgaagcaaccccaagagaggagaagctggacgacgggtaggccgggcgccgagaacatcaggtcaagaaacaaaagagcgagagaaagtgaaatgaaacacgagagggacgaacaagaaaggaagaggtgtctcctgggaagaagacatgactgattgacgaaaacaagctgttggtagggaatcaaagaggtaagacatgtgaatgcagtagaaaaaacagaacgaattcttgtaagacttgcaatgcagagagtccatagccggctaggacaactccagtggcagtcgctcgggtggcatccggaaagctctgagttagtgatgaaacgagacaataaatagtgagcatgatgattatccaactttgaatctcgagtcatatccaaggagctaagcagaccttggcgaccgagtttaatccgccgctcaaaccagcgccgctaccagctccggtcaggaaactggcaaggctgaggattatgagggaacctgaaccggtatatggtatagccttaataaagaaggctctgattccggagtaaccgacaagtaaaagcacagcggccgacaagagattcctatgggaggttcccaacggagggagtgagaaacacaatgatgagatgtgaacaggtttaaaaccgcggatggagaggagctagagatgggtgcatacaatttaggtcctctagaatcaactataagtccccacagaggtcctacgctgtaaacgccgacttttttttttgaggtgtaaatagagagaagaagataaagatgtttagactgatcgatggttgataaggtgtgctctagataagaacgtgtagtttctgaaatacatacggttcccagcggcggccacaatgttgatttcagtaccactcagatgaagttctttggcgagctggggagcataagcagcgaccacatagtttgttccagataccagagctttttatgaggggaacagagagaaaagagaggagagaaagaaaaagggagggagaggaaaggaaaggaaccccagttattgagataataacgtatgagcgtgatagaaagagtgatcagatagccagaagaaacggaagagatttctacttacacacactcagacttgctagcaaagtcactgctcttttcaggttaagctccgcttgtgtggatggatccatctgcgtttgagagcggagagggagaatgttgtatgatgtgtatacagaaggtctagcaaccaaggcaggtgaaaaacacggctccgatcgaacaagatcggacgaggccgaaggcgattgtggttagggttagggtaggggctacgtaatttgatctgtaacctgagtgttaccagtttgtagtctgtgatctgcagacttcttattactcctctctgttaggcttgtcttccgtctgtgttgttcatcatcgtatcccatcatggtgattgatggatcttgtttctttgcgctcttctctgcgcttctgttctcaggcatctttgtcaaggagcttgagcttcacactatcaatccatccatcctgggatccatcgtgggttatatagctcgttatcttctccgttaccgacacagctatccttcctgatactaaccttttttaaacagcggaagcgtgactacacagcattcgagatttcatgtggcggctcatacctttcttgtttctttttcgtccgtctctgcctttctccttcttctcttcattgtcagtcggatggacgacaagagaagcgaactcgtaagagagggcattcggttttagagtgagtgttcttattttctctttctccccgtcctcttccagtctctcctcttctccattctctatcgtgatgcttttatttattgtcaccgaatatatgtcgtcttgtaacggcagatttgaggtcatctttcgactgaattcttcactctaacctgtctcttcctgaattgtactcctgtgaaggattgatgctaacttttgttttatcgtatccgtttgtttaggcctgattgatgctgatgatgtcaagtaagcgagagcacagtacaaacgaagagtcaaaatggtaggttttcagtattcttcttcagaccacccacccacccacaactcctctttcgaatgattacaatcttctcttaatctgtcaatcccctgatcctcggtggagaccgaggaaaggctgagaaaccgagtattgccgcttagcggcggttcatgacaattccttctctcttaatcaacatcggccgaaaatattcaaagaaaaacgaaacaggttgctgacctttctctgtgttttctttgccagtcttgtagaacagctgtatgtcttgcctttttcttgtggttgaattgtcgtctatatcaatgtttttgtgtacaccagtcacctacgctagagttttcactcagagagttcagaggattctgctggtttgcgatctaagggcattcaaattcgtaagggacacgtatcgaccaccatcagttgaagttacttttacgcagccagagctatacagctttgatgttgtacctgacaggaacagacaaaaacctgtcaactcttgatctgaaatccgttttaagacactgacgagatggtctcctcttacctcttccttctcccgaacaacgtctgctgtcggcttcattctgcaaatctaaactaaccccattcatcgtcatggtacgcccacatgctcctcccttccgtcttaacttgatggagtaaacgtcagtctttcggtcctctgatttgaacagtccaaacgaggtctctccgctgctgaaaaacgagtaaagatgctcgagctcctacacgaagagaaacagttcttccaactcaaggagctcgagagattggctcctgcaaggaagggaatcggtcggttgtttcctcattcacttcattagaagtaaaggcgcatatgtcccatttgtgtggccggtcgaggtatctctcttggccaataactcacatctggaacatgcttcatcccatagtctcacagagtgttaaagatgtcttgcaggaactgatggatgatggccatgtcgactatgacaaggtgagttccgtcgtctttccgtccattgttgtaagtctttatgtgctcaaccaacatatatgtcatgatccctagattggtacatcaaactgtaaatcctacacccactttgacagttcggtgatccatatccaatagtagaaagacctgagcccgtaatcttcttttcttgacacactttagttttctggtcgttccagtctgccgccatgtgagcactagcactcttgctccaacatgtgcttctgagcgcctccagggccatcttataactgcttctctctattctgttcaatacgatcgacggtagcaacgtccagatgaatatattacagagaaaacaagcagaatgttccgctctccagacgaaggtcgactctttctctcaagaaatcaaatcggcactttcgggccgagaaaattgtgtgaatattttgcttcatccgtctaatactagtcttgcttatttccctcgtccagcaaaggaaaagaagagatgaggaggcaagaaatgagacaagtttgtgctgaccgtattgaacgaacgcctctctcaaaataggctgaacgtacgactcttgtgaaaaaatacagaggactccgagatcaatcgaccgaatacagagagaaggcatcggtctacggtcaagcggacccccaggtatatcgagataaagtttccgctggagagatcgccaggcgggaagcttgtagacacaccggtccgtcttgtttcttttcgcctcttgcttgctgtctatctctttggtttcttttcccttgtcagattgtgttttcgaatatctgtagacagaagataacagagatactgatacgaatacttgaacctgtagaaaacgtgctcatcctgtttgactggatgagacgaacgttcgattgtaaagaagacgctctgagatccatgtttgagattggtccgcatcacccaatttttttctttcttctgtgttatcttgttctcggtctttttccgtgccttgtcttcgttagataagatcactatctaaatttcttaacgtttcttcgctggacattatcaaacagaacctgattgggaacaaggttcgtctcggtccaattctgacgatatcgatggacatggtactgtctctgattcgtatacacgggctgcatatccctttcataggatactcgtagacacgaaaaggaatttcccctcgagtacatatgttgcagagaaagcgagcgtagattcgtgtctccatcaaagttgggtattgcatgtcattttgtcatgcacacgcccaaatatacactttctatagatgaatcagtaaatttgtgagaagggaaaagagcaaacgatgagaagatatctaattttcgtggagatcaagggtacagcaaacaagacgactggactaagatatagatcaattgaaagtactgaagtggaacaagaagacaaagaagttgaactctacgaatctagtaaaatgcgaagagatgatgttaactcttgcctccgtttcaagcggacgcattgaaagagttggtgattccctctgcgagccttcgggcaccctctccgacctctgtctcgttcacaaaagagaacgaacacctcagactgatgttgtctgccctgctgggcacagcaacatccgacttgaacagcacgctgggcgcggtgacgattcgggatttgatgcaagactggaacacgtcctccaacactccttccggtccgagttcagccagccgagggtgtttctctgcgttgatgtgaatgtagaagaacatgccaccggtaggtggggtaaagtgaacgaaatccttaggaaggtgtttttcaaaagcgctgttcatcaagtttgcccgtcgggagtaagtcgccgccacactcgtcaggtaggtttcccaaccttcctggccaccgagcgcagcgaggaacgaggtgatcgcggcgacagagaacccggagacaccttggatagtgacctcgtttcggagggccagtctctggatcaatggggccggtccgaccaaccaaccacaccgacaaccaggggcgacgatctttgagaaagagctcaggtcaatgacccgaccgtcaacgtccatcgaaaggaaggttggaattcgcttgggtggagtcggtccatgaatgtccgggtaatggatctgcagcgcccggtaaggatcatccagcaggataagaagatcgtgcttctgggcgagcttgtagatatcttgtcgtcgctttacccccatcgttgatccggtcgggttctgtccggtcacgacggcggtgaggaccttcggctttcgtccgcgcttgctctcgtcccaggtggacagtacctcgtccaagatcgaaggaatcatgccttcatcgtccaaaggaatgactacaggattgagaccctgaggtcccatggaagcgacagttcctgtagatacacgcgaaatcgaaaacaagagtcagattgagattgcgataaagacgaggctgtaacgcaaagtctgcagagatcacacagaagagcagactaaccagggtaagcgaattcttccacaatgatgttatcgcccctgttggcaatgtttcggagcacgttatccactgttttgaggtaggaaatcctttaatcaatacggctgatttatgtctgaacgatcagaagagagtgaatgaaaacgaagcaaggaatacttacttccatcagtgtttctgacgacgggatagaatgaccgagcgagcgcagaagaagtaagcaagaggagactatcgagcgaccgaaaggaagaaagacaagctacgaggcgtacccagtggtgatgatgagatcccagtcttcgtagggaatgttgctttctctctgaacgtgctccttcaagaacttgatcaactggagagacccgcaggactgtccatactgaagggcattggtgagatccacgtgaagttcatcctgcttggcgatggcgtccacggcgtactcatccggtcgaggggtagaggaagacgactgagccgggttgtatccaggaacgatcagattcttctgaaggtacgggaaactaagagtgagtgagtttacggggaaagttgaggggtgaggaagtcctgtgtatagacgacaaatagagaaaagtcacgagttggaacgttaatgtctagccagatgatgaactgtgagaaaaatagaaaaaggaagagaagatggacatacctcctccgaagttgatcattccaggaagaccgaggtacctgggcggtgaaaagtaattgaaataaaaccggaacggtaagcatcatgtgaacgacctgggactagcttttggtaaaacgaaagaattgagaaggagaagagaatacgcacttcaatgccaatatctttagtggagaagggtatctttcaactgcctcagcacttaaaaagcctgcctcgggtaataaattgaatcgacgagagagataatcaagatgatccgatcaatactgattatctagcacaaagatatgagacccgtttgaagcaacactcacgactataatccatctttttagctgcagcatgaagctctgtcgaatgctgtggctcgtccaccgagatgagttctgccttggaagcaggaagtgctttgttgatctggtctgggtcgatagtcatctccgagggtatgaatgtgtctgtaagtgtttggtgtatgtctacgtgaaggttaatggatagaaggcccaactgtttaactctaaggttgaccgttcttaaaaaacacaaaagaggaaaaaaaaaagggagtcatcgataagccccacagccttgactgaggttgttctcagtccgttatcagtcttatctcagcctcggtaccttcggctatacccgctaccgccggtcacttctcttacgtatccttcacgtttacccgcggccattcagagacaaccggcacaacatatatacataaacacacaaagagtacatggattgagtcatccgattcaggctcgcacatacaaccaatgagaacagattgtgacacatcaaaggacaaacaaaagtatcagacacgacgtccaacaatcagtgatcaagcctcctccgtcttggcactcgttgccgaacattccgcctgacgttcagcctttgctagcttcttgatctttgctgcagcaatttcttcgtccgtccgaggaataaaagaaagatccatcccatgtaccatgtcgatatccattgaacgaagcgtctcaatcccacggcgcgtccagaaatccaggtgatccggagatttgaaccaagggatgtttggagtcgatgatgactcggatgggagaaggtccgaccgagggatcgtgatgactggttcgcgacgttgaataggatagaccagattcagatagtccttatcttctcctttcatggaaccatgatcgcccttttcgttatcaagggacctggcgggtacccaccatccatttgggtccgtcaggtcaggaaccaaccctccagttcttaaccaggcgaccatcgattcttctcctctcgcgcgctctaggatcccaacgaccgccaacagcgttcggtctaccgccatgtcttcatcaagtatttcctcctctccgtcgtcggtcgaagcctcggtcacggtcctcttgttcttcctcttcttcttctttggctgagcagcagcggacgcacgcttgaatgcccgggcagactgggtcgacagccgaccatcatagtccggtacgtgtatatggttgaagggctgacagccggtctttgtgtgcgaatcatctattagtagcgtgctctcgttcgagtacctcacagatgatccatccgccgaggtttcttgatcaagatacttgtacaccacatccagatccttcaccgtctctgttttttggtctatgagaacagaaagagaagcaacacatgaacatacacacagcgcatcaatgaatgagttggttcgaaaagataaaggaaagagaaagaaaaagaaaaagaaaaagaaaaagaaaaagaaaaataggaacagcgatgctcggacgggacgtactgaactcggccggggtcaaaccgaatgtgtcgcgcgcccagacaagcttcagttgacgagagtcctttccaccttgcaactctaagaactcaaccatcttagtgacactatgaggttgggccgaactccaaaccccgacctcccaccgtgcgcctgaaagttacgcaggaaggtgaaagcccaacaaaatattcagtctcatttgtcccactcgactcaacaatgagaacaggcgcttacggagataatccagaaatgcgccgacaaagggccttcgcctaaacgttctctctgccgatgcctttggtctgaacacaagcgtcccgttcagatcaagcagcactagctttctttctactgacggtatgtctagccggaccgggttctttttcgctgattcaaagtactccggcaaaggtaccgttcttcgctttgtcggatatgatggtcgagaacgaacaccaggagaagaaggaggtgaagcagcattggtagcagcgacggtctgggtagaaggcctatgcggtcgagtagagaaatcggctggaagatgttccacttggcgaaaaggggctgtctggcgatcagagtacgccgaatgagctggagcggccgagtgaggagcctggtggtgtccattcccaccatccgaatgccacgggaggggaggctggtcaaatctatcgtgttgccgagaagacgtagccggaccactccactggtgcttagctctatatccttctctaggtttccaatcagcatggttgctcctgttgggcgatctatactgagcggtgaagccgttgttgttctggaaggacgcagggtttctcgatagatgtctttggaaacgctcgttagaatactggcgaggctcatggaaagaccgggaccgttcatgctcggcatagcctgaatgtccatattcggggtgacgcgaccgcttacgtccattctcggaataattcacataggaatcggatggaccatctggtctagcgggtagagagggggatgaggaggacgcagagtgtgaagggttccagctttttcgagtcccagtccgagcgaaaaactgatacatagagacatacacacgaacatacgcgtagcatacatagttagaaacttggtcacatccacctgattgatacaacaatcaaacgactaattcagaacgtacaagcgtatagtgaacagggcacacagtcaatccaggagagagacaaaacatataggatgcagagtgaatgaagaacgcgtcagaatgtcgtacaataacctcccgtcgacagcctaactctcgaagatcagagcaaacgagggcgtttgacttggatgtcgatggaaagtacagatgtagatattagaacactcaccgacgagccagagcggaaggaggtaaatttggattggcggacatggtatgtagtttagtggaaacgaccgacagtagaggcgaggggctgaacgcgatgtaattaacgagtttgagcttcaaccgtcgtccttcttacgttcacccccaggacttcgatgtcatggtctcttatcattctgtctgaaacggttgtcttcctttcatcactttaacatatttcttcgtgttcatataacaaattcttcagtctacgcagctatctacatgttgacttggtgtgaacatgagaacgcgaacgcttaggcagtggttagggtccgcttgagagatcgctacgaacaacacatcgagtagaagaatggtcgctggagatgaaacgcctggcttcgaagatgagacctagcaaagacgacgaaaaacgcatcagagaaaggaagatcaagcaagtaaagaatgttaagcagacacaggctggaaagatgagagatggcgatcctcgacagtcctaccttcaatcaacgtccatcaccatcaatctaccgacctagctaattcctagagccaactcttgtctgcttgctcgttctcactcagacatacagatgaacgctgtttcctcgccttcggaacggccaatcgtcacctatgcctctccgccatctttcctgacatcgcctgaatgggcaaatatccgacaggctctccgggagacgcacctgcctctcaggaacctacactggaagccggccagccgaccgtctctacggacaattcaacaggtcgaaattgacctccgtcctttagagatgggaagcaggccgtctgttgaccagactggaagcgctcgaccgagtctcggtggggagggaggaacggaaagaagtatgctacctggtagctttctagagaaaccattcttaaacatcttcttcgtatcgtgcgaggttcgtctttcctcttcagctcatcgcgtttgactctcatctgtttcattcctctttattccactactgtagacgtgtctgtactgagaattatcatacgttgatattgctctgctgtcaattttaccactctcttgatccatttaggacgcggacacctacaagacaaccatccgaaaacaaattaaagactggcactctctcgtcgtctctcggaagacccaagaatgggtgatcgtgctcgtgatgaaacctgatcctgctaccggtctagcccgaagttcaacaggggcagggaggctattcaagatgggtgggaccgtgctcgacaagatccggagtgactttaataccaataagagggataggtatgtcgtcgtcatcatcgtcctttcaagcagagctggaagatgtatagaccacgaaagactgagccctgttcgttgattcggtcattttaaaatcgacaccagatgtgtccaactctcgagaccttcgtttcctacaccagatgatccttcactttggtcagacttaatctccaaaattaaagacggaatcatcacctcgttcgactcaagggttactcagagagaagaagaaatcaagacttccgagggaatgcggacattacccggatggaacttttgtaccttcttcattctgaaggtaagtaaacagattccgtcgatacaacactcagatacaggcgcacgtagaaggagacggcttgcgagcgattgtttggctctcgcaggttctgtgctgaccaaatggctcggcgcgcttgtaggaatcgctcgctaactccttcgaagggatgaatctctatgaagatgctctaatacaatacaacgagcttgaagcatcgttcttccaggtgctcaaaggtgattgtttctattcttgtcttctcatctgaagcatgacatatgtctcagccaaaatgaacccttacatttgatataccctcttatatcgataaaacttgcagaacggaatctatccttctttggccaccttggcgctactgcatactatgacgactcggcttctgtcctatcgaccacaaccaaaccctatcgggatctcattctcgctaatacaatctctgtttttgacttcagagtgtacgtgttcgcccgacagggaaagctaatggcgcgaatgggtcgattgggagaggttttagcgaaaggcttcgagtttgtgagactgatgggcagatggcttggcgagaacccagttcgtgtctctcccgttacaactcttttgcttacaatgactcctacagatgcaatgatacaacaaacgctgatggttcatgacaactctaactgaaatccaggacgcgctcgctcataatttcatcgaatcttggatatattcatcgtgtatgaatatcatcgaaacttgtcaagaatggaagttgaacctgcctcccaacaatacttctcatttgtcagctgttagtactggtgcgaatggaagtacttccactctcaatggagagatagtcgagaaagaaaaattggtgttgactaataaaggcgagctatatcagctcgcgaggactcaagtaagtcttgcgcttaagtgagcatgaaaggctgcctcttgtatatgctgatatcgtgtgacgatatacatgtatcctcgtagctcagtaaacttggacggcaatacgggcatcttccgaatgcttatccgttcagcacccattcatctctctcaattgtcaagccttctcccgattctagctccggagcggaccgacctatcactcgacgcgatctagtagcagcgttggaaacaaaagaatcgttcgacgtattattctacagaataaccgagatggcaattgagtgtttatcgagagtcggaaaagagaggtcaactctagatttaatcggcggtctagctaccttggacgagttcgtcgttcctatttgatcatcaccgtgtataccatgtcagaccatgcccttaaccacaaaattttatctcttcttgtgatccgctctgtagattccgagaccgacttccatcagcatacgaccgttatcgagcactttctatcagagccaactcatatagctggacgcctatggaagctttctacttgattcggctactcgagcttcatcgtgttctgtccaaaccgatagacagcgcatgggtaggaagggcgctgagcttcctgagggctttggtcaagattggagaggtgggcagattggctgtttgggagggcaatggagaagacgaaagtgatagggaaaaggaaagtgggttgagaaaatttgtagaccgttgcttgaatgacatcagggaagcaggaaaacactttgaaaaaggtaggacacgtttttgttggagacaggcgctgaaatttttcattaacaagtggtgaacacgatctttcacagaccttcctgtccatgatcatgaggcattctcggtgaagcttcagtctcccaaacaagcaactggtcctcttagaggccaagaggacggttgtaaccttcatcttctggttcaaaaccatctgccttgtgtgagtcactatcagagaatatgcgtcaggcgtgatagcaatctctcatcacatagtgttatctggtgtgctgtggtatattcagactgtcactgtagatgatgttcgggcttgcctgtctgggcatgaactagagcaactttggtttacatccggaaagactgaactcaaacatggagacaatgttgtctgtgtattctgtcctgtaagtcaagagcgtagagcagacggatacccgatcagaacgactaactgctgacactctacttgcacgttctcttaaatgttcagatgccagtgtctggcctattctctttagaagtttcacaaatacgattatcgaaagtagccttccattacgtctggttaccttcgaaagcttcggatgttagtgaacgaacggtcgttcgtataccaagggattataaagcgctgaacgcgagattaactcccgctctagatcgtgcgtttatgttcatctcgaaaatgcttgcttgaagccaatcgcttacactctggtatcttcctcatttgttcttgttgtcaaacttccgcgatatccacagtccgactagattctcggccggttgtcctactccatctgatcagtggtagaaatcaagtcacaaaggcaacggttgctctccaagtgaccgaaaatgaactagtcttgctgatgaaggaagcacaagtaatatctggtggtatgtctagggttctcctcagcttaatgatatatgctgagttgaatatagacatactgatatccactctttgaatatggaccaccaagttgtcgccacattctcaacagagcaagattatctgatcgttgaaggtgtacagcctgacacgaccgtggtgatttctgttccgtatcgaggagctcctaagggagccgctcttcctgtaagcggtgtatcgtttcattgaaggtgaaatctttacactgatgatgactgtttaacttgtcgataatgcttctggtagcaaattcgtataagtgtagattactggactcagactcgaccaagtcaacgaagagcactcagaaagactcggcctctagatctgtttcttcctttgtctgtaaatgtgcacgacatcttccgagaacattggtcagtccgtcgtatgatcctcagtgcatctgcattgattcaatacttatgtgtcttgacttgtcaaacagtctactctctaagtttaccatctcctcaggtggaaatcaacaccttcgagtagcttccgccaacttggccggagcgcagaagacactcgagattgaaggttgtcgaaacgctatgtcacctatgattcatgtgacacccaatcaacctggaaacctcctatttagactcactcaaaaggatcgcaactcaaaaagttcgtaatgatctgtgcagttcctatacctgcctgagactgatcttactctttcgagtgaacctttgccattgtgtttagagcacgacccgctccagatgacaatcaagtatcggatcttagatgatggtaagggatttgcaacagcataacgaaaactaagaagtcttcgaggactcatgctttggattgttcgtatcactttgcctcaaaacagaactctttttcatgattcagatcattgtttctcctctgctagcgtctcacaatctggtagagttcaagtcatggcttgctaagactatgatcatattcattaaagccactcctggctgggccaaccgattcatcacggcggggtccatcgacttcccggacgttgacgaaaatgacatccgagggtcttgtaatcagttgggtctgggagaagaggactttaagaaaattctagacacgtgggagagggcggtcgaggttcgtctcgccttggggtttgaaaaccaaatgattttttgacacaactgtttcccttccctccgttcctcagatcttagatgatagcgtcacaccagaagtgggtcctgacatgccttggagaacattacaaattcccgtagatatgccaacgcgtcaagtaagtcgcaacaatctctcttcctttttttcgaggatgaatcaacacaccttttagacactaatctaccttgtgctgtttatcataaatttatcaatctttaggttatatctgtagtcaaactgtccctctctaccagtgctccttatcgagttggacagcccttgaaatgtttggtgacaatcacttgttcctcagcttggtcaggaggacctatgctggaagacctaccgatgtgctatgacctcgaagtcgagttcgagcattggcttgtcagcgggcgaaagagagggacttttgtttcgaaagtaagtttcagtcaagatttctcggcacggcttttgtaatgtatttcggaaacttagttgctaaccctgtctctattacttgcatcttcgtaggaaaatgagccttttaccgcaacgatcactctcatcccagttcactctgggagtcttatgctcccgcctattcaagtcacaccatctagtcatcaatcatctccattaacatcagccgagacgtatatcactaacgctgctcaatccgtcgaagtactacccatgaccggccgcgcgactttcgtgattggactttctggcgacggtccaaacaaacataacagctgtgattcctcagcagtccatccaaacgggatcgaggtttagaacattccttaatacagtttgtgttgtatagcaaaaaaacggatagcgcaaccgatttatgtattaaacattaatcgtctttttagattgaagaaaaaagagaagagagcgccttccatgcgtaacttgcaagagaaggaagagcgcagaagtaggagagcacccaatggatgtggtaagacgaaagaatgagtaaagcaagacgagaatgagccgagacgaatagctataaagtatgaaagcaggttgaagaaaaaataaacgagaaaaagcaagtgaagacgagaagtagagcaatgggtatatactacataactaaaatatgtgtttagaaggcacagatgttgaaaaatctacaacttcaatcaattttcatcagccacccacgttggaggtgttccgttatcattatccgggctcgagccagccaccaaggccatactgcctcttctagacagagagtcccatccgtttgcgttcagagcctttgtaggcggagccatcatcgtcgactgagcagtatcaggcttggtcgtccgttggcactgctcccagagcgctagaaattctaactgttgctctgtcgaaggaggatccgggttgattgatgcatatccacctggttttgtttctgaagggtagctcgaggtcgtcgacgtagcaggggaagtcccactatctgataggatttcagatattgaaagtagtgggtttgaatcaaatttaccatttgaagctctgttgatctccccagtaggagatggcccccagatggactgaggcttggccagagatgagccaccttccttgttgatgtttgcctcttcttcctcgcatgagcttggagattcggcaaagagtgattggagcgcctcaacatccgccagactgtgctcagtgtcataagatgttgccgaagcgggtgtactggccggaccagattcatccaagatcgcgaacaaagattcgtgaaggtcaaggtccggatgatgatgccgtctgccaggatctggagaggagaataagccagcagggatgacgggaggagacgacggagggagagatgagaaatcgaatggagggggcataggtgaagaagaggcgatcggatgtgacgatctcggctcatgaattccgttcctccttggggtcgacaaccgagctttcttaggagtcggagaatggagttgatccctctcttcaggctcttcatccccaaattcgaaaaagctcgaaaagtctgaatgaagccactctgcgtctgtcatagctatatcactttgtacagcggagctcaacatggcagacaacccgtccgcttcgtctagctctctatcagtcaatctttctgttccagcggcagaagtgcccaagaatgatgggcctagccccagttcaagatagttgtcagctgtgattgtgatatctgggtttggtgttggtgtgggagcagcagccgaaggcgtatcagcctctttaccgtcatcagaaagaggcttgtttagccttcggagctcgcttccccctcctccggaaagcatcttctttagtgccgttcgaggactttcatatgcttgttggttcatacttctttttaccggtcggacaggagaagtcagtggcagagttttcatatctcttcctgttgtcggattatgatatggcgagctaggcgaaaaccgcgtgttcgaagaacgttgtgtgctcggatcgacgtggttaccatgagaaaacctagactggaacgacatgtttcctcgaattggagaagtgttgtgcatgtaggttgtcgagggtcgagatgagggacgaacgccgagcgggttctcgggggaagactccatatgtgcgctcaaatcaccccacaactccttcggcctcttcactttgtgtcgattgtagtatacaccacaggctggttgttatcaatttaccaaaaaaaagaaaaaaaaaagagaaaagatgatatgaatacacgttgttatttagaacatcaagcataggagaggagggaatcaggttgacttaccatcacaaactttgccacatccctccttctttctccagccggcgctcgtgagactcccgcagttctcacatccttctttttctggtctcttcccacttgacatccctcccgaaggtttccgtcctctcactggtccagcttggagtgcgtcttccatagagctcggtcgatcacctgttgactttctcttcacaccggctacggtggctcctccagatgacgagttaactctatggatgccgcctccgaacgaagtaaggatggcttcttttcgacgagcagtgcctgagatggttctacccagcttggttgaccctgcttcacccagccctgccaacgggctgtcagcatcttcaatctctcctccgtcagtcttgttcgcttccgctgcgcgtgctgcgttcaataaacttttcaatatccccgcggtctctttgtcgtccgttaccttcgcgtctttattgatcaggttgagaaggtcgactagctgaggggtaaatgccgtgaagttttcggtagctgcttgtagaagatctggtggagacgtcatcaagttggatattgaggtgagtttcgttgttgtatgcacagagtttgaacttgacgatcgattgggatcatgatgacgtttgggcgatatttggtgtgaagactggcacgatgcatttggttgaggaagtgatagtgccgatgaaattttagtgggctgagcgttcgttctggtcgacattgacgccgaagaaatagattgagatcttctattacttttcccactgatgatggttgccatcgaagaagaaggaccgtcggacaagccggaagttgatgattccgggtgtctcttcgaagtagatgctgcagactttgatttatttgtcgcgcccggtggtcgaccccgaccgcgcttgaccggttccagtggaatcgtctcagctaaatgttctggcgtgttgtccgtcctgaataattcctggtgcttcgatttctgagaagatatagacttggccgagtgtgtcgtttggactggtagtttcaagccaggagaatgcgctcttttagtcgtccttgacgacggtggcgcctggaaagggtcgaatgttgatccactcaatggtgtggaagatggtattcttctcggactagaatgaatggaagtgttactggggagtagtggttgtttgaatgaggacgtggatgaagaagacgaagaaggggtagcggcagattgactgattatttttcgggaatgagacggtccagaatttaaaacgggggagtttaacgatgaacgagtcaatgttggtgacgtcgaactggaagaagccggcgttgaaatagattgcgctggtagtggaagcccacgttgcaagaaagagagatgagatagatgctgagcgtgggatactggctttgtctaatgaagcccacaaaagtcatgaagtgcaaaggtacattgagcttccgctatcgtagggttcctccaagggaagtatggtagagatatatgaacaacgcaccacaacgagcctcagccggatttctaaccactcttcaacatcactctcgtcctgatcatcttcctcaccttcaatttcatctcttcttagtattcccatcactaggctttcacactccttggacgcgtcatccagtgcccaaccgagcagtccgctctgaacctctacgggtttcgctggggaggtcgatgacttcggattatacatggattctctatatgtttgttttgggttagtgagatgaagagagtaatctgtgtgaggagttggaaggagtgaagggctacacgtgggagaaagacgcatgagagcaatcagaagattggaagacgtgcaagcagaaataacatggcattggttagttgcaagaccttcactagacatccaagaccgtctgattcaccgtctaatacgatcgaaatcaaggaatacagtcagatcagaaaggagaaagatagagtaccttgaagcaactacggttctgacaacctcgcccagcgaacaactcgcccaccggtctgccgcccctcgcatctgagggtgtatcttgatgcgggtaggtaatcgggatcgagcaaatgttgtcgttgtcgacggtggaacggtatacagtacatggactgtttccaattccatcattccaaagacgttcaaacacatctcttctcgatcagaatgacacaatggacaagagaaaagagaattccatgagagactgaccgtgaaccgaccgaggcgcgttagatgttgaagcactcattttgataggagaccggattgatgattggatccctccaagctctatctgacaaaggtctggtatgtgagatggatagaagcctgtcctgaaaagaaacacgaagagtgtggcggacacagatagtactcgcgaggaaacgaggagtggtggatatgatgtgttcgcgaagagttagcagagacaaggaagaaggaatgaacaatcggaatgagcaagagacgcgtcgcttgttttagacgcgtcttcacatgacgcgtcatcaaacaaagctgttggatgatcggacaagtatcgtcatctaagcgacctcgcgttctttacagactcgttgcgttgtgagtagactagtcgaatgtaaagctcagatacgtaaagaccggttattactattgtcgttttttaacgagatcattgtatgagccatcacctccctcttttctgccattcgaacgagccaaaagaggtgtacaaatatgttctcatcaagccaatcgaacgagaaacaaaacgaatatatagaaggatttctcgtttacatcttgttttgccatttaccactgtctggttggcaaccagtcttggcccttctctttgatcaccttgtccgcttcttccctcatgatgtcctcccatatcttggcatcagcagctctgacgggcccaacgttgccaacaaacccatcgagaatcatgttgtctggtatgctctccagcctggtgacctctcttctgatgaacccaacgatctcgctgatctcatcgaccatgcttagcggatcccattcggctgggagctcgttcatcattggtggcgattcaatcgtggtaggcactggaccaattctaccttcacctccaatttttggcacaacgtcctgctccctgatcactccacccattccatctggtcgaccgatcttgaaagacttgacctgtcgtttcgaggcatctccctggggtattttgataccatacgtgccctgctcgatccctcgaccggcgaatacgttccgccaaacgtacccggccagctcatgatcggttccgcagattcccacgtcgaacgaaaactgggtgccgacccactgctcaccgagatctcgaatatactttttgatcaaactctccggagttcgtggaccaagcgtccgtcgcatacgagtgtcaagaagagagaaaaagtgagcgagaatctctttctgataggattcggccgcagctgccggaagagatcggattcggaccatgtgaattctagggtgttggagaataatcagcgacacgactatgatatggaacttttgattgattcactaacaagatgatgagagactgagtctggaaatatgactggaaagtgggaggcagcttgcactctgtaaaaccagcgaaaaaaggaaaagacttgttagacctaatcattccgttgagagatcaattcagcacgcaagtatttgcacaagatcgtcgtaccttcccagaaaaagtcttcgtttctctccaggccgtcacaggcttgaccaagaatatacctcgttccgtcgatagctttgctcgttgagttgcttccagcaactttgacaaacgccgacaagaatttcatcacaagtgggtggtatttgatgcccgagggaggtggcagaccaggaagagaatttggtctaacacctatataaagagaaggatcgatcctcctcgaggaaggtgaatcggaaagcatgtagggcgtaatagaaaatgggcgtaacacatgtgttggagaggaaagtcgggctagaggagccgatcggagcaacctagccaggtgagttggagaaaacatgtccaaagtgtgacgatcgaatacttgtagacgttgtaactacgggaacccaaaagagccaaacggatcgatctgaaggatgacggtgtatagatctagtgaagcctactatgagatcgacggggtcaaaaacagacaattcacaacgatcaaaggttcagtaagagacagataacacataatcaccaccggtactatttcttaaacttacaaggtagacaaaagtgcgatcaaacgataaggatagactgaagtgtatgtggtcgaagagaaagagttgaggagaaatcgattggctagattaacttggaaagaaggctgtacgaatatgagcgcacgtgaagcattcaattatcttccaaggctgtgttcggtctgttcccgccttcagttcgctcctttcactgtccgacggtccgttcgaccggctttaacctcgatcaaccagttctctgctcttcggatgtctttcactactacaacacctctatctatcacgccgacacgcacatcaaacccgcaacagacagcgactcagtcttcctctgatggctcaaacgtaagctcaaacttcaactcttgccttttctaagatgaggtccgcagtcttttaaaagccatgcgtcgggtagtgttcacgggaattaatatggttcttatgaattgacatgcctaaactagactcctagtgtctacttgatttgttttgtggtgatcgtgagtatatcttctcggcgatcttacgtctatgttgttggaaagagttagtaaggataaggacagaaagcttagccgcatagagtcatctttgtcttttttgataattactgttagatctgtgttctactttcgatcgtaggtgcaattcttcttttctcattcgttctaatctttgaggttgataaatgaaatctttgtaccacagtccctatttgtcgccatccgcgccgtcctcatccgtaggcgcatccacgcggcgtgggccgcatcaggatttgcagaagacttcttcgacaatcatccatcgttcccaacgtccatcactggactaggccggatgggcacactgtctggaagagcagaatggaacctcgcgtcaccccagcagggccgaagtagacgcagtgggaagagtaagaagctggggaagaagccagagatttgggagattgcaatggacgataaggatagcttgacttgggacgagccggtgttcggagttgacgaagggaaaggaaagagcaagagacacgaatgggatggtctaagaggtagagttgcttggacaaacatcaatgtgagttatgttttaacgattggaatctttgaatgtttatagagtcgcgttgctgacgtgttttatttgtaaacttcttctaccagccaatatcgctcatccatgttccaccatccgttaatatcaccaatgacgacattacccagagtttcatgaccaacccaccatacgcttctggatcaataccaaaagtctctcaagatcttcgactcaactcgttatcaccatcaagaccgggggcttccgtcccgtatcctgctccacttcctaatgtgtctgggtcagatccctccgtacagacgttagaatatctccttcctggtcagagtcaagtcgatatctctgtgatcatcgcgttacctgtcgacccggtcgaagcagagaggaaaaggggaaagagacaggcagatctactgtacaatggaggagaggatgaaggagaagatctaccggaggtttggctaggtacagagagggtcttgattcgatagacatgcatgttgttgattaacagaagcgggatttggtcgaacgaactgtcatcaaataaagacttgcgtcgttcacacagctcaagacctccactttttgtatgcgtactcgatgttctccacagcgactcgtctagcccgctggttatgagagcgcgagcggtcgcacgaacaagaacgtataatcatatctgtatccacgtcaagagccaattgaccaaccagacgtgtccgcgacacgtgaccttatcgtatgagcctgacgcgtagtctcagggcaggagctaagacgtacacttgcgggggctcctgcagtttgcgcttaattccgcatctttggagcagtaacggccacaacctcaagcctttgtcggaacttgtgcataactaaccgtttgaggaaaccttctacttcatatggctactaatatcacctttgttgaccgtatagatcggttctgatgagagctcgacatgtgtgcaggtctgacagtgcggataagcccgactaacttttgttcagccacctttatgcctcacttctaatgcctctgctcggaattcttctcctttttccgctgctctctctttgactccactctgataccttcagtcctgcagtgccttcggcatctttgcaaatcattcctctctgctgctcctctttcggtcatggaaaagcttggagaacaaatgagttgcctcatcctcagccggatgaatcatgatccctcttttttctgatcctcttcttcttcctcttgttctttcctcgttcttggccatcgtggcaagaagaacagaaactgaagcaaatcatctgagctaatcattcgcaacgagttctatctatatcaactgcatggagctacgagatttcacatcttatcctgttgcctaggaagacaaagaggactaaaataagatgaaacaacatagcagacggttgctacatgccgtctcaaggctatcacctctagctaccgggcccgatcttgccctttcttcctcatctctccttgacgcgcccggagaatatccatgcatcgttgatgactgaatgtttctcaaaaaaaggtgacacggctgatgtaggatactcagagctacgaaacctactcatgtaatcatcggcatattcgattgaactatgggacatggtccaacatcgtggaatacaaaccaaagtgtatgtctccatagattggtcatataccataatctgattttgcttccctctcgccacaatccacctataacaagactcattgatgaagttctcgacgccttcgtctttgacacctgagcgcccgtttacaattcttatcccatctaatatccttattgctcctccacattccgtttatttggttcaacctagcctgtcccgttcgatccattcatccgtttgtgcgatcaaccacgcacaactaccgtggataggcgctggtttcggaagtttaggaatttgcctaaaatctcgaaccggagcttttgcaaaccaagagaaccgccggttctgattgatacagggtgggatgtgtccgtcgttcagagagccgcctgtgtcgtctgttaggtcttcagagggagacgacattcggagcgtcagattatcgtcggtacctccgctgactcgatcgacatctccaccggatcagtcatcgccgacttatgtcggtcaagaccaacagctccttgccgaggaagtttcctcgagcgttgtcacccctgttcaatcagccgttagtcgtccatcatacgggcggatgagtctgaaattccttacccagactcagagtcaacctcttgactctgacctgctttcaaaccaaccgcttcctatatatggtcaggctgatcctcaaagccaatcgccctctctaccgcagtcccaggaagaatccaatttttttcaacactccttccgaccttcagttcatcagtcaagctcggtctcgtccgctaaagtcagcggaaaggatctcaaggatcccgttcgaaacatcgctcaagatgaccttgataaattgcctcgaggaggcccgagctcttctggaattcagtacaccaacgagtatggagacgaggacgacgacaaggaagagacgtcttcaaagaaaaggagacgggtagagacagcctgcaatggctgtaggaaaagaaggagcaaatgcggtggcggcttgccatgtaattcttgcttcacgaacaacactgaatgcgtttatgtatgtatttatctttctattcatctggataatccctctctattcttcgatagaaggtggtggttatgcccaaagaagggcgatggagatatcgccgactcatgtcttgatctctgactagtatggaatcaatctttgctttttttttagcctcctcctgcaaaaaagttgaccctgaagtaagtttcctctctcgtcaaatgcatagttttgacgtgggatgactttctctcctcgctcttccctgtccggctaacagttcatgtttttttttaccacctctgattgccattgctgcgccatttcatacgccatagacatttcgaggaactcgagcgaagaattgttgaacttcaatcattaaacaacgcatatgaaggccgcacaatcgcccctggtacaggtgtttcacctgccgagtccactcgttttgacacgactcaatcacaacagcggcagactgcttcctctctctatgaattctatcaatcagatttattttcttcgatctcaggcggtcatccagatgcgcgcttgacccaagagaatggcagactatatccccagccacttcctcaaccggctcttcctttccaatcagatctgcctgtagggttatcaccggacggattccaaaggcgacccagtccagtcaaaggtcctttcttaggattgtcctcccaaggatccctcatgagctccgaaaccactgtggccggtctgatggtaggagacttgtccagacaaccaaacgtacggagatggtctgtcgccacagacaacgacataggaaaaggaaaagaggctcgaaccagtatgaacgaaggtgtaggcaagacacacgaggtggacatatttgatgcgagcgatgccgtcaacaatatggaaaccgataatgcggttgagacctacaaaacagaagaaggcccggaaggagccaagaatggttgtggcgatgtgccaatcgacgaaagtgcgcgtaggcctcggtgggaaaggataggacgtacgtgattcatgtctcgttcgtgttgatccctcaagactgttgcgagcagctactcacgtcgaacactctcattgtaatattttccctcaactctagaatttggctataacacagacgtagtcgaagacgctgctgcaaaattacatggaaatgatcagaaccggtcgacagagatggtgccagatgcgtttgtaatgcgtggtcagtctataaaccagcttgttctactcgagatcagggcaggtcgaattactggtctgttcaaagcaaccaccaaccttatcaaaagcttaccatctcttctgtttctctatcccttttgtacagctatggagcctccatcatcggggaacaaacttgttcgtaggagccgtttttgctttgcatatacttgatctcagtacttgagcgaaattatctttcttgcgttctttctccttcagttctgtcttccaccgctggctgaggccgaggaccttctaaaatattaccatgagagaagttagttggtttttcattgttcctctttggctgattccatgctaacgtcgatttccatgtcaactactttcgcagtacattacttgttgcctgtgtttgactttgtcgatctccacgataggtaaacacacttcttcctctgaacacctctttatacctctgaaaccaagctgattccgacccagatatctggaagctactttgtggccaaagttgaaacctcgaacagcgatagatctagtctttcaggcctccttgaacctcatattttccatcgtcgctgtgttaaggtgctccaaggaagatttggaaaagcttcctgtttatttccgaaacagtcaaagcattatgagtgtcacgcacggtacatacatactcttgactccactctgtcttgtgcatattcttcatcgttgtcttgactctgaattttttccaaaccccgtttacacaaaacgtcaaacgatagtactcatcatggcgaatgtcgaaatgattcgatatctagtgttgttgtgctgtgggttttcaacggttttgtcttgatcattctccagataagctagctgaccgagtgatttgagttgtcaatcagattactcgcaaaagtgagtagacctcccctacaaatgtgagatcacgatggatatcgcgctcaccatcctgcgccttggtagttgttcaaaaggactcttggcagtgaacgctgttgggctagccatatttatgtctagaaatattcagctagacaaatccgatgtcaactcgaagatcaacatccgagatagatgcatcagacaaaggttgtgggcagcatgcgtaagttttccctcactgtcagcttctgtgacccttctctttctaaaggagtctaatcgaaacatgctcttactacacctacgtgtagatgcaaatggaagcaacgacttcagcgtgagttgaaagtatctttccacgatctcagccatgcgctatactaacttcttgtgctctcactatcatcgacatgtaaaaagaatgttgtatcgacagacaacgcttaaggaacacgattttgctgccgactctatgatactcattgacgatgatgatctctacccatctactcagcgaagcatcgacaagcccaaagatatactgttcttttacgaatcaacgaaactattttctatcaaaatcaaggtccttcagaggcaagtcatttgtttctgaacttacatccaaggcttacctgataccgacagtcatgaccgtatgcatcttttctattgtagactttacgccttcaaagacactatcgttcttccaaatacctcagcacttgtggagcttgaggtcgagcttcatgaatggtggaaaaaggttccaagtcacctaaaggaaagaacccaagatagtgtgctcgacgcttccaatacccggcttcagatgcaaagtcacaatcttatatccaggtgagaatctactgaggagtctgctggtcatcaatctagttgcctgatctcaatcgtatcttgggtatttgaatggcactagatattgcaatgcgttggttctcctctatcggccattcctttttttcgtaggcatactattctccattttgttaggtcgtcgtggcaacgaagacacactttaaacatcgtttaactatgttcgcctatccgtcttgtttgatatgaaagttctgctcggcaccgcgaaacaccgctgcttctcaaaccaacatacgtaacgatataggtttgcgcttacgttttccaagttcttccttctggtttgcctagcctgtctaacatctttcatgacctatcagccaggaagtcggctgccctctgtgcggaagctgctatctccttgattaacgaaatctcgcgaacgtgggacggagctcaattaggcttttggtggtgcgcatgctcgtcataattcattgttgcatttggatgaaaccaactgaagtttgtccggatcactttttaacaggtgcctgttgggttatgtttacaactctgctttggtaagtctctcataattcgtttgtcacatcagttcgtccacagtttttgatcattatgaccatgatctccagattatccttgctcgtaaggttattatgttctcttgagcagtattcgtctttcatactgaatgggcttctgaattgctctgacagatcgaatcgtcaaccaagtgcatcccgcatcaatcagtgatagcgctgaaagagaatctacggaagctgttcgccaaggcctcagcttcctacaatcagtaggcgcagacagagaggatggcttcaaattcggaacgcactggtctactccgcctaaatcagcccgatctacagcgcgaaggtgtttcaaaatattggtaaatatccagcaggccgttcgagcgccacccagagagaaagaagccattgaggccgtctttcgggaatctggcgagcaagagttggaacccgaatgtcagatacaaggtcccgaccctggcatgccctacgtgttagagaaagattccagcgcgcccgttgctcccggaaacggcgagttcttgtccgactggctggaaagtaggttgatcttttctaactgtcctgttcgttgatcgaccggaagaaacaacgacatggctcacttagcagttcgtcattatttctggttttcttccgtctcattttctcagatgcagattcaaatttcctagacgaagatacctctacacccttcaggccgtacgagtgagctgtttctgccgttcatatgaccttctccactgagctcattttcacgagatatcgtcatgacatctaaaggtacaaccccaatcctgatttggcataccaaacttcctggcaagactggacatgtacgttgctagatcattgccttctggatctcattgctttgactcacctatatgtatctggcgtatgcctttctgtcgaaccgttgccgccagctctgctcgaaacggtcagtagattatgcacttctgcaatcttgagatttgaagcgttctgattcttgagcacaacacttcttttctcttcgatgaaattcctcttcgccagggcctcttgttttcagccgacatggatgatgatatactagaacacgttggcctctgaatggatcttaaaaattagaacagatgcgctggtctacatcaaccgctggcttctattctgttaattccatcttatcatatctgattctatcttgtcctttcatctgcaggtctctttttgatctaaatcgtgttttccctttttatgtcaaccatgtatacacaactgttctcatttgttgagcgtgtgcaaattcggcatatgttctgtgcaaaggccttacctgattgaatcaattaagccgcacaaacggcttgtgaaaagaagggagaaaacttgttcattcactataaattactctaaggggtttctagggaaaagatatttataaaaagagaagagaagaaagaaggggtaagggaagagggaagagggaagagaaaacacaagtagtgtacagtctatgttgatgagaaaaaggaaaaaagagagagacgggaaggaaggaggaaggggttgcaaaagatgggatgatgaacgttatagacacatttgacaaagggaagagggtaagaaggcaaagagtgacgtgagaggaaagaggagggaagctgaaggtattcaatagtctagccagaaaagtctaaaggatgtttcctcttcgatataaagaaaaaacgtgtgacagcatattgataggatttagaagaaagaaaggaaaactctttgcaacaatgataaaagaagaaaagatagagatagagaaccaaacccgaaagatcaaagggtgggcgaagtaaccagacattcttcttagctaaccattgcgtctgaacccgctccggcttccgtctggcccgacctggatcgttcattggacgatccatcttcattgaccatcgagttctctccattaccgcccgagccattcgagggatacttttgcgggctttccgactgtccttgtgtctgaacctgaccctgagtttgggttacagtttgttgctgctgctgttgttgctgcctgctcgattgaagtcgtggactgccttctatcgaatttgctaacgaggaatttccttctgagccaatcccaaatgcggcttgaacagatctggcaagctgtgagttctgcggagccgtcaaatgatcacccggtcctgacttaggtctcgttcccgtaggagatgacgctctgctagtacccggtgagttttgagtggaagccgaggcggaagtcggataacctgggaaggcagatccaacaggggcagcgaggtgtcgaccgtcccctgatggtgcacctcctccacccgaccgaccatcaccgccaacattggcggctccgctcgggactgaggaaccgtttgggttggatgaacctgcgggcgatccgttgtgagacggaagaggcgaagcattgaggatatcttcaaccgattgtctgctcgaattcatctgctgagctcgggcaagggcctgagcttgttgaatttgaacggcttgaacctgttggtgagcggccaactgctgctgaaagctcgccaaggaagcgctggtagaagacatggtcgatcgagggggtgacattcgacccgggaaggacatccgcggttgggattgatttttgtgttgttgttgctgctgttgctgctgttgctgctgttgctgctgttgctgctgttgctgctgttgctgctgttgctgctgttgctgctgctgtagttgctgcttttgttgctgctgctgttgctgttgttgttgctgctgaaagatctggttctggagggcagcctgttgtgacgaggtcgtgtttatgttgttaaagtggttaaacgcgttaggatatggatgtgatcgatgcttagtgtggtgatggtgattcttcgaaccgacaccgtgtccctgatcggtatccattccaccagatccaccaaaatggttcaccgggctgctcgcccttgaatgaactctgctctgggccggactagtgaccgcactcgtcgtacctgttcctccaccgttgcctagtccgaggggaccatatccaaagggcagcccgttcgtgttcatctgggggaaaatgctcatgtttctcaacggaccaagcacgggcgaggttgagggcgtgaactcgaaaccggtgttaccgacctgttggaagcccatcgggtcgtcgttgaacgaatctgaagattccgatgacgcgggtgatggctggtgggatgcctcggccgacgtgaacgcataaggcagagacgatcgatgtcggaatgaacggggttgagattgaatctgctgatgagcgttctggagctgttggagttgttgaagctgttgctgttgctgtgggttgaaccccatctggttaccgatcgagagaccgccgaggtttccacttccgaccagtccattgtacaacgcattgtttgcttccggccctaccgatccagcagaggaggcagaggcggccaaaaacccgttggatccggcttgaatggtgagagccctctgagcggcccgaagccgatttcgatagctcttgtggcactcggagtggtggcagtttgggggtgttaggtatgacagatcggttaaatcgcccgcgccgacggcgtgatggatagcctgtccaggctggtggaaatcctgttggttaggtcccccaactgatggctgtgctgtcggtatgacattcggagcggcaagattgcccataccaccgacatttccccaccgatctctctcattggaaaagccattgaagggtggctgtgccatcataccaggtgtgccaaccgggctcgtgcccgaacttctctggccgttcacagggactccactggaatgaccgattatctgtctgtgacgcatctcgtattctgctcgacggacagactcagaacgctccatctcgaacagctggtcggcagcggcagcagccaacgcagacatctcgttcatctctgagccgttatcgacatgggcaggagggaagaggttaccgtcatgatgttggctcgagttctgggaagattctttcggagcctttcgctcagagtccttgaaaatcgttcaaagatcgattgaatccagggaaagaggcaatattaccaaagcgtgaaacaaaatgcatgcgctttagcaaaaaggacgagaaaaggaggaaggaagatggctgtccatgaccagaggatgatgcttgaaaacttacttcgctgtcctcgtccttctttttactcttctttccagaggaaccttggtgtatgcggatatgtcgggtgagctcgtcgcttctcgaaaatcgtttgtcgcacccgggatgagtgcacgcgtgaggtttctcgccggtgtgtgttcgaatatgtcgcgtctgagatggagtagaggaggaacaagagttttgcgaatgtcggcagaacgagagggggagaaagaacgatagggtgagtttcaggcaaggaaatagcaccaggggctttcctagaagggattttcggacgaacctgatgttccagtctgtagaaagctcgatcacagagtggacacttgtacggcctgggaattttgctcttgtccatcgtcaacgcggcctctgtgactgtataaagcgcgtgagtcgaaagagctagtggcgaaaaacaggacggaacaaaagaagaaggaaacgtacgagctctaacggctgggtcgttcggatcaagtctgccagtgacggggtctggtattggtgtaggaaatgacatgtcgttgaagaatgttgacattatcgaatgttgttcctgcctttgaatttatcgcagaagggaaaggatggggttgagatagagctgataagggatacgaggtgagttttgagtgtagaacgaggtatccaattcaaactgatgaccaaggatagatgttaggccgattcggtgaataagagaaccggatgagaaccaccagacaacctattatgattatagagacagtgaatgtcgagggaagaaaggatgggaaggtggaagacagaagacgaaattcgaaacacgcaagcagaacagtcagcgcccggagtctttactctgccaagaccaaggccaactcaagtgttcagtctgggctaggatctcagaaagagaaggagagagagagagtgtgtgtgtgtataggaaacagaacagaaggtatggaagcacgaccgggatagaaccgaccggggacaaaaagaaagagtcggacccggacagaaaaacgtgcggcaagctgatacgcttctctgttttcgggtcccttgaccgacgaagcaagccattgccgcctttggatggagcgaacgcgtttggcttgccagtgagaccaagcaaagacagagatatacacacacccggacctacaataaaataaaggaacagaaggaagaaggagaggaagaaggaaaagagaaaggaggaaaggaagaaagagagaaggctagatagatctacctagcgtttcttacgtgttctcacgcaatgtgaaacagaaagagacaaccagcagacgagaaggggacgcaagaccgggtcttttccttctctttctctctcacaaagtccaaggtatatgcgaaaacgatcggtctcgagatatagagtttgaatggagaatagtggagggacaggcgaaggcaagaaggctagaagaaacacaaatctaaaggggaaccccggagaactcactgattacgacggctcagtcgatcaaagacctttctcggccggttaaagaagagcgccaccaaacgaagggatttcttcaccgggttctttctttcttccgtgcttaagccaggaactcgatggccggaacaaatgtgttgtctctgtatgtatatgtgtggtagagactgagagacggacgatgaggttgaggcgaataagacaaggccaagggtgaaatgtcgagtgggaactcgtggggaaatggaacgtgacccaaatttttctccgccgtaaccataggcctggtggttacatcgactcaacggcggaagaactcttcttatcagctgttctgcttttttctatagcatcctgaataataaactcccggaagaagaaagaaaggaaggaagagagaagaaagactgagaacacagagatggtaatgataaggagccccccccccacacccacacacacacacatacacaaagaagagaaaagatgagagaaagacaagaataaagaataaattacctaggcagcagcgatggagaacgaaacgaaaagaaatccgcctaggatataccgattgaattggcgagaaaccggaaaaattgaacatgaatgtatatgtatatgtattatatacatatggaagagaagacaagaatcaatgtgatggtatgcaacaaagaactatgaacctccaagagaaatgaaaaagactgatggagacaaaggaaagatccagaagggaaaagagatgatagatgcattaaggtctgatcgaaataaacaataagttaacagagaaaaggctggagattcttgattaaacaaagaggttcattcggcaaggaggaaaacgtataccgtctgaagattatacggtggccccgcccatttgaaaccctcttatggccccttcctcattttcctcccggtcttcatcctcgaagtattttttggctctctcggtgacgctgtcgtaaaagcttgggctagggccgcatctgcctcgtcgtcatcatcgtctgcttcgttctgaccgcccatatcggcatcctcgtcatccttctggccgcgccctccttgctcctcttcgtcctgcccatcgtcggcgtcttcctcgtcttcagcctcgaccttctgatcgttttgatctacgttcgacagatcaccatttccctcgctctcgctctcgagcccgtcgccctcacttccgttgatacgggctgcaggcgcccccccatgcttagactctcttcttcttcttgtagaaccctctctcgctttttcgttttcttccttatcccgctcggactcctgctctgtaatgatcgatccagaggaaactccgccgggcacgtccatcccggccgttttcagagctgcttccagtagatgaactcttctccagaccgagtctagctctctcgaaatttcttcccggactacgtaaacttccttccgaaccatatcttgtagactggtactgctcgcctgaagcgtattcagcacgctcacacatctcctgtgatgatcttccacccgatggatcgtctcgtccgctcgacggttcatctcagccgaacgggtagtcagctcggtcaccgttgactgaagcgttcgagagtcaaccagggcgtcgtaaaatctttcgaacggcgcgaggaacgttgctttgggtggagcggtcgaggtcgccgcagacggagtagagttctgtcccgaggttgaatagccataaggcacgggcgaaggatgagacgaaccctgttgatgctgttgctgatgttgctgatgttgctggtgggaggacgaagggtagtgatgagatgaatggatcgagagaggagcagggggaggagctcgtccagaggaagacgaggaggaatttgaagagaatgacgtttgaagatacgaaggtgaaggagccgtctgaccaccgttaccgccactgttcgtcccgtatccaccttgcggagcactccgagaaactgattcggtaccctgctgaacagagatcgaaggacgctgatggctcccaatagagctcgcccgtccatttagtaggtgagccggttgagacgggtaagtgtgatgaggtggcggtggcgggggtagggtcgaatattggtggagttgttgttgctgttgctgctgctgctgctgctgctgctgctgttgaagaaaggtgtaatgatgatgatgatgagatggtgcggtcatatgagggggataagaactcgtcggaaatgtcttgccgcccgctgtttcccctcctggtgctccgtcctccgatgggtagatttgcgccgattccgagctagaaatagccgttcggccagcggatcctccagaactgcctcgttcgctttcctcccttctgatctcacgaccgtccgatctctttgctagactttcatctgctttgtcttgcgaagtcgggtggtgaagatacaaatgtgggtgagaatggtgatcgatcgaaggaagctgggacgtcacattcgagttcgggtttgaactcggatttggccgtggaggtgactgagagtaagccacaaatgtcgacggtggaggaagcaggttagaggtcgataccggtctaatgatcgggggtagatctggccctccacctgctgccgccgtcgttgatccggaactgggaccggaggacgacacgttccgtgaggcagaatgacccacatccgacggcaccttgtcttcctctgccgtgttcatcatcgattctgcgctcggattctcttcggctttcttggtctttgccctagcttttgaggaagccgtcgaattcgagcccggtccacgtttcttgtattccttttcgtttttgggcgtgccctttcgctgttggatcaacgcctgttgctgttcctttaatttgagagcgctcaagatcgagtccctcgtgtttggatctgtgccagtaagctgaaagccaaggacgacaggagagaccggtggcttgtcggattgatccgacgcatgatgggaacgaggttgatgttgatgctgtggtcgttggcgatctagatttgctggcaaattcgagggagacgaccgaggtggaatatgttgacccaggttaggtgagtgggcagaagaaggataggaatgggtatgatactctccatccatgttcggatatgcaagtggaggtagagaattatttgtgaacgaggacgccaaagatggaagcagtcgaggtcgtttgtgattttcaggatcggtggaacggtgtgagctaatttcgttcgtggacgcgtttttttgtgagaaatatcgatgggacggtgatctgaatgaatgaaaacaagcccaggaaatttcaggtcaacgtttgtgcttgtgagagaaagcgggaaaggcggaaggaagaagggactatgggacttaccctgcttgttgctgctcgctctcttcctcatcttcatcaaactcttcttcctcttcttctgcgtcttcaccgtcgctgtcatcgtctttttgatcgccgttacgttcttcgtcttgattattgttgtgaccttgagctcgtcgttttggacggccggccggtcgtccactcagaatgatctctgtttcgttttgggacgaacgagacggtagccgatgaggttgggacggatagacaggcgtggtagcagctctttcgatgtccgattttgcaaaggaatagactttaggatggtttgacggtggcgacggtgaacctcggagagacgaagttctggtttgattttagaggaaaaaaagaaaaagagaaaaaaaaaacacgaaaacacgaaaaaagtaggaagcgtcagatgaagggacgatggatcgagatgatatccagttggtgaaaacagaaatgagaataggaaagagaaagaaagaaaacaaaagacgtaatggatatagagacaagagatcgaagactaacggatgatccagagctccagaatagtagggaggagccatagttgaaagagtttccaaaggtgaaacctgaaagacggcgttcacgatccccgatgaatttatacttttttccgactctgtgtttctgttccgtcctcctcaagttgctctgttcgttcttttcagatctcggatgaaacgagttctagagaacgatgggactgtctgcggacaaattgcaggttgtcgaaagagaaggaggtatagtcttaggaaagaacaggaaggagagaagagaatcgggaaaagaagggaagagatggagatcccagtctctataacctaccacaaacacacacgcacagtacacacaccacaagcacacactcacgcgcactctctacacacgcgacgccgaaagaattctcgggagggggaaagagagagaggggaaggagagcggagaggcttggccgagaggaataaggctaaagtgtttgtgagaaacacacaatacagtacggatgtagagaaaggcggctttggaaaaagataggagggaatcctggtggcc

SEQ ID NO: 2534 - DNA, 37348 bp, Xanthophyllomyces dendrorhous
ccctcccccagtcccggagttttcgttccggccttgctctgccctgccgttcctgagggtttcactttcggtcggcaagattatgtaatgaactccctatttgcctgcgctatattctctgttccctctattttctttatcgtttttgtatgatgctccggatatgatctttacggtaaagcgatcagtgacgattcaatttacatcgccaagccggcggcttgctctttctttctcattcttccaggtaaaaaggaacaaatcacatgcaaatactttgatgccgtgagtgaacgatgctagcatgataattgatagaaattagacgaagcttgggaattgttttgtcatattctgttgtatatcattccttacgctctcctctaaaatcggacgatcagagtaatttcttcatgcggcgctaactgtggaaagtgtgtggtgaagaaatgaaagacgagacgcgcgcacagagaaacaagggcaaaaaggcttccaccaccggagccgaaggtggattgatacttacgtaaacgcctcgtagccatggccgtaaatgggtgacgtgtaaccgcgctggatgactgtgatcgatagttgggtctgagagtccaatcgatcatgacgtcgggtttccatctcgggtctgttgtttgtatattgtgtgcctgtgtacctgcgtgtgtgcccggaagggtaggtgtgcctgaacgataagattccccccccctctctcttggtgcctcttgcgtgcccttttcgagcccttttcttgttccttcttttttttcttttttttcttttcatctccgccctctttgcctctttctcgtcactctttctttctctcttccctcttctctcttcttcatcacccatctcctttaacactctctctccaagtaacttcctcctccttcccatcctccttcctttgttcagttcagttcaaggaaagaaaaggatggctgctcaacgcatcaaaaagagtctcttttcgaagcaggtcaactccggctcaggctcgccctcgccctcatccgaacagacggtacctcttcagaacgtgaaggatgcctttttcgaagattcctcttcttctaccatcatcgacagaacggcttccctcaaggtacgttggcttggagctcatgactcttttctgattgtttctctgctctctctcctgtttccttcctctcgtcatgttctacccttcacactctggacatgccatctcacaatactctgatttaaatgttcagatcgatatccccaaacctcccagcgatctaggtccgggggcccgcgccaaagaggtgtatgtcggctatttctatctgtttcctttatcttcatcatctcatctcactcaaccctcttttgttctgtccttcggatcatcttactcgctctagcttgcctcaaaagggaaaggttgacgctcctcctccagccgttgccgctgattcgggtaagtggttgcctgtctcgccccaatcggccgtgcttctcacttacctacccacgccctcttcatggtatatagctcaagggatacctgccgccgagaatgtggacgatagcccgggtgcgcctggcaactccgagagaaaggttcgcctttttgttccacaataagatacgttgtccggtactccttcatctctttcgttcactaatcagcccattttttatcctttcgaatcttactaaaccttatgcaggcccttcgagaaaggcttcttcagtctcagggatccacttatacaagcgtcgaagaatggcggtatgttgctctgtgctatcaatccatgcgggcttatttccggtcacctcgtactcatccctatttccccaatcttttcaaactagaatgggagaagacgaaaagaaagctgctcactggaagagatggggaccttacttgtctgaacgacagtgggtgagttcctcgttcccctttctctttcttttttccctctttcggtcgaaaatatcagacaaccggctcacaattcatctctccttgacaggccaccgtccgagaggattactctgccgatggagatgcatggtcccatttccctcatgagcatgctcgaagtcgagcatatcggtggggagaagatggaatcggtggaatctcgtatgtccacgtttgattaggtgcgcggttgagcaaacacgctgatgtcacaatcattcattttcaatcccacagtgataaccatcaaagagtctgcttcgcccttgctctctggaacgggcacgaccccttccttaaggagcgactctttggagttacaggacaccaaggtaaatgttgatcgcctttgctaactttttccaagtcgatgagctgacattctatcttctgctgtatacattgtggtctttctcctgtaggaaaccacggagaggatgtaaaagaactttactattatcttgattcgaccccgacccactcgtatatgaaatttctatataaataccctcaggctcggtacccttacgagcaattggtcgatgagaacgttcaaagggatcgggatgttgacgagttcgaggtcaccgataccgacatctgggatgacgaccggtattgggatatcttcgtcgaagtgcgtcatttgatctgttcataagcctgttaaatacgctcttgtctgacaattcttgcttgtctgatactttcctctcttccagtacgccaaagacgaggaagacccaaatggagtctccatccgaatcaccgcctacaacagggggcctgaagcagccgacttacatatcattccccagctctggttccgaaatacttggtcttggcccaaggaggaacctcctcgaccccggatgcatgagtccgccgaaggaaccattcaagttaaccacgagacccttggaagaacccatctttactgtaccccctcccccgctccagccgcgcccgcaaaaggtggcgtcgtccttgtcgatggaccgagtgttgtacctgagctgatgttcacagagaacgataccaactttgaggtaagtcccttcttcggaaactccgtttttagtgaagaaacgattactggccaagatctcattgtttctttcctttcttatagcgactctacggaggaaagaacaagacaccttatgtcaaggatgctttccacgatcacattgttaaatctcatcgaccggctgagcctgatgcagctcccaatctatccgagctcaaaaagtcccctagtgtgaagacgccccgacttcctccataccatacatctgccggcgacgaggacgacaaggatgaggagtcccagacgaacggtgatgacgacgagactgcccctcctgccacgagccctgaagcgcctcctcggccaatctctgaggccggtgggcgacagttcgtcaatcctgccaaggagggtaccaagtctggtgcgcactattcattcactcaggtgcctcctcgaggaggttgtgttgtcgtccgactcaagatgacccaggccaagccggaggaggataacacaattgtggacgaggaagctttcgatgacctgattgaagataggcgaaccgacgcggatgagttctatgccagactcgccagtgggcctatcagcgacgatcttcggaacgtgatgagacaggctctgagtggtatgctttggaccaagcagttctacatgtttattcagaaagaatggatcgagggagacccaggacagcctccgccgcctcccgagaggaagcacatcaggaacaaggcatggaagcatatgtacattgccgacatcctttccatgcccgacaaatgggaataccccttcttcgccgcttgggacactgctttccattgtattcctcttgctatggtggaccccgcgtttgctaagaaacagctcgaccttttgactagagagtggtacatgaagccggacggagcgcttccggcttatgagtggaacttctcagacgtcaacccgccggtccacgcatgggcaaccttccgggtgttcaaaattgagcgaaagctctttggcagggaggacttggactttttggagcgagtcttccagaaacttctcttaaactttacatggtgggttaaccgaaaggactctgatggaaacaacgttttcgaaggtggtttcctgggacttgacaacatcggacctttcaaccgatccgagcctctgcccactggtggaacgttacgacaggcagatggaaccgcctggatggctttcttctgtttgaacatgttgaacattgccctcgaattggccaagcacaaccccacctatgaggatattgcctccaagttctttgagcacttcttattcatctctgatgcgatgaccttccagggagcgggcgaagaatctatgtcgctctggaacgaggaggatggattctattacgacgccatccaatggggtaatggccactctcagcagattccgattcactccttggtcggactcattccgctttatgcaaccttgacattggaacctgctgtgatcaaacgattccctggattcaaaaaacgaatggactggttccttgagaaccgagccgagttatctgggaggaacattgccaatatgaaggttgctggaaaggctgatagaaagttgctagcacttgcctccaaggagcgattggttcggatcctcgagcgaatgttggatgaatccgaattcctttcagatttcggtatccgatctctttctcagcaccaccgagatcatccttgggagatggacgtcaacggagaaaagttcggtgtcggttactggccaggtgactcgagatcgggcatgttcggtggaaactccaactggcgaggtccgatctggcttgctgtcaatttcctacttgttgaatcgcttcagcggttccaccagtactatggagaaacccttttaattgagtgtcctaccggttccggcgactacatgaacttgggggcggtcgccgaggagatccaacaccgactgattcatattttcgcgaaagatgaggacggccgacgagccttcaatggaggaaatgagaagcttgatagagatccaaacttcaaggactaccttcagtttcatgaggttcgtccattttcttaccttcgctaccttccctcgccattgctcactctgcgttgattacatatagttcttccacggagacaacggtcgtggtctcggagcctcccatcagaccgggtggttagtcttttttctgtctcttattgatcatcatccgtttatgtggtcttgttcgctgattccctaactacttgcatgctgtctctaggacgggtttggtggcgtatcatatcatgcaaaccggagtatcttgtcgacttcccaagacacctagaacgccacgatcaaccgctcgacactactttgacgaggttcgtcttttcgctgattcaggtcctttcttttccctctattagggcatatttgctaacttctcgttcattttcgtccttccagagcatcgcgacgccttccgagatgggtgacgagcattctgtgttctctaatgaggtgagttgactgtccatgtatatttcatgggagtgcttttgacctagaatttttaactgacgatatgcgctctccccttattcttctatctttgcaggatctcaacacgcttggagacctttcgcccgaagctttgtagacgtgttgtggcaggttttgatcctgtgaaaagctatatttatttattcctttcttttccttctcatcttgactgtgtagaaccccatctgtgtgttttacttttaccatcgttcgtgtatactgtgtgtgtgtgttgtgtcgttaaggtactcaaacgtctatctagatgaatcattatgttctctgttgtcttttcttctacactcctgtttctctcccttctttcgaataattttgcgtttttgtgtatttctcttttgttatgaaaagaaacaaatgtcgtagtatattttctctacccttggactgtaaatgctttagaagagaaatcaaagactaagaggtattttgattagatgaaactttcaagaaagacgttttccgctgtgcgtttgtgactcggaggcaagagaggcggacccagagattcaggaggaactacaattgaataggcggttgcaaagacagactggaagacaacaacacaaacaaacgaactgttttgatgaacgaatgattgacccaaaagacaaagagaggcagagagtgagatactaagaaaatggatagagtctatacaacagtgaattgaaaatttgaagagaaaatgtgatgaagcaatcaacaagagtattacatgaggcgagagaataagaaatgggatgaggatgcaagttgggagaaaagactgtagagaaagaaggaaggaaggaagaatcctttagtacttgacagtgtcgacgacctcgacctgctcgtcctccgcaatcttcttctccgagagatcgttctcgtaatccgagactcgctcagttcggacttctcctcggagcttggcttggttgttgagctcgttagcgacgaggatgtagcagcctttggtcttccagatccagagtgagaaaccgacgacgtagatgaaggcagggacagggagccagaaggattgtctagttccaaacttgatggcgagcgcaccctgaatcggggggaagacggctccaccggaaacaccgcagacgagaagagcagcagcccgtcgagtgtgtcgaccgagtccctctgtagagagaacgaagatgacggggtactggatagccatcatggcatagatgaccatcaggcagatcacaccgacagttccgtggatgacagcggtgagaacagtgaagacggtgcagaggatggcacacacggcgaggagcaagggagccgagaagatcgagagcaaaccggtgaaaacgaatcggaaaacggtgaaaatgatcaaagcgtaggaaagaaagttggaggctttgggcttggagaagtcggcgctgtcagtggcatagttgatgaagaacgttccgatcgtcacctgggctccgacgtaggcgaactgagcaacggcaccaagaataggtcggatctgcttgtagaagggcttttggagctggttcctctgagcctcgggcatgttggccacagcgacctcggcctgctcctgaagctcggcctcggagacctcagggagtcggacgatggcaaagatgacggcgatgatggcacccatggcagcgacggcaaggtaaacgaactggacggtggtaagggaatttgcgtgctcgccggtgaagaagtactttgaagcgatgaacgggccaataaaactggcaactccgttgaaggactgggaaaacaagagtcggaaggcggccggttcggcaggaggcatacaggaaacgtaagagtttgcgcaaacctccagcgtggccagcccacaggcgacgacaccagtgcagacaacgaaacctccaaagatagcattgttggatgactttcccgcaaagtgggctactggccagaacagaatagctccgagagagtagaggcagagacccatgatgatgcatttcttgtagccgtatcgcttgaggacctcaccggcgatgggggagaagaggaaataaccgataccgaagtaggccacctgaagaccggtcgactcaagcttggagatgttgaggacatcttggaagtgcttgttgaggacatcgagaagaccgtaacagaaacctggaggggtcggaaagcaaaagatgtttgttaagcaagcagagccagaaattgcgctcaaggtaaaagaaagagacgtaccccaaaggaagaagagagaggtcaccagagcataagcggagtagtactctttgggcatcaaccgcgtcttgaacgggttgaccgaagcaggcatgggtccagcagctccaccagccatggttaagaagtgagagtggggttagaagggaggaagggaagggaaggtgatttaggtgttcagggtagagagctgatgagaaagcgaagtgaggatgatgagaatgaggagaagaacctttgggactccactgacgatctcctctttatagaaaacattgatcgtcgatggagacgatcccaattcgaccgacctctgtctgtctgtttgtatccctcactggtagcccgggttcagcgggatgggcggctacacaaaatgctagatggaaggaggacagagtcggagaaagaacaaagaaaacgttttgaagcacggtgttcagaagtaagaatgttcaatagagttcattatagagattctagcctttccagcaatcgttcggaccgattacacaatggaattccatgcaattaaatatgccgacataagtgaatcccgccttgtggtgcccgatctactaaccgccggttgggggcaggtcagaggttgggatatccgggtcatgagacccgagtcatgaatagggattgtcgattgagtccctgtttcaggtgcggcggcggcgaaatcggacattggcgtcgggagagaagcacccaaaatagatctagctctatagcttagcgtcgtaggtctgcaattcggaagcgcgtgagtgtgtatgataataaccccggcagttcctgattgagtttactgtgcattgtgactggtacacttccctttccacaacgtttattcagaccgggattgtattctgatatcttcttattctttccctgatctgttactctctctttgtctttttttttaacaatgcaaagcgattgagaagaggtcaccttgagttggtactgaaagtgccttccaccgattgtgtattctccaaagagataatgcgacccgtgcacacgaaaccatgaccgctcggtatcatatcagttttatctcttctcagattgcttgtttaccgctcggacggtgttcatgcaatcaaacataatctcaaccgaccacgtttgctgaactcgatccagtctaatacaagaagatgtattgatcagggtgcatacgtagtcggaccgattagactcagttcttgtactgttgggattgccagtcatactttctcgctttcctccgatgtaagagtgaacatgcttatttattcgcacccgtctatttgacaggcccctaaggaaggagttccaatcgggtgtagattagacagttgtggaaagagaaaaaagaggaaaagatcggactcagaaatcctcgaagctaacagaaccaacagcttgccgccgagatctaaagcattgatcgtcagaaaagagcttatagaaaaagttctaaagagtatgcgtttatagccgtgcgcactatattcaacacttcatcctctcatcttgaacgactgatccccatgtcacctgcggttggccttaattattgattgatggagtttgtaggcatcgtaagaatatatcgttcaatatattggacatgcagaagtctcagaatagtgtcttgtcgttctatctatatatctgaatgccatcttgaacatgaccttctgagaatgaccttccgtccgtaacaataactcgagaacgagatggattgataataacgtgatatgtggcaatgcacagcatgttagggttaactctacatccagtcctccggttattcccaacaaccgaagaactacacttgacattcccgagttccagcagaaccagactctacaaccagttgcttcatcacttccaccgtcagcatcacaatgtctttcctcagcggtcccgcagattgcggacctgtaaatcctcttgctcagctctcaaaggcatctgccgtcgatcaatctcttcatcgggtatgttcctgtttcgacccatctgctttttgcgcgtagatggcgttcgtactgatttactcactcttctgtctatactctcttgtcctctttctaacacacaggatcggttcgtttctcaacaaggacattcaaacagctctgtatgtaccagagtatcgttatacgtcttctgtgaaaacgatcactaacaggctcccttcaaaaactagcttcgaagtcttccttcctcctcaagacctcaacctgcacaacaccttcagcccggttctctttcccagactcgaacgtctcctcagccattcgacttaggaaacctccaacaagcgttgcctcaatcatcggcatctggagctgcatggggagcagagtttcagaatgtcaatccaagacaaagcagtcggatgcctcccgacggatggaacgtaatggaacaacactggggcagggctcagggtcggtgtccactacagattccacacgttgttctccctcttcgctgaccatgtctatcattctcacaggtcagccatccgtgaatcgtgtaattgccactcaacatccacaagcctctctcacacgctctcaagattcttgggatcaagtcttccagtcccatattcaaaccgctgctccccaattccaccagcccgatcaggctgtctctttcagcggctatgaccagtcacagcaaatgccaatgcacatgctataccagccccagcttcaatccatgggtatgggtatgggtatgggtatgggtatgggtatgggcatgggtggtggtctgatgtatcagcagccaccgcaacccgaagtactctcggcaacagagaagggaaaaggaaaggaagctagctgggaggatcaatttgagaagtatagtgcattatcagaatccaaactaaacgaagaagttcagcctatcgagaaagaagatggcaagggaaaggaaaaagaagtcgatcttgaagagtgtgttccgccttgtcttttgtgcaggaatttgtcgtcgactaacaagatcgaaagctcatcggaattgctcctttacctgacgactcgtcttcttcagaatttggaaacaacaccaggattcacctcatgatgaagacgtcaaaaactgggaacaagagttttctcagttcgccaacggctccatcgcatccgcatacgaagagctcgaagccgaccaacgacaacgttatatagacgaacttcagctagatgacgaccaactggcagaaggtacaactgacgagcgaggtttccctaggttgggcaagtatgagttcggtgagtcccctcattacgcttcagacttcaagacttactgtgaaaagtgattctatatcgaaaaagtgtctcactattcaaccccacttccctcctcaagagcgcaataatcgttatctcgaatcacccccacatttgacccaaccgccaaccgaacaatcttctctatctgaccgagcgctctttctggaagcagccattcaatccaaatccaactcagagaccgtccgacagccaagtgacctgctccagcaagctgaatcctggctttctctcggagagacccagacacaagatgaaaaagagcttgctgggatccgtgctctcgaggcagcccgagacgaatttgaatccatcctgtcttccattcctaatgtcgaatcagaggaccacgtccgagccagatacgggctcggcagagcactcatgtcactcgcagtatcgtacacaaacgagtcctacgatgaggccgcctatcttagtctccatcggtacttgacattgaccaacccagagaaggcggccccgttaccgccaccgatggaacgaagtgaaattggaaaaggtctggaagggaacccatgggaggtccatgcaaagctcaccgagagcttcctgcaggttgcgcgggaggagaactcgcaaggccggctagaacctggaactcagatggcgttggggctcttgtactacagtaggtcttacaatcttttatgttttctgtccaacatttcggtagagctcgattctagcattcaatcaaccctcttggttcatcaggcaacggtgattatgaactcagtgcggattgttggagcgcagccctgaatgctactcctggagtgagtctttacctcgtatctacctgggtgttggctattgttcctagctaatctcccacgccggtgttttacaggatttcctactatggaacaggctgtgagtttccaagtgttttgatcacatacgaccgtttcgtcccgactgatctggtcttacaattctaatttacagtggcgcgactcttgctaacggaggtcgacccgaagaagcaatcgatgcctaccgacaggctcttgctatccatcctgcctttacccgagctgtctataacttgggtgtctcatgtgggtctctttcttcctccttctctctctgtttttatctgttgactgaccatgcatattatcctttccccgaaactctgtgtaataggtctcaacatcggagtgtaccaagaagcggctgaacatctactctcggcactctctttacatgagacttctcttcagtccggcggaggaggcgccaacgggccgtcttctgccgaaggagcgccggccgccagacagttgctttccagaaatgaggccgtcaatcaaagccaaaatctatggtccactcttcggagagcattctatgccatggtccgtatacctgcgcttgttgacgaaaccatttcgaagatgctcacgctcaggttttcttttttgtgctcgcatgttatttatctctcggtcaaacaggaccgaccagatctggcagaactcgcagtagttggggcggatatcaacttgttccgaaaagatatcgcgttttgaagctatcgcatgaaaattatcgtacatgctcaacggcgaccaagactgtctccgaagtttagtttttcatgctttgaaaagaaagagaacgaatcaaattatcattcttcatctatattctctttcttttcttttgtacgccatgaccgagccgccgcctcggcctttcgagcagccttttgctctttgttgtattgttgcatccggctgacatgctctttggcagtcaattctagttgggtgataatcgtctcgcgcacggcgtctactgtctattgagagaaaggaacagacaagaaagcgtttccggcgtgttgaaaaacaacccgaatgaacaaatcggagaaaccaatgaatgaacaaggaagaatagaacagaatccgatctgatatgatcagagacagttgaagtaacgtggccagacgtacctcatccctcaaagcccagcccttcttcacgctcacacagagcggttcccaagtcctaccctcgatctgcccctcttccaaaagtggagctctccctctggagttgatcaccttctgtctagtctccttcacgcgttgctcgatctgttctacaggcacgagatccgtcttggtgaacaccggaaggagggatacagatcgaggcaacgcagcgaggaagagctcatccgacgcgagaaggccatgattaagaggaaagagtatgacaaccaaggatggaggagtcggtgggcgttcggttacataatctgttcggtaaatcccatagaaccaaaagatagactcttcagaaagcatgtcgagtaaaaacaaaaagggagagaagatcagagagtatgtgcttgcattggaatagctctccccattccggccgaccccgctctccgtacccaggagcgtccaccatgatgaattgatcgggtatttcgaagaagttgagcatcttggtgtgtccctaagtagacatagacatgagcaaacagggagcgatcgcgataacatatcagcaaagattactcgaacggtccgttcatgttggcgaaccagaagaacgggaaagaccaaccgctttggatgacaccttgacaaggctagtcgaagagaacagagcgttcaacaaggatgactttcctgtattcgatcgaccggcaaacacgacctctgtatagttcaagcccatcaagcggtcggtcagtccgacctcgtcctttgattgattctgagctctttaagaatgttgatagaaacgaacaaaccttgcagttttccctttggaggtaatccctccggagtcgctgccgacttccaatatcgagcattttcgaatgctgctcgaaccgacatcttctgatttcctctctcgtcgcgagcctgaaactggttgttcggatacgacgtgttgggcttccgtttgaacaccatcttcgtctgagttaccggtaggtctgatctcggttttggtttcggtttcggacttgtttgaggagccggtcggaacagatcagaaggagtcgagtggaaaaggcgaagaacggaaggagagattggtcgagtaccccgacatataggacgaaggaaagaagaattcatcttgaaagacgttcttgatgaatggtttagatctaattgtgagtgtgagagtgaacttgagggaaagtgtgccgggaggtttcgctcgagtccgaagaaatgatatttattctaatttttctaaaatctcgtgcgcttttctttcactttctccgactgtgacaaaaccatcgtcagatggatagatttacttcatgatatacaggagaagcgttctagaccttgagatcctccatcgactcttcgtcctcatcttcacttgcctctgaggcttcttcttgctctgcctgttccctctccttctcactcaagaaactctgccaccgttccgcaacggccgttccaacagtagagttgccggtcccgctcatcactctcttcagacattccctaactcccttgctctctccctctccccaaaggtacatcagccaggtcatatggcaatcgacctctccctcatctcccggcgcgttgaacccggctcgccacgcgtcatagatgtgctcgaggacgactctcgagctggggaaggatctctcgtgcgcaaaggccgctcgatagaacggtgcggtaggcaagtactttgctttgatcgttctgtatgtatccagtcgttgtttgatcgacaacgcgggcccgatatcttcagaatcgataaagaaggaagcaggagagggatgaagtagagggagggaaaggacgagaagctcggtgtgcgtaggcaaggaggatgaggcagttccggatgaacggagggaaagcgagagaagtcgatgaagttgtgcgtgtaattcggcaggagaaggcaggagggaaaagtaatgagcgatgatcgaccagagcgccgtacggtcggccgcctcggcgggagatgtcgattgaagaccaacggggatggcctgcgcgacgaggtcgcctagcgacgacagctcagcttcatcatcggcagacgaaaactggatctcgacagacagccgggatgcccaagtagcaggtgatgaagggaacactttcgtcgcctttcgagcgaacgttaagatctgagcggatgggggtggagcaggcgaggcaagaaggtgtcgaatatgggaggcgtgaataccaggcgttgtgtgcggcggtttgagcagacttgatagatgatactgaatgtacgcgctctgtgtttatgcggacacgaattttaatgtaagatttgagatagaggggaaggggaatatgttggttagcaaattagacattatcctttgacaaaaaaaggaagcgcgtaccaagccttcgtctttcacatcggcctgttgccttctcagatcttcggcgaacacttccaacaacttgtccttctcttgtccgtcaagcgcttggacaccctgcttgaaggaatcgaccatggttttgaccgcatcgatcaaatccttcccactcagtggctctttctctttggactcatccactttgtactccctatcctgaagccctctcctagcaagaacgacccaactctccgccttggattccaattcgctttttggatccgtcagagatgtatagaccatgcctagaagctcggatcttaaaggcgtcgggaacgttctgaagagcgtgaggaacgagtggaagagttcgagttttccagggagcgcctcaagcgcattggcccaaacgaccttcacaatcgctccctccatgatggctttcctaccagcagcctgatcggcctcgtactctggatctttgacaccaagaacatcccaccgtcggcggagtcgctcgacccagacgagttccatctttgcgtactcagtccagaggtgaaccgaattggggaccaaacggagaccacgttgaagaagagttcgagcggctgtcggtgacaggttctcagtgagttcgtatgaggataggaggacatagagagtgggtgatgttgggtgctggagaagcgcactaaagaggtttgagaagaaagtgtgtaggaaggcgggaaaaggagtgagtgagagcaaaagacggcaacaaggaaggggttataccaggtaagaacaagctgagtaaatcggaacgaacgaggcaagaatctttccgacaagctttttggcaccttgctttttggcaacttcagagtactggatccataaaccaacgtctcctttgaattttcgagtagctctgtcaaacaggcttaggattcgacgttggagggagaaggacgagagcgagtgctttgtgtgtgcattttctttgtgatagtaacacgggaaagaagatgagttgagcatgcttgatgacaaagagatggaccagatatactgaagcacatactctgtcgattgaatcgaatctttcgaagctcttctaggttgagctcatactcaatgtacctcagaaagtcctcctttctaccgactctccgaacgagtgctcgctcgaatgctgttcttcgtttgatgatctctcgaatttcatcctgaaagagcacagtcacagagcagacatgaggttctgttgtcatatacagtagccagagccaaacgatgcctacctggttgaatatcttcttgtccttgaggtcattgagctctgggagcatttgctccaagctagacgagagtgtgcatgtatgcgtgcgtgcgtgagctcacgcgaacgatacgacctctgaacccgaaagacaaagcacacaaccctaaactcacaggtagtctactttctccatgctgggctgctgtccttgacgttgtagaaagctgaatcaaggcaaatccgttgggcgttgggtgtcggatgctgggtctgataaacgagaaatgttaacagtgtggatttaccaaattctttatcttagataatttatgaaatctaccttaaattcataaatccaggctgatcccatctctcaccctcaccctcccatcatctaccagcaacgacgacgacgacgacaacaacgacaacgacgaggagtagcaacagattatctttctattgcccgctctcatctatcctatatttactctatatctgtagtctgatatgccatccgagtgagtagctgctggtttgttcggtggtggtcatcaatcaaatgcaatctatccgcgattgccgtctctgtttccaagaccgatggctcatctttcatgttgtccttgctgaaacattcgctcggccttttctcaatagactggcttactggatcgtctcctctcctacgatagatgacgatccgtccaggacgctctcagacatcaagcctgctctagatggtgtactgactgatccatccaagtacggctcggtagaagtaccccgtctcaaagtgcgttctgcttcctatcatagaattctatccgcccttcatctgtttgatcgaaccagcttactttcgtcctgctcaacctcggaactaggccggcacgctttcctctttgctttctctctccgacagtctaccgaagcaggacgctttcttcacacaaaccgtctccaagttactcgacactcttcgatcgctcctaaacgacgacaaggccaaagtcgagcttcacacaagggcaagtccctttctttctgcatatgagactattttagcatcttccaactctcttagaagattgaatctgaacgatgattgacaagtgtttaaactgacctctgaattctgatcatctactgtcaattctaggtaaatgatcgaccattagaggagtacattttcccgcccgacaagtcgggctggaagtgggataacggtcgatggggagctcacggaaaggtggccgaggtgatcgagaacttaagcaaagtaagtcactgagcgctctcaccaagccaacatacactcgaaatcgactgattgctgatcttgttgatcacacgtgggctgggggtttcggcaaacgattctgaatctacaaatcgacgggattctatcatgaaggaaatgaactctatcgactccattcagaaagcgaggcttcaggcctacaatttggccaaaggaaatcttacggccatgcaacgacgtctgacgttagttttcctttcttgagcagcgccaagtttgaatggttggcctgactgatttgtatattgtcttaccttggattcggtttgaacagtggaaacttgtcgaccaagtcgctgggagaagtcgtatcgaaagatgatttcgtaactggagatagtgaatttttagatactttgatggttgccgtgccaaagtgagcacatgctttctttctcaaagaatccggatacagttttcgcctacgcgcatagccatgattcattgaccaatattggcctgatttctgttcttaccctcttttctttcttttgaatcgatagtaatttgaccaaagactggctgtcaaagtacgaacggctctgctcgatgatcgttcccaggtcgtcatcgtaagacttttccttcatcctgatctgaaatctacttgaaggatcggagagatttctgacccgttgtttctctttctgacgatcacagaaaaatcgcgtcggacgacgaattcacgctttattcggtgacagttttcaagaaggtcaaggacgagttcagccaaaagtgtagggagaacaggtttgtgctaccccttcgtgttgctaaacgtaaagaaacataaccggtgcttcctgtctgacaccaatccttacctcgaaacgacttgtgttctaccaggtttatccttagagatttcacctacgatgagggagcaatccagaaacaaaagcaagatttagagtatgctttgattgaggaacgcgagctctgggtgggttttccatatcatcgttttgtttgatgtgtgtcgatggcagcagtcagcttggagagaattactgatgcttaaggtttgatccttcgtaggccgatcttgtccgtctctcacgcacaaacttctccgaggcattcaagctgcttgtccacttgaaggttgttcggttgtacgtagaaagtgtgctccgatatggactgccagccgagtactcagctatcgctgtcaaggttcgtctctattctgttctgtctggtcaacttactattgtactctcgccaaaattctaacgaaacaaaaatcgttcctcatccctttcgggtccaaataatggccgttgatcaattaacctagcctgagggcaagacgtcggccaagttgctcaagacgctctcgagccagtatgcttatcttgcctccaatggtgacccgtctcggcgaacgaaggatgagaagtccgcgccaagcggcggatcaggcaaaggaggagacgaggtgggcggagagtgggccggtgtgatggaggaagagtggttggactttgtgctgtttgaggtacccaggatcgtttaatacgcacagagttatcgcggtcagctagatccacccggtatcttgcacttccctttcctccctctcatcatttgctatttttccctctatatatcattgtgactactcgacccaatatcataaagtttccgttgaatgataatttcatggatacatagcttgtcgggttgatcaaaagcgttacgtaaggatggatgctttgttggacaagcgaactgaaatgtagaacagatcaatcaccatcggcagccaacttcagctcacccaaaccactacctttcaaattacacttgatgacttgctcttcctcttcacagccgtttctacaactgatctctggctctcgtgtaatcaagcagggggctgaagccgtaagctccgaattgatctctgcctcgaaatgtgtcccctagctctgacctcggtcaagagtgatccattctccaactaacgatttttgctgaatcacttcaatacttgacatatcttagaaagtctacaagaccactctcttcccatcaccaatcttgactccatcgtcctcttcctgcacgacgcctcaaccgacgacaactttgatcaaacatcggttttctaaaaaatacagacaccctcacctggatgcccagttgaccaaagccagagtgatctcggaggcaagatcgttagtccgggcatgtcgagggggggtcaacgttcctggtgttagaggaatcgactgggagacgggtgtggtcgccttagagtttatagaaggatggagtgttagggaggtcttgggtgctggggcggaagacgaggacgaggatgaaggtgaagaggagaatgaagaagagaacgaggacgaaaacgaagacgagaatcaaattacgaaggaggcaaacccttgggatgggttggatctctgttcgttaacttgtcctttgctcctcctctttgtgatccttttccttcgtaatgttatccagggtcaactgacaccctacgcttcccctctgttctatctctatgaaccggtatctgacagcattcatcccgagtctgatcggtcaccagctcgcgcttcttcacgcggcagagattattcacggtgatttgacaacatccaacatgatgcttcgaccggtgcacaaagaaccgaccggctcaagagctccgtatgaagtggtgagtgtctgacgactatttatggacttttgtatcgcccagatccaacacggtggcttccgtgatgtcggttcttcatctgactatctctctttcttcttcatattgcctttaaaacttctctcctctcctcatttctcttttacggatcctttcgtcatctaaaaggtgatgattgactttggcctagcattcatttcgaatttagctgaagacaaggcagtcgacctctatgttcttgaacgtgcattctcatcgacccatcctggaagcgagggcttgtttgaatcaatcttggaagcgtaccgattgacagctgggaagagttggaaggaggtcggaaagaggttggaagacggtgagtactttgcttactcgaaacctgggtttgaacgatgtcgcttggcgtgcgcttgtaagactgttcgcctcgggatcctgactttcgattgggatttgattgatagttcggttgagagggcgaaagagaagcatgctgggttaaatatatatgtgtcattggaatccaaaagcagagtggagcaagcacaattgagcacaagaataggtatgatcccaacatcagagcagagtacatcatccatttcatcaaccaagtttatgcgcgggaggtggtttgatactgttagcttctatgacaccaaagggagggaagaaactaggaatatggatgatctactacagagaaagcgaagacgaggaaagatagattataaacataaggatctacatccacgtcaacaaacatgttggcgtggaagaaatgtcgcaaccatttcagtgtgtccgtttgtgcatagcaatatctatatcgtaactgattttgtgccaggcgacagttttgttcgaagcttttgtacctgaaaactttgtgaaatatgtcgtaaggagaagaggggctagattgttagtgaatatatattatttcccactaaacaactgaagtgaatgaaaatagaagggtagaactaacctcgacggcttggtgagtagtcctccttatagatgtggacttttcgccgatagaccctcctctcactctcgctccctcctttcctacacatccatcccctcgtctactttttcttcttttctggcggagcttcaccaactcgatctttactcaaatcaactcccaagccagccatatgcaaatctatgtgcgcgattgaagattcgaatgaagaatatagtgtgaaccttgctgatgctaccatacatgcacatgtttatggaatcgatgatgggagtagaaaacttactggtaagcttgacttttctgttggccccctttttgcctttctttttgttgttcgattgtataggcagatgcgtcgagggatttgtggcggacgatttgataccacctataaacgtgacgtcggattccacgagataggcaagtaagtgagtcaggcatcacagataataagggggatgagaattaataaaattaatctggtgagatggtcttactttctttgagcgccctttcaatatctgtggggactttgagggcatgccaagcatctctaaattctgatcgagatgcaaggtcgcgccagagaaagaactcccactcagctaagaacgacaagaagaaaaaccatagcttggtcacgaaaacataccagctgtgacagctttccctccccgttcctctccaacctcgttgaagaacacctgtttaaatggcccgtctttcttaactcgcataggcagaaccttgccttcttggatgagctcctcaagaacctgctgagaaccattccaagactctttgagtgacttgaccgagatcccgccctgcttgtccttgttctgttggatagtggacagaacttgagccggcgtagagatcgcgtggtctgcctgatgagtgtgagaagggaaattcaatactaaatcagccttggtcgaaggacattggtaggatgaggaccaaaccgaccttgaaagcgaacagcttggtctttgggtcaaatgtcacccgttcgtgctccttgagcatgttttgaaaaacaggattccattccagttcctcccaattggaagccaatgcgatatcctctgctcgagttggaagccctttcctctcctacccaaccaaatccagaatacatgaaaattagattgagttcgagaaaggaacagaacatattaaaatagcacacgaaccttcaatacacggacagcataggagatcctcgtgttgatgtgaagaccttgcccagtatctcttggttgcgagtatgccgagacttcatattaacccaggaaggaacagatcgtcaataaattcgaagagttgggcaggaccacaaagaccaaaactttacacctacggtcagagtactgagcagccggcttcttcttctctggagaagacgcatcatccgtcgacctggaaggcgacgacatggtatgtttgattcttgtgtgggtggatgagtgactgagcgagacttaccgagtgggtctaatagccagacctggaagttgccgtaaccacccttgccgtaaccccaaaggcacgtgtgtcgcgtaaccacttgacctccacgctcacacttcaccctctactctctacttcatcccatcctattccatccaactcaccatctcatctctttttctatcagtccatagtctattcagcatgtccaacacctcctctgcgtcttcctcagcaggattcgagttagttgttgatttctttgacgcttttgttgtagctgttcgagttcttcagttcatcgcttactctcgttctctcccattctttctacaactacgcttcttgggaaaagcttttccaacgcaaaccgaaacgctcaccttcttgcttccacgtcagctcgagcaggtgcgagcaagactgttcttcccaaagcaacatccacaggtaccactatcgtcggttgcttgttcggagacatcgaggccggaactgctggaatcgtgcttggtgctgataccagagctactgaaggaccgattgttgctggtacgctttccatatttgctgctgtcaatctctttctggtagcaggaacttgagagtgatcacacttgcttatcatcttcccaaaccacctgtcgaaacttgaatgttttgtgggggatacacgatccaaaagacaagaactgcgaaaaggtactcatcttccagtacctcaacgtcgccgctttctcttcatcgatacctgacacatcttaaattttgctatatactagatacacttcatctcggaatcaatccgatgctgtggagccggaactgctgccgatacagagttcaccactgctctaatctcatctaatattgagttacactcgctctcaactggaaggaagccgagggtggtgacggccatgacgatgctcaagcagatgttgtaccggttcgacctctgctgctattcattcgttttctttccgagacgatactcaaacacccacaaaaaatcgtatctcattcaacaggtatcaaggtcatattggagccgccctcgtcctgggcggatatgacgctacaggtcctcagctgttcactgtcgccccgcatggatcaacggataagttgccgtacgtgacgatgggttccggttctttggccgctatggctgtattcgagagggattggaaggcaggactcagtgtaagttgcctgcgagtattctacatagttgtgtgcttagcattagaacctaatatatttatcacacccgcatctccaaatggttttgttggctccctatgaaaatagaaacaagaggctgtagctctggttgcagctgccatctctgctggtatcttcaacgatcttggatcaggttcgaacgtcgatgtttgcatcattgagaaggactctactgagatgttacgaaactacgagatgcccgtacgtcgtgcctttcttccattgagctcagatgagattttgattcttccaaaactgacacatgtcctgtgtgacacgtggtatatatgcgctggattgattacctagaacgaacgaccggtgaaggatcaatcgtacaagttcccaagaggaacaactgcttggcggaaggaggacgttcgtcggtttgttgtcgccgaagagcacagggagcatggctcgacggtcgaaggacaggctggcgtcgttggcgctggagcaatggaggtggacgtgagcgcttgagattattaagacgggaatctctttctctttattcttcttctgggaagacgtgagatgccttgcatgttttcatatagtttgccgataaacgagatacacacttaatcctgtcaaattacaccgaggtcacatatattttcattattccttggaatctatcatatggttcacaacggtgaaacgaacacacagcgaactattcagtaaagctttataaaatgtccatcagaatccaaacttactcattttatgcagcttcttgttgctgttgctgttgttgtctttgcatcatcagctgcatcaccatctggacattttcctgttttttctcgatggtcccttgaagggtatcgagattctttttaacgaattgtgttttggacgtatagtgcgtcaaggcctcctttcgagtctgagcatgaacgtatagattgggaaatcagaaccagagacgtcaggttgagtttgaaagatgagaggtatatgagatgatgcggcgtggagggacagaccttggagacatagtaccctgtcccaacgtccacgataacattctctgtgtcggttaactttccgggaacgtaaagtgaggatgtcagggggattaatatcggcttgtctgtttggttgaaggacaacacgatcaagatagtgcaacgacgaaagatgggatgggatgagcaatggcaaggatcgacaacaggcgaaaaggaagcggaccttgattctttgggttaacctcctccacatcagcaatacatgatttgaatttcgcttgagcctgttttagctgggcgaacgaggtggtgagatgctcaagttcctatacgcatagaaagtttattaaccatgtacgatagatgagggtcgaggttgaacaagcagcagagaataaaatcaactgaaggaccttgaaagtatgagatagaagagattgcatggaaggcagaacacgaacgtcatcaagctgcttcttgacctcagacagctgtctgaaatcgagatcttgaacggagatttgttgttgggggcctgccattgttcgtttcggaagagccaggatgatgtgcgtacgttgggtggaaggaacaggtcgatttttcaatctcccatttgattttgaatataggaaaaatcattcctaagacttctcctcttttttcgttgtatttctttctgaatagatcaatcatcaacctgcaactctctccaagacccagcagtaatgtccgtcgctctgttagctccctacaaggccattgttgccaaactttcttctcaatttgccaaggctaaggccagtggagacctcaactcctatgagagcacagtgaatgaagtagagcaggatggacttcgggtacggccgtttgatcttattcctctgctctgaaccgtttctttttgttttcgtacttctatctcccgagtgaaccaagctgagcgaatactttgatgatgttatatttgcattcagtatgagatccgagtctgccctgccctcaaagagaaacgggcggccaaatcaggttcatctccatccccatccgacgactctgagcctctcaagcgacagaagccagccgaccctttcgagggtccgtacgacaacgatttgtttctaggaaaagttggacaggaggaaggtggagagaaaatggttgccttgctcaacaagttctcagttgtcgaccagcatttccttttgtaagatatttcttcttcccttctcgtgaagccttattatatatattgggttgggttgaagtgttttatggatcagcagttatgaccttgaactgatccagactggatgatcacgctttttttactgtcctgttcctttgggggatttgtatacaccagagtcactgaaggtgagttgtcagacagcctctcctctcttccgatcacataatctcaagcatcttgtcgtttgaacactctctttcggtctataataacttcacagagttccagtctcagtcttcgcctttacaccctccgcatctattgcatgcatacttgatgcttctggctcttcaacagactggtcaacagtggatatgtatctataacgctggtggaccggtctcaggagcatctcaacttcggagacagtaagtgtctcgtgctacgtggaagacaattttagaggaaaggggaagcgcactggtgactaaaatctgtctggacgatattcacgaatctctctttagtttgcagtttgttcctaactctgaggagccgcctgtggacgaatggactgcaagcgctcaaatcgaaacagagggtgtgtcttttgatgagaagatgttctcaaacatcctgcaatcctttctataacatgcctggcgctgaactagttgatcttctttttctccctctgacatagacgagccattttacctctcatcgctccctcatgcgcacagtattatgcgtcttccctctcaactccgatctcggtcgtcgaccgcagactctatcacatcgaccctgatgctttcacacatcaaactccttgacgcgacgcaccaggtcattcagaagcatcttctacctccttatctcgaccctgagtccgcctccttagcacctcgacctaccgaaaagcctacaatggcttataacctgatcctcactctcagtcacttccatgccatcccgaggtcaaaggagaaggctgatctggttgatcctggaatgagtttgaacgcgatggcgttcgcgggtatggtactatgcgagagtgaagaacagatggaagctatcaagggattggaaggtggggtcaagagcctgttgaggagcgtaggatttgagcgattggaggagaacaaggttgaagagatggcaatggcgtaggaatcatcctagcaagataaaatgtctgccttcctcagttgatttgagagaccgctgtcctaacacctcaatgcagattgacttgtactcctgctgctttatctctctgctttctgagaactgtcggctagacgatgtgagtacggcaacggtaaacagtgtggtacccgcttagacttgtgcaactgttgttagggttacagaagttctatatcagccgagatgatcaaatgcttattcataaggatgacgtcgacatttagatctgatagagaccagatacagaaagagtagcattgatttatttgaacatcatcaaatatcaacccattctccatcatattctagcatcctccctcgcaaattatttcaatcttatcacagaatgaaggtatactatgtttgaattttggtgctgctaaacgcttttgactcttgctcatcttcatgatctcacccgttgcgtccgaacagattgcactgactggagctcgaggaagcgtcgggcaatccatattgaaacactgtaacgagcagggtcattacgtttttgagattaaccgaagagacgacccggagactgataaccccctctcggaacatcgacgggctgagggtaagatgtgccgcttagttttatccctctaaagtagtcctccgatgaaatgtcaacccgacgaagcgcttatcatccatcgatctatgctgactcagaacatcgtatctttatattcttgtcttttgcctctatcgtgaatatctgtgtcaataaggcacggattacgaagctattctcaaagcatttgaaggagcagatgcagtcatccatgtgagctatcatccactatcgttaaccaccgaggtatttgaatgacttatctgctgtatgatatacaggtggctgctgttcctaatccgggaaaggtagacgatgcgaccacacataacagtaacgtgtcctctagctagtaagtacactttcctcacacgtgcatctaccaaaggggtagagcgcaaatcggcgacgcgctctcaactttgagaaagtactgatgaaccatccatttgtatttatcagcgttgctttacgagccgctgctgaattaggtatcaagagattctccctaggtaagttctcgctcctttccctggtggaaaaaattgacgtgatgttggtactcgcttggtatagttgctcatactctaataaattcttctttgcaatcagcctcgtccgtcaacgctctggggctcgagttctctcgtttctctactttcgactactttcccctcgatgatgttcacccaacttatgccgaagatccggtgcggctctcttgtttgttacatcatttcatgcaaatatccaaggtttgacacgccaatccttcctctttcagtactctatgagcaagtacgaggcggaaaagcaagccgatgggctctgccgaagatatgacttccttcgggttgcttcattccgaatgcatgaggtttcacccaaaaaggacctcaagagggaaccgaaagtggatcaaatggtactatggtcgtattctgaccctgaggtatgtactcaggcttccatttcattctcaagatgagaggtgcgcggttggagaaagatagtgtcagaatcagctgtcggccatattactcaacagtctattcaaccatcttttttgatatgactcaacactgtaggaggttgcgaaggcctgtctccttggtgtcacggtcgaaaaagactggaagaagggccatgaggttttctactgttcgtgactccataaattgctttaagtcattagcagtttctagttgtgttataactgacgagctgtacatatatcaaaaacttcttaggcgtgtcacctgagaacacccatgaacaaacccggggagaaaagatcgataacgagacccttgctcagcgatactacccaaatgtgacttgatttctctctttgactatcaaactgccgtgatgctgaatctgtgtttatatttgtccttttgtctttcttctccaggtccctgtgaagaaggatttgaacaaatatggattctttgacacgaaaaagattgaggatttccttggatggaagcatgcccagaagtagagccgtagtgaccccatattgtttcctctctttcctctctttcatctgtctattggtagatagttgcctacctcactgtgagatgtgtcgatatgcctatgtatttcttgacaaatatgaagacggcgatgacagtccagtgtagccggattacgtacacacgcccgaaaccggccgggggtctgtaaagcagtgcattccgctttggtcaactctgtttcctacacgcttgttcagcaacaacgacctcccgacaacgcgtgtattccctctttcttttccattccatctgtggaacttctatcttctattctagctagccagattcatatcgtacataatgggtctgtttgcaagaaaacgtaaagatgcggcagcggatgggaccgagcagaccgaggtgggaaaggcaaagaacaaaaagcccgccggtaagtaatttcctaaggacatagtcttccttttcctcctcttctctcttcctcgtcgcctctctttgctgcatttctatggagaggatctctgtgtttcagcagaacaaatagaattggcatgcgatggccatgtgttgatacgcaatctacccgcgagggatttaaccacgcaatctgtaatgttgtgatctttagcttgcctttccgcaaacttattccgtattgggtttggggggatcaaacgaaccatatgaacacgtttcttcctgttcttgggtgtgatcgatcaatgctgacttcaatggcgattatacgttatgctcatgtcagccactgctttcaagcagcagcgactcaaggcttggcagccgatcttgactcctcgaacggtacttcccacgctcttcatcatgggcttgatctttgccccgataggaggagttctcatctggggatcgaacaaagtgagtatataacatcatgtttaatcatctttgacaagagccacaaaatattgggaagacaagctgatattataatgtttctcgtgctcctatatctgcctatccttcagatcacagaatttacattagactatacagagtgcgacactcaatcctcaacgttgaccgacatgccctcttcgaaatttagctgtgagattttggactgcacttcagagtgattgagaaagaacctcgaaactcaggaatgacgactgattgaatctcttgctatccgttgaattctcagactctcttgcatccggtcactcctccacctcgatttcaaacccccagtggtcatacacaaactctacgactggcaacgtttgggaacgccaagtctgcactttagagttcgatgtcccatacgaccttggtatgtaccctcgagagcgcgtccagaattgttcctttcatgcgacgcgtctaatttccatttatgatgtcttcctcgacgatctagacccttccgtattcctctactataagcttactaactagtaagcctcttgccttctcactatgatggttttgtcctcgatctaatcacgttctgagccggttgtctatccgctagctaccaaaaccatcgacgatacgtgcagtctgtagacactgatcagcttcatggatcggctcaatcggcgtgagcatgtctattaaggtatatccagactgttctcttgaagactgactgtacttcccttcttgttttcgttgctcttttccttgtttattctagatcaaccttgaacagtggtaactgtaaacctatcaccagtatcggcggcctacccgtctacccttgtgggctgatcgccaactctgtcttcaacgacacgttcaatactccgaccttgatatctacgtcgcaggtgtataactttacctcgaacggaatcacctggtccaatgagcacaagaaatacctcgatgctggatataaaaatgtctcacaggtggctgtgccgcccaactgggttgagcggtatggatcgacgtacaccgagttccctaagctttacgacgatccccatttcatggtttggatgcgtaccgccggactaccgacattcaggaaactcttcttcagaaacgtcgaagagaccatggcccaaggacggtacagaatcgagatctatatgagtatgttggcaatcttttcctttctcataaaaaccgattgaccctcgagggctttcatgccaaactttttatatgtgatgttgattgacggtctattttgtagattatccggtcaaacaatttaatggcaccaagtccatggtgatctcgactgtgtcctggattggaggcaagaactcgttcctcggctgggcctatgttgctgctgccgccctctttgcccttcttggtttgcttggtaccgtcagacatctcatgaagcctcggtatgtcttcttttcctactcgaatcatcgatttacatgcgatcactgattttggcacgtttgacgtgatgtagacgattgggagatatgtctttacttagctggaatcagcccaagaagtaaactcgaactggttcttatggtttatgacgacctcctcttggttgtgttcttttaatccttttcaggattgtgtcgcaagtttccttctttccgattgaaatccgtagtccttttgttattctacctctttcattctgaatcttatatcacaacaaatactcaatcatcttctctcatcttcttttccgttccatattggtctattgattcttatgattgccactcactgatcgacccgtgcatcaatcgctttctgctgaccgaatccagtagatgtccatttgtgctacaatccactgcctgacgcactgcaaagttaaacgctctctgactacaggccagcttctacaactatagctatcatgaggacaactagaagaacgagtcaaaaacgaaagctttgccagagatagtttcggcccgatatggcgcgagcatccttttcatgcatacctccgtcgggttttcatccgtctgatgagtgacaccggaaacgacggtgcacttggcaaatattcattttgttttgtcttgtatctcttgaccgtcgtctgatctatctggtgtccaatcaaccatctagtatcactgtctctttcggctccgttctcggtttatctatatcggtatttcttctcttccttcatcatccgatccacatcatgtctggtttgccgccctctactctctaccctacggtacgctcttcttactatatcgggtttcttgacataatccgtctctaagattgagacaagttatctactgcaaagctgacggccttgaatgactattttctctcttcttcatcccatcaggtctttgctttggcctcctcgatcgtcatcgttctctttattggactttccatgggagttaggcaacagagacgccgagagcaacgtcgtttagtctatcagcttgcctatgaagaaaggatggctctttacaaagagcgggcaaggcctgatatgtttgaagtcggaggtggcaaaggccgatgggcagggaccgaacaggttgattgcgacaagatcaacgtagacttggttcgtctccttttcttatctcttgacacttgacggttgggccccagatatgacacaagcgtcccgagatctattacatcctcacttcgaacatgacgctttgatttctttccgtctcgacagcctatatcagctctcgtccttcctcatcatccgggcgtcaaagtactgccctctgttgcccctcctgtgatgatctgtgtgatcatccttcaacctaaaccgccgatttctgactttcctgagaccagaggcgaaccagacgaggaagaggagggattgggtgtcgacgtagatctaggaatggagacgatcaacgtcgttggagactggagaggggtgacgaggcaagcaggtctaggattcgagtagatcgatattgccttctcatttatctcatcctctggttgatgttttctttgagcttggtgatgtccacctatcttgctctcatcatcaccgtcgtcctctcctatccttctatcttccatctttcttcttttttcttctttcatttctcatgtagtacagaacagtccttcttgtctcttgtccatcgtttgtataccatcgtgtttcatttctctacttatgaatttctcaatttatgaatttcttatagatgtcttttttctttttctccttatcgatttcaagtttgacaaggataattgagtccgacgttgccgaaaggtccgaaaagtagtcatccaccggacccagcacctcatccacccttttttcggatactctccgaatgaacaatcttggctccttgcagacccttgccgaacgactgttatgaacctttccggtgttttctgatctcttttgttcatcatcatcatcaatttatttctcatcttttcactgttctcgagatgcgagcgactgaactacccacccctcccccggagacgaactcactgccggcgtctgaaagcacggtgttcatccctacagaccttcatccggctgtaagtgaagataaccttttttcttgttcgttagatgaatgagaaactaagtggagtgttagattcgtctggttgagaatatcagggcattgaacacgctcgcaaaagattcaaaaaagttctcctgtcgacagaagtcgagtcgttcgaggacgctctggctgaaagcgatggcctaggtgagagcaaccttgtttgatctgctgggaagataggataaacattcatcattcgaaacgaccttatactcggcacagttcttcggcagtcttacaaggtcaccaaacagatccttgcgtctgctcccagactccgagggatcgccagaaatggagtggggtacgatagcatagataccgccagagcgaaagagcttgggattgctgtattcaatattccaggtaggtttcttctttgtctgaggtttctcttgaaaggcaaaattcgttgggtctaaagcaacttcgtggtgatgtgctctctttttaaattaggtatgaatgccgagaccgtcgcggagatgacgttcacgcttgcgctctcacttttgagaagagtcaaccttgtggatcgagcgttgagattgggagaggatctatcaaaggttgggatcatgggaaacactgtatgtcgagtccatggcttgtgatattgcttgatctgtgagaacattaagctcttgccgagtagactgatatgcgttcctctggtgtctacttagttacgaggaaaggttgtcgggattgtcggaatgggagctatcgctcatcgggcggccgagcttttccgggtatggtcaaggttgcctctctgattgggtgactgtagctggtatgattggattcgtagaccttactttctcttcctcctcttcacaggatactttccaatgtgagctccacgtgtactcgcctacgtcgtctacagacaaatggaccgagaacgatccgtcgtaagccgctcatcctgtgtatcaacaagcgtgagatttcttgttgtgttcatccatctttcttttttctttttggggggattgataccctgtttccagctctctgcgcgctctccctcacacccgacacgccagcttggacacactactcccgatcgtcgatattcttacgcttcattgtccacttaccccatccactcatcttctgatcggcgagaaggagctggccactatgaagacttctggactgttaatcaatactgcgagaggtggtgtggttgacgaggtcgcgctggaagtcgcgctgagagagaaggttatcgctggggccgcggtggacgtttgggaggtgagtatctgatatgtttcgtgtggtcggttgaagagatggatgacggtggctgaaggaggatccgaatgatttgtgggaatccttgtaggtcgagcctccgcctccagcaaaatacggtggccttatctcccaacctacttgtatctctcttcctcagtaagttgttttccttcgtgtgtgtgtgtgtgtgtgtgtttcgggattcacctttttctctgtttgatgttaataacgtcgtcctgttttctttttctttctcttcctctgctgacacagcatgggagcattgacgaacgagaatcagacacaatgctgcatccttgcggtcgatcagctagcagatcatttgtaagagatctccttctcgctctggaccatctttcttcctcgtttacagacgctgacagactctttgaggcggcgggtgtttgaggaaattcatagagatggcaaagtggttggcaatagagtagtttgatgcattgtcctaggaggatagaaatatagaatctcatttggcgctcgacctgttctctctttttttccctgtcagtcggtttagtgtggtcggaggattggacaggagagaaggaaagaaaacctgtcaaactcgatcacagaagacatctctttcttttgtgctttccttatcaagacagacagacagacagagggaaagatacacgtccatctctctttgcactaaccctcatctccttctctcttgatttacctgcctgtatgctgactatctgtgggtacaaaccgcttcgaggagggttttcttaaaacggtggatctagcgggcagacgacgagcgtcagctaattataacaccttggggcttctctttgtacagatcctatctcgagctacagtcgggcggaagcacaaaaaagcgggagtaagcagctcgaatggcttccacagaggtaaggtgctttttcgttcgtcggttcgttgtcatactttatagatcagcccaccggcaagggccgaccatgtcgtttgttctgtccgccctctcctctcttcttttttttctcttgacggaagagtcggcgccactctgcagatcgaggtcgaagccacggacgggtggatgggtctgacggtcaaagatgggacggcagaattggtgagtggcagacaggtcgagatttctctgacccaatattcgggcacaatttcacccaagaacatattcttttctctttctcttcaccgggaaacacaggaccgtatagtcgtacctgtcaatcaaaccgggtctggtgaaaagtttcaagctagagctcgtgagtgtctggttggtttgttttccagaggtgtttccagggtagaactttagatttgaccggacggttgatctcttgatcggctcagaggaaactcagtggcaagtcaggatcagggtttcccagaaggcaagtacgaaagatctatgtatatgcatgtgtgtgtgtgattgaaagcgcata

SEQ ID NO: 2535 - DNA, 23856 bp, Xanthophyllomyces dendrorhous
agaattcttagccaaacgtctatcgacgatttcaagtcagcctactagatggagggtctctaggaaggctcatcggtttgatctcgccctatttacccaccaaactacttaccggccagggcgaaatggagcagtcgatgccaagaaccgcagctgattctacgcctagcacacaaatcgttagcacgatgtcagcggtgactgcagcgacgacaacgacgacagcggcaacgacggctttgacggcgacagcaactccaccgacgacgacaacaacaccaacagcatcaacaacaaagaaaaagggaccaggaaagaaactagagcgaggctcgtcaagtttagctgggatcaagcgaccgcgacaggcagacggggcggacgatagaaagcagaccaagggaaagacgaccgatggaaagggaggcggaggaggaggaggaggagaagtagtaccggagaatacaggcggctctcacatcgtcaaacctttggccgatccacggacgggtccagtgccggtcggttcaactagtgcggctgtgagaggaaccgggttgccaaggcctgtgccgagtgtggacagagggacatgtggcgaaacgatccggcatggtagttcgctcgcgctgggcggatcgactggtcaggatgcctatggcttgattagttccacagggagcgcttcagggcttccggttggacaagtcgaacaggagaatacccagacgaccggaccggcgactgggtttccgaatctggtcgatcttatggggctcgagtttgggccagtccagggggttgactttttaggcgagagtgagagcgagaaggcagagtctgaccggttggcccgaccggttgacccggatcgtccgtctgatggatgtgagcgactggtggactggtcatcattatgtgttggcagtgactcaactaaggagttggcatcggagagttcggcctggcggatcgtgagggagaaagctgacgatctattggcgatggacgataccgagttggccgggctgatggaggagattgtgtgtggagaaacgtttgtcggcttggtcagcagagtagagagggttagcatgcagacaggctgggcggccgggtaattagaatacacatgctgtgtttgtgacgagatatatgtcatgtcagctttgttaagagtgagtgtgctcttttcttcacatagtcaactttgtgggtgtgccaagggttattgctcggagaagaaatatgatagaacatgatagaatagcacgagatgaaatgactgtggaagcatgatgaacggacggacggacaaacgttggcgaggtgtatgagtaagagcaagaagcaaggaaggaaacacagaaagacagggaaaaataaaagagatagatagcgacagaaacgatggatgaagagaacagagtgttaaaggacgtgcgtgcaggatccaagcgaacgggtgaccgcgtgcgtgccaaatgatgcaagaggtaaacgtatgtgttccgttgggtctctgacggacgacgggcgcagtagggagaatgtgtgtggagggggagcgaagcgtggggaagagcgtgtgggaagaaggggggggacccatgtggtccgtctggttagtcaggtgtgtttggcgagttgccaaagtcgtcggctagtggaagccgaaggctttgacccagccggacacgttcacactgtaggatgaacgagaccgagggatgaggccgactgggtggtgtcttagtctgatccatcggccgagagagcagggaggagagccatgtggaaagataagggtatcgagggaaggaccggaagatttctaggaggaggacggtcaggtacagtcaggtacaacaaggcacggcaagtggaagggctgatagagtgacggcatccgaatagaggagacacgggcggagagagagagagaaaagagtacaaaccgtaaacacaacacacaacggggggagcaggcaggggagagcaggggagagcgagagaaaacaacagacgcggccggtggcgtgtggaagaaaggcgctgtgtatcagcggacgatactacagatgatactacagatggactatagatgggctgtgtgaaaagggaatacacagacagactacagaaaacaagacgaaaacactagaaagacactacggggatgataggactactacaaaaacagagtgaaacctttgctcgaatgttctctagccggaaggaaggaaaccttttttcatgaagaaactataaaccatgtattattattattatcatcattttcgatgtctgattaggaaacgtttgcagtcgagtcattagaagcttgactaatcggaccttgttcctgacgtgtgcctagatgccggtgccggtgcctgtgcccgtgccttgtgcctctccccttcctcccccccttgtgtgcctgcccaaactttagctcggtttctccctcaaccatctgtcctccctcactcacctccagcacctcactcaccccactcaccccatccaagcacccacccaagcagctctctctctcacacacacacacatatacctacacatacaaactcacacacacacacagctcactctcctctccccccaacaccctcgttttcttctcctgcttccgtctctttcctccacggtatctgctgtctctgtttccatctctcgttctcatccttattctcaaaccctctgttctttctttttcttcttttcttttttccttgcctcttgttcttgttcttgttcttgttgttcttcatcaccacttccccatacagcccagtcaagcttcaactcagctcagtccagcggtgctggctcctgctcaacacatctcccaaaccgtatcttccagatttctcgttcggcccatcctcctttcgtccattcggctgcctctcgatctcttcgcccgacgttatcacccggcctggctttcacgcctcggtcatctcaccgtccttcttcgtttctgttcccgtcctggtttcggtctccgtcccagcagtctctcctcctccgctgctggtaccactactcgctaccaactccattttgacacgtttgaccgttccctgcctggcgtgtttctgccgttagcccttcctacccgtcctccctccgcctctcccctctccctccgcctccttcttcccccagggccatgctcgtcgctccagcatccccatcccctaggtcccctcaagtcgcgtttgtctcgtcggccttcccttcgcccgtcatgggctacaccggaatcaatcggggaagcagccggtccagaacaatgtccagaaacaggtccctcgccgtcagcgtctctctctccaaaggcgtcttgtcctctcaagtaccggccagcacctcgcccatcatcggagaatccactccaaacaaggataccctcaccggctcatccggaggcgacaacgactttcttggcgcctggtccagtttcggcctcaaaaacagatcgtggaccagagaggttgacaccccggacggcagtcgtggacccagcaccgccggtgacactggtagcagcagtcgacagtcccgcagatccagacacgccccggtcgaccctccgttcgtagaaggagatatcatcacaccctatcaacccctcccggctgcttcctcttcggcccctctcctccctgttccgtcatcctcgcccctgggcagccgtccgatcgaccagccagacggtcaacatgacctcaaacgtcttgaagtcgtcagaaggctcggcatcggttcctacgccgtcgtctacctcgtccgggaggtcatcgaccagaacgacagccacaacgatcaagagtgggactttggagaactcgacgaggacgaagacggcgtcggttccagaagcgatcacaggacctacggtaaagagtttggtcagtgtctctcttctcttcttttcctttgtcttccgttgttgctcttgcttatcttttccacttcctttctttcttccttccactaccttcgatacccgtcattctctctactgacattccgttccaaaatctggtctctccttcaaacatacagcgttgaaatgtttgagcaaacaggaccttgatgacgagagcttggagattcagatgtttgaggtcagtcctgaatgcctccgctctctttttttctttttcttagaagacaaaatcacccgcctcttgtccggtaatctgacctcttcaggactgctccttccgactcttcctatcctccgatccacttccaggctaccatccaccaatccttaccgcctcacaacaacatcgtcactctccaccacacgttccagaccccggaatggctcttcctcattctcgaattgtgccccggcgaggatttgttctactggctcgagcactctaagcctcctccggtcaaccctgcgtcatccatcccaaacgtcctgccgacaccgttcctaccaaacagccccaacaagaccgccgcattctctccagtcactgctaaacagttccacacccctgctccccatcatggatccgctccacatgcctcccatcttccggcctatatgtcttcctcccctttgctcccaatgactctgtcaaccaatcagtacctcggcaacggcggaattcctaccccatcctcctcccacatccactcatccatgcacaatttaggtaccccctcggtcgcgtacaccccgccgaccccgtcactcctctcgaccgtacccgctcccttactcttagcgccctcacgagtcaggttgattgccagtatgtttgctcagatgtgttccgctgtgcaggcctgccacgacgtcggagtctcccaccgagacattaagccagagtaagtttttttgtttgaccaatccgtccattgatctattgtgtcatatgcaaagtcaaaagtttcaggccgaaattcttaccctcccaacatctctttccttatcagaaacatcatcgtcaccgaggaaaaggcatttagaaaaagtagaggacgggttgtttgcaagttgactgactttggactggccacccgagaggctgagagcgaagacgtagaatgcggaagtcgtcgtgagtattcttgtctcaacaggctgttctgatctgcttgccgtctatcctttacctcaaagcatgcttctgaattaccatcctttcctttcttttctccttcttccttctatccctgttcacagcgtatatggccgttgaatgtcgaaacaacatgggcccttcttatcgcccacctcctgccgatgtgtggtcccttggaatcgtcctcatcaacatggttggtcttctctactcaagatttgcgtcccttgtgtctctatttgttctacctgaaacctgacacagtccctatgcctgtctatgtgatctagctgttccacaagaacccttggtccgacccttccccgacctgtgcacctttcttgtcgttccggaacgaccccaaagggtttttggccgccaagttcccaggaatgggcacggaggtagctacttacttggccgaaagagtactcgcttgggaccctgccgaccgtgtcaccgctgccgaatttggacagtgggtcgtcgatctcggaagccgactgggcagcaacaagaagaacggccacgcttccttcctcaacatcggtctcggtggcaagcaggtcttcaaaggcggcgtccttcaatttggaaaagtcgacgttccttcaaagctcaagatcgaggagattacctttcaaaaatcgcccgtgttgccccgtcggtctttggtggccatcaacccggatcaactggattccccacctctcgccaacagagctatgtccactttgactagctccgctccctctccggccttgggccatgcttccccaggatccactccttcctccccccttgcttatagtcttaacgcgttcatcaatccaccaccttccggtcatctacagtccatcaggacagagacaacgccttcgcctctctccgctccacctggtctgcctcttcccagccaacacctcgcctcgtctccagctgtatcggctcttcccccttttgccctttctaccccttcttcttttcaaatggtgcctcaggcccccagcgatgaagctctaaagaacgattcgatccctacgtcgccctcagtggccgatgcggcgatcgggtcggcagctttgtcgtcacctgaggcaccactcgctcctgtttcagacgtgacggtcgaccagtcgactatcacatccccgcacaccacggattttgagacggatcttggggagaccaacgatgaaggagactgttggtcgagaagcgcttccgcgacttccaaacagcgaaagaaacgtggagtgaggaaaggaaaggcagccctggctgctgctgctgctgccgccgcggaaggcgccagtccacccgagcagccacagcaaccggcaccgttggaaactatctcgtttgagttaggtgccgcgtcgagagatgtgaccagtcgagcgttggcgatcgcttcgcagaccttggctcgagagatgagctcgatgccgtacacaaagcctggcactgggtcttcaatcggaccttccggtggtggtggaggcggagggccattcctaccacctacaatctcttccaactcttcccctgccgcgcttttctcgtcggcgtctacaacccgagccccttcgacccagaagggagatcgagattctagtagctcgttcacagacggatcatggtcccgtggtcgagctaccgagagagatgtatacgccaccgccggcttgcctcgaatgatctctcctggatcatccattcattcgacccgatcggttccttcatactcctcaacctctaccgtcgccggacttcatcagcattcaagctcggattcggcctcttggagatccagaggtgtttctcccgcgaggtccactgcgtcggcgccgaatcctttcgggcctagccgtcgagatgccgcttccggaggaaacgccgccggccctaggaaggttctcaccgcccgacctcgagcggccgattcttactcccctgcaggtgacagttttcgaacgtctcggacgacatcatctccagccagttcgatttactcgtctggagggagtgtcagtacctacgcaacctcggccagttcgtccggtagctaccaacagagctctagaggttctagccagtattctgccggaaacaatggagttcagggagtggtcaagcggcctaccaatgttaaacgtgagtactgcttacgttccatcctctatcgaacatgttttctttgatcctgactgtgtcttctacttgtgtccttgttcctgtgtcaaccagaaatggacggaattccttaccagttagatcaacttcctcgacaacatcactttacacgaagtggagaattggttagtgttctatcgttatgtcttttcagtatgatcgttcatttcgttcctgtttctgatcaaatctcgccattcttactcgcagtctacgtccgatgacatcttcaccaaacctcgacctcctcgacctcccaaagtaaagcaggccaaggtgcatcgtcaacagtcgttccctgccgttccgaacctcggtctggacactatctccgaacgtccgaaagcactttccggcgtgaccatggcgaccagcggtaccggtggagatgaccaccgttccatccattccggccggtcggttcttcttggccctgcaatcggatcacccgcttcgaaggatacgggcacaggatcttccggaagtgtatctggaggaggaccgccttcacagcgagttcttatcgctcgcaaaagggacgataggtcaagcagtcctgctccgtctcagctgagtctcgagagtcttaatagagtacccacgtccattggaaatgtatcgtcctcgacgagatctgttctagaatccgcacctgtgcggctagcgcctttaaaggcaagtcaagagaagctcaagccaaaggctgacgatcctcctccggcaaaactgaagggccaggtgtcgactttgagggctatgctctctggtctatccaagtcgagtaagaagggaggggaatgaggttggacacgcttggcttcttttttctttcccttgtcacattggtttgctttcttccttcctcccttccttccctcatcgcggcaaaaacacattcaccttcacaaatatatcttcacttttacacatttccgtttcatgccgcctctgcccatgcttcgaaatgcctgttttgcagcacaactctcctccctcctcacatctctttgaattccactctcctgtcgagtacattatattccttgccctcttctttaaaccccctcgcccccatctctttctacactatttatcaaatgtttaagttacgttcaatttcattcaattcagatgtttcttccatcggatttctccgcattttaggccaggttttccatccagtcgatcacaccgtacgtcgccaagacgtctttgttcctatgaatgaagaaacaaacagataaagagtgacaaatagaatacagagaagaatgtcgtcgtcgtcaacaaggaggagatccaaaagtcgattggcgcgatcgtgttcatctctttccatcgatcccctttcacaaagataggttggcaacgtcaattctatctatccattaacctgaccaaggttgaggcctgacagtctagacatgatcttgactgtgacgggttggctgttttgtggaggaaatacctggagacggtgtatagaagatttaaagacacccctcggtctctccgatattcatctttctcaactagtccttatttcttttcccggatttgtctttctttattcttgttctccagtcgatctactgagacactcaggtgttttattctttcgtatgggaagcagacaacttcttgagaccgaacagaaaaagaactagacaaggactgagcagccaagtgacaggatggcattaacttttgccttcgtagacaactagcctgaatagctaagtggttatagcgcgtcgcttgtaacgacgaggtccgtggttcaaatccgcgtttgggctttctttttgatcatcttttgcatcactggttttctttttcccttcttttttccctcctcacatacaaacttttcctggcgcccttgcagtcaaacatagagcctctatcttgaataggccgcactgactagaactgtactgggacgtttgtgatgagttgtgtgtatgtgaagggcgactgatgtcacgtgtgccgaaccgatgcgtcagtcatccatcgttcgattaaccctagcacgacccaatttcatttccacagggcttgctttctttccttctttctttcggactcttgttggagacggggacggaagagtcccagggtgtgctcttatacgtctgaacaaggcttccatgcgcttgtttttatcagaagctggagtcgaggtgcctaagagttctttacgccttcacgccctttggcttatgtccaagtcatctgtgtcttttccgaaccggtcagagaccgctctggttcaacctttagacaacttaaaaaacaaaacacaataaacaaacaacaaccaccaccgatcttatttcttcgtctgtccgcacatggatacccgcgtactttgactgatgtttcatctgagaaccaacgggagaggggtttcttcttttctctctcgttcagagttgatgtggacgacgagaggtgttcgtcaaggaagaacaacgaaaacaaagtctttgcgcctgatccaaaactcaatactatcgatgacaatgatgatgatgatgaagttcgcatgcctgacgatggcaacgttgtattccatctattctgaacaagcacacctctcagggaaagattcttcgcacgggccatattcccacgccaactatcatcttaagctttcatgactgaaatgttatccaagagggaaaagaagggaatgtcgacatgtgcacttctctttatctttctctcttactaaagcagtagctcagacaaacgtccatcaaatatcccaaccaaaggacactcaaaagacaacgacccgggattcaattactcatcctggacgacggtggtcttctcgctcacgtacaaaccatcaaggaactttcggatatccttgttcttgacaaggcaagcaccgtggatggtggcacacgactgggaaacgttctggatatcgttaccctcgatgatgatctcgtccttctgaaccttggactcggagatggtgacaccctcgagcatagggatctctcgcacgatcttctctcccaagaagtttcggatggagacagatcgtcctccctcaccgatgatacagttgatagggaaatgggcgtagacggctcgcatcttgtagaggaaaccctgtagaatgacaagtcgaacataatcaacggtcagcatatcgtctttgatcaagttttcaagctagggagtgatcgagagcgaaccttggtaacaccggtgatcatgttctcgatcaaagatcggacagttcggaggcaagcaaggtgctttcgggctccgtgccagacggcaagggagacaacgttggaaccagccttcttggtctgatggtcataagcaagcgaaggaaagagaaagcaaaaggagccagatggtaaagatacatcaatctctggtcttctctgacagcaagattagatgtggacgacgtacgagctggatatccatgttcacgtgtcgaatgttcttagtgagctcaccccggggtccggagaccttgacgatccgggacttgatagccacagtgacaccctcggggatgacgaaatcttgagacttgacgatatccttcatctattgaatccaacacaatagcaacaaggagagagaacggagatgaagcagtgattgggggttgcgaagtgggtattcgggaaagatgaacgcgattgcagggacagaaatggaaagttttgtcgcgaggccgacgtgaaacgatgggagggatggggaacaacaagtagaatcgagcgtagatcgttcatcagagttgaaggttcccagtgacaaagatagaacgccagagaagaagcatagaaagaatagaaaaaccgaaaccgtcagtgtactgtgccatgaaaagaacaggacagctcacaaagccctcagatccgcacaaccatccagccagagttctgtcatttttcttcgtatatcgtgaatccattccagttcgtctgtcgagaggcctgcctctgtcgatgtcgatcttctcggtctgactcgctgaatccaagtaattctgtcggtgcccatcgggcttcccacccaatgtcctcactacctctccccgtactacctcgctcggttttcaacccattgctaccgtactaggacaactagtctgccgacgaaaatttcccctctcctcatgattcctgcaaagaagatacagaactggcatggctggatatgtgcggactgatggatactgaggggcttggggagctatttccaaacacttttaaagggttaactaaccttgacgagaaatacaaggggtcggaggtgcaaagagaaacttgacaagacgaggtggaaaagccctaaatttctcacccagccgagcgaacggcgggcgggcagaccggcgagctttgttacgcggcacgcgccatcgatggttatgcggcctgagccttagcaagtctggtctcaggctgacgtgagctgccaacacatggaagctgacctttatgtaactataaaagtcatacgcccattgggcagcggtgactaaccggagatcctccaaatccatcaactttctttgctgctagcgttttccatcaagcgtggtctttggttgtctactgttgaagccaatcgtgggatagttggtataccagtgggttctcgtcctgcagtctactttggttagtacagtctgcttgctttctctccaagtcccagctcttctatcatccgtccgctcctctgtttgcagaagcgtctttctatgaagatactcttaatttatcagtaacacgggaagtctttacaaacttcagagtccttcatctctgccggtggttcgttttgaatttcactgggtatcggaggggaaggactcgtttcgtgtggtgatctaccctacattttatgtcatagttatactgagaatttcctggccgccatatatccttcctttgaacacatcgagtttgatttgtagaagctgccgttgctgacctaatgtttctcttgttttcgatggttatagtcatccgatcttctgtcctttctttcctctgtatcatatatgatcaatgaccttggtttcaattgttttggaatgaacttgcaaatcatcaagttgccacacattcgcctagaacgaggcttgagagtttacacgacactagaacagattaattctctttgaacaaacatctcacttcttctcctcgggcaactcgtttcatgagcgagagtacattcatcaatgagtagttggcgaatcagtcgaccttgttcgactttccccgtctctctgaccccccatccgccatctgtatcccagcccagattaaccggatccaactccaaccgagacccagagcgcaatacacactcgtcagcatcaacggtaagaactccatcgacccctcctttgagccggctgaaaggagcgggttgatcactgattggaacagaggaatcagtggcagaacatagagatagatgttctccgccgtatggacaaccgtcgaagatatagtcggaggtggccttgagtatggtatgattgtcgatcacaggccagcaaaacaagtcatgtttgttcgagttcaagtcagaactattcttgaagaagcacaagaaaaggaaaacctaaactcaccgatacacaacccgagagacggctgcgaacgtgatcaagaaccacagagcagagtagataagtttgatgggtgtttctagattacagaataaaaacacgcgtcagcgcatcgctcttttctatctcgatcataccaggaatgctaccccagtcgtacacacctgaaggagtaaaaagcaaaggaaaaagggatacaatccctgaagcagatgcaatcacgaagactcggaagaacgcatagttctcggttgccaggaagctttcaagtcgacggaggaagaatatccaatcatctgttgtcagctagctgaggactttctcaacggcgagatgagtttctttcggcacatcgaactcacgttaaaggagtcaagaataacaagacggccttctcatggacatgccagccgaacaagaaacttgtgaatccggacaacgtgagagcccacacaaatgttttgtacgttggggatctccaaagttttaacgagaagagctacaatttccgaacaggaatcaacgcagattgatcagagtggacataaaactagctcgctcatcccctcaagtatctatggttcacttacaaactgaagagctaccgtaatgacaaaactaactcacgcagacatcaatgaggcgcacaaactgcacattagaaactctgatcgtttgaggtctaccgcgaaaagtagccctcaagacagcacataccaatggataggcttgacatctggcagaacggcaaacacagtgtctccaacgaagcctcgggtagatgaagagacccccttcaaatcaacttgtaatttgaggccaaccagatgaccgactgagaggaccaaaccccatattgtcagatcgcttgcactaaagctcagcctcctcgcacgtttggacatgcaatattcgaaaggaagcgggatgacgaacacttcaacaacgttcgatcgaaaaaggtgacgagagcccagacgttcccagcccaataagcatgattcaagcctctggtaaaggggaaaagccttttcccaagctgaggaagatcacgcaaaaagggtccgagagaaacgaagaagacgaaaaccacaatggatcccagtttgatcagatttcgaggaagaaatgcgcctatcgaagagtgtagaagtttccatggcataaacttagctcaaagacaacagaacgacatatagcgtaacggacactcacggtttgaggagaagcagtaagacctgagcaagtatacaaaatacggaggcgcaagatatatgtatatatgtctatcagaccacagaatcacgagcgaatatgggtgagtgaaagttagtctctcagcaaacacaacaagatacccatataatagaaaaccttccgatcgtcaaacaggagcttacttgaagttcaagaggacagcaaacagggcagctccggccaaatggtttccctagaaatatccaaggaaaagagctaaatcagatggaagtcatctcaaccccaaaacaaagctcgaagaaaacttacctctttgataaaccacatgctccagattagtattccaaacatgaacccgttgtactgcaatgaatagcacagccttcagtgaccagcacatagcaaatcagagcgcacaatccgaggcttacttggaaatgaatatgatcaacgatcaagaacgctgggtgcattaatagagaagcgcataatacgagctgtgtttccggatccttcgatgtgcgcacataactgttctttgaacaaattggaaaggtcagtgccttggaagatctactccttacatctcctcctccttgtcaagagatttcttcatcctgactcacgccagtaatgaagttccaagaaccatagactcagtgacaatcacactgagtcgttgaaagatgatggtcagagggctggcataaccaagattggccagttgtaccatagctggatcgacaacatatgccaggttggagaggaagtgctcgaaatgggcaaagaacggagggtagtccctaaaagcaaggagtggatagcaaaccagagtaagagagacttgatttcaacccaaatacactctgacgtatgaatgcttacagagctagaaatgcaaaggccgtgatagatgatcagctctacgtccacacaccaagcttcacgtagatagactgtaggcgctcactccattctgacgtgttctgagtgatacatcgaagagaaccgaggtgcatgagcacatcttgatttacatacgtcaaatagagtcctgaagctcacatcataataccattgcaacaaggggagttgatgggtgattgccaaccaatttcgatgaacctcaaagtcggtagatctactgaaaatcatgtattcaagcagaaaccaacacgtttgaaggccatatagagtcaggttcatagggttcaagtctatggagcagctggtgctgaaaatgcttactatgatggaattagtagaagttttatgaagctagaaaggacaaatatatccttctcggctgaagaaagaagaaacaacgaggcccatcttgagcgagatttggaggacgaagcggaaggatgaggccttgttgtagattgagctgccatggctgatccgagaagcaaagatcaaagggccaacccagagatgggagctggacacatacacacccaggagatggaaagatgatggttgagaaaatggaaagtaggaaataatcaacatcaagtttcgtccttctccgacgaccatctacatctctccgttgcatcatccgagccgcctgatctgggcacactcgtcaccatggcaccgaataagaggaagactgctttctctaatgctgagctagaacagatgctctctcagatcaccttagcatccccagcatctcacctctccgctacatccaatactgagaactttgaatccttgggtcccctcgtccgaaatcttcaagcgctcaatcaacaggatgtcttccttagctcactcaacaggctcgtggaggacaaagaaagagagatcgaagctgtgtgtgcagagaactaccaagactttgtaggaagtgtaggtactttgacgggcgtcaggaaaggtacgggtaatctcagacggagaattgcagagctggatggagttatgagtgatgttggaaaggatctgttagaaaaggtgggtagcccctcatgtgcatagtctggcagcgttctcagctttctcttgcgatcgagcgtgtgaaccatcttgtgtatctctagaactgctgacgcgatgctatctatgcttatttcgttcatactgcctgccatctagaaaaaagcacttctgaagcagcggaagatcgccgagaatctagactcagccatcgagactctccaatcaagtctgcgtgtgttggatctcgttaatcgaattgatgggatgatcaaggaggaaaagtgctggggcgctctacgagttcgtatcctgttcctcatctggttggagcatactgccattgatatgtactcatatatatactttgtctcaacctacatacacagtcgctggaagacatccaacatctacccctacctccgacaccgtttctaactcatattctctcgtccttaccctcactccgcgctcagatcaaggacaaggtgaccgcgtcacagaaagcatggttgttcgagattcgagagaagagcgggtatgtcggcgagctcgccatagaggaaatggaaaggaggaaaaggagatgggcagccagaagggaccgagatctgggcgtcggagtcgcacaatgggggctcggaggagtaggtggatcgggaagagtaggtggagccatagaatgtttgatttacgaaaagactgaatgtgagtccatttggcgcatacgcttatcacttatccacaggctcgattcataaagacaatcagaaatagatctgataccatggtccctcctctctggtttcctttgttctgttgtctggatgcctcgtgagagataacagttgatccaatcgaggcagcctcgatcactttcaaaccactctatcagtgtattcatatctacgatgccttagatcttcgaggagagctccaacaaacatatggacaagatcgacaggtatgctcttcaatcaattcatccatggggtgttttatatcccaagctgatcatactgtcttttgaaccgaatcggaatcgtcatagactcaagcacacctcattctttcgcctccgccacatcctgttcctttagaccagctccttctttcattgacacgttctatcaccggcttctttgtgttggaatcccatgtactacgatctgcgccaaaggattttaggtctcagagagacgtcgactttttatgggatgaggtttgcagaggatttgtgatacgagtggagagggcgttgaaggaagagcgggctggacgaagagagcttttgagcgtacgagactgtgtgctaagatttggcagggttttagaagtaagtccagatatcgttgtctatgactatcaatagaaaggtcgccacaaactaatttcaccctccttcgcttgacagagttatgattacgcgatcgatcagctcacgaagctgctgctggatatgtttactcagtatatcgctttacttgaaaaagagttcagcgataagtttgacgaggtcagaccattcagatccatcttcttgtgcaattacgactttgtattcactctgcttcgttcgtgtttgacagataatcttgaatgatgattatgctcctaaaagagtagaccatccagaagcatttgaagagattactagcgtttgctggatgagtgatggggcggtgaagactctatccaagtgagtgcatcgtttgtagagtgaaatgagcttatcgcttacctcctgattacaacggtcgacgtgggtgtcgtttagtcaggaatatcctgtcacaatgcctttttcaagcagctatctatcatgttgcatatatattcgagaatttgtcgaaagattctacaattttgttgatgatttgccggatcatgggaaggatattgacgcgctgctccgatccgttcgtacttctctcgctctttatgcggccgtatcaagtcttgtggacactagctaatctcgtagtctctactacattacacacatcgtagtcgatagatcgtatcttaaccaatcatgtcagcgaaagcatagctaagaaactggaaggaacgaacaacttttcactcatcgctcagatcgtcatcaacttggaacatttcgagttggcttgtgaagaattgaacgtcgtgcttagcaatttaaggttcgtttctagtcgtatgtcaactggatttatccaaccaactaatctttcgattgtcatactttcaagattggattctcgactgcctcagatcaagttatcctctaccggatctttgtctcagacgctgattcaagcccaaggcaggatatccgacttgctatccaagaaactggattccttcttcgagctagctgaaattgacttcacaccggaccgtccgaggaaagaaggtgaatgctctgagtacttgagagaaatgatcggcttcttggcgaactatgtagattcggtgcttagtgggctgggagaagaaggtaggcaagggacatataggggcgcctgcaaatacatctgcgacacactgatggtcagtattttttgatatatatatacatcaaatacctcttgttcatcacatcttcttctcttctactgtggcatgctgactttaaattcattcttgtttgtttctgtattcttctggcaaccagaaatggctgacggggctcgattttgcgatgttgaacgagaatggccttcgggatgttttgttagacatcaagtttgttcagacagagatgaagagacttggcaagatggggctggaagatgtatttgaggagatcaattcagtaggtccttttcaacgggttgtcttacgataagctcaactgacccgatgatctctttttgtttactattcctgcgccggctaacactaaatcagactgtcagcttggtgttttctccatcgctttcgaaatacatccaaaatccaagattccgtccgtcttatccggctgtcagtccgcaacgactgagtgtgattcttcataaattaggaagacacggtctaacccttggtccgagcgcaggactagagtacgaaaaaggattgcgtcgacggaatgaagcagatgttctgaggaagttgccgagcgggatgtttgtaccttctggaggtcgatagtacgatttgataaagcggatacgttccaattgaggctctcatcaagagagatggtacttgtagattatgtgcgcgctgcgacaatgataccttctgatttatgaccatacgacttgactcgacattctgtgactttacttaccgttcagtatacatctatcctgaattatgagaattttgttgaacatatcaaggtggataagatcaatgctaccagagttgacgcaatattatcccgtgttgcatggatttttcttaccctgcgaattcagtacggcctaggaaatggccccagctgatggtgattgttcattcctccatccatcacctatcgacgacgacgacgacgacaacaacaccaataacaaatactctaacacagagacagagcagaacaacaggaggagtgactgaaaatatagatagcctccgtacttccatcatgtcatccactctcttatccaaatcctcccgggacaagatcgagaatctcccggcatatcgttcagcatcatcccctgtagagtatacaatgtcccagctaccactacacgtcaacctccctggtaaccaggcggcaaactttccgaaagcgttcaacccagagagagctctgctataccagcgggctatggctcgaagcttgcctaagaagacattcttgagcaagtgcgtcacgttggctgttttcgcgacagtaggaggtgagctggttttcttcgcttataacttttatctgagagataccaatacatggcgaagtatggctcttgagaacgggaggtgtcttgatgagcggggctttgtttcgcattacctgtgttctcgacaaggcaaatctgattgacgcttatattttatctaacgttgatcatctcaaccagcaatcgcttatcatctactgttcattgaggattacggacatgataatgtcatgtttgctgaggtatgtctgctccggtttgttttgtttggctggagagagctaagctcatctcagcgtctctctcttcttttctcttcatctgcatctttccgcgtgaggggggttcatcaggctcgaaaggaaagactccgccagatatctctaaaacgacctctcacagcgaaagaacaagctattctagaccgacctgctatagagactcatgagctagtctccgacgtcagtttcagtgacctcttcaggcgaatgggtcagcgtttccgcgatcgcgaagaagatcggctggctcgacaggatgcttacaagcgcaaaatcgggctgctggatgaactcgacggcacgtcggcagcaaccgttggtacatcagactctggaaccggcttaaattggcagcggtatcagcgaaaatcgaacgtaagggaggcattacctgaagatgtagagtgggataaggtcaaatctctcaattgaaaactcctcatggtgcctttgtatcaaccaatgtatatgttgtaattttcaaggtgttgtcataagacacaacggagagaacatatatgtatctctgcagcaaagatctaaacaagctgaaaggcgcacatagtaatacatggatcgtttccttaaagatacaacgccaccctctccgtttcatgctatctacctcgaagagtcgatcacaacaacacgactaaatcgagtcaaccaaagacgttcacctgatcttacggctaccgaacccgccgaatcccatcattcctgcaattccttcgtcttggacacccatcttggccttaagttccttttctcgcttttgttctttctccacccggatcttctgcttctcggcctctcgacgttggtcttctaatcgagtgacttccgccagacgtttttcaaaattgaagcgtttcgattcggattcttgagatgtctgcgctcgaagaaaggcaatcttagctcggacttgatctaatgtggaccgagcaacctgtgtggtctgacccaaacgacggaggtctgcaagacaggcaagaaagagaaaccaggcgttcattacggcgtgcagtagaggacgattctcaatcaagaaccgagtacctacgcgttttaccgttgacatgactcagataggcgatcgaatccttcgacactctcttgcaaaggtcacagtagaatccgggttggccagctccccgtcctccggggttattgacgaccatggtcttgttaaggttgttgtcgatgccaaggtcatgagttcgctgttctagaagtttggtcggtttgggaagatctggctttgtacgaggagctttctttcctgatgatgatgatgatagaggataaacaaagaaaactgtctagtgtttgaagacagagtagacgagaagagcagcaatccatgtatggagaagaacataccttttaaggcagcctcctcatgctccttagctttatcaaaagcttctttgtctcgttctttagctctctctttgaagacctccatgtcccactttccatctctgcccgatgcattctatgtacacccgacgacgatgtcatcgaagaaacacgaccatatcgaagggagaggttagacactaaccataatccgacgagaatctcacgagctcacctcttgtttgccataagctcctgttttttcggccatactgaacgcgaatagaaggcgattgcaagaatgaagagggacggcaagcaatgtagatgatgccgatgttgatggaggaagaaagaagagaagaagcgacgtggcctcgaaatttcgaattcaatcttgaactcgttcagcactcttcccatccgactctcttacttactcgtcttcatcggcactcaaccatcgtctcgttttggatggctcttctttttcgtccatcgtcgtttcgacatgcagcccatctcagaccaaacagggctatccatgtaacaccgttttgtcggtttccacccaaagcaagctctttagtccctcccacgacggatatctccaggatcaggaatatcgggattttcgctcacatcgactcgggaaagactacactaaccgagagtgtcctggttcattctggatagtaagtgaattcttgtttagcatcaaatctattgggcgctgcttgttgaaactggtttgacttcttttcttggtacttacagtattcctcatcctggcactgtcgatctaggaacaacatcaactgatttcttgccggcagaaagagaacgagggatcaccattcaatctgcttctagtcagttagcatcacttgagacttattcacgtcgctggctctcacacagactctctcgttgtttgatcttgtctagttcccgttcagtggtcgaatcataccgtcaacttggtcgacacgccaggtcatgtggattttactatggaagtcgagagagcagcaagagtggttgacggtgctgtgattgtaatggatggtgtcgaaggtgtcgaaggtcagaccgaaggggtttggaagcaactaactcggtaagcattgatatctgtatactgtctgtctgtctgtcgaacaccgttcacacctttcgttcttctccttcatcgacgatggactcttcataaaccaagatacgacgtagcaccccggattctattcatcaacaagcttgaccgacctggcgcctctctcccacattcccttacatctacacaaaatagacttcacccattacctctcttactgactctgccaatcaccactttggacagcaagaacggcaaaggtggagaacctggcattgtcggcttggttgatatcgtcaatggaaagatatggaagtgggaaggaaagaggggagaggaagtgaagacagaatcgagaatctttgacgaattcaaaggcgatggtcagggaggcgagatcttccaatgggatgagccctcacaatcatcattaaccggaaagaagaagtcaaccaccgtttcgccttcgtccactgcatcttcgtttcttccactcgatcatcccatcaggcaggaagccattgtcgctcgaacagcgctgatcgagaccctctcgacgtatcacctaccattgcttgaagagtttttcgacatcccctctccaaccacctcgattccctctcatttgctgcttccgccttcctctctcaaagcagcaatccgagcactcactctgcaaggcaaagtcttaccggtcttatgtggttcagcattcaagggcatgggtacagagttggttttagatggcgttgttgattatttgccttctccaggagaggtggcgcctgccgcgatagtaggtggcgatgatcccatcacccttccgtctgattcagaaaccaaatctggtaaagcggttaagaagaagggcgcgcccggctggaaaaacaagatcagaggaaacaaaaccgcattaatcaacccggagaagagggagttgttcgttgaagtaggcgataaaagggtggtcgcgttggccttcaaggtcgtttgggacgatatgagaggatggatgactttcgtgagagtctattcaggtaagccaacgtaatcatcatacggtgtatcggtatttgctactgattgcggaggtttcaactggcatatacatatatat

SEQ ID NO: 2536 - DNA, 25932 bp, Xanthophyllomyces dendrorhous
atatacatatatatatatacatatacaggtaccctcaccaaagaagcgctctttaacacgaccgttgatgaaccagaacgaccctccaagttactcttgttatacgcctcacagcccattgaggtcaactcccttccagccggatcgatcggtgtacttctaggattgaaacacaccagaacaggggacactcttctttctgccaacgatcctcgacggctgccaccgacgccaacccgtctgcgaggagttgagatacccagcgctgtatgctcggtggccattcagatcggaggaaaagaagaagaaaagatcgtcggcgaagcattagacaagctcgtccggcaggaccctagcttgcggttggagcgaccctccgagaacgaagaggcggggatggggcaagggagcggagatgaaggtcaaacacttcttcacggaatgggcccgcttcatctcgagatctcactcaaccggttggatgaggaacacggcgtcaaggttcggagcgggaagatgagggtgtctatgaaggaaagtgtgttccctcagctgacggaggatggaacaatagaagttgaggatacatgggaaggaacggtggttgggcttcctaacaaggtagaggcctctgtcaagatttcaattcaacgactgtcagatcaagagctgtttgctctccgagcttcttcgccttccgtctcggccgacatcaatgaatggggaggaaacgaggtatctatcgacatagatccggaagatcccctatatgcccttctgccatccatcacgtcttctctctatgcgtgcatcactagaggaggccctctgatgggccttcctttttcccaccttcggatcagcctcgaaccaatctcgcccttcgccggacaactagcgactgcagataccttgcctacctcttcctcccccaaagataaatctgggtctccttctccatccaactctggaggagctccagcatcttctctcccacctcctgcagcttacgctcgagcaataaaccaagctcttcagaaagctgttcgtctagctggaccgacagtcttggagcctttggttgagactcacatcacaggggtcggaccgacagatctaggtaaggtggtggctgatgtcgttgctagagggggtacgattcaagaattaggtgatgaggccgatgggtcaggttcaccttctgaaaagatagcggaaggagaagtgacgtatgtgccgcctggatgggtctctccttcagcctcggttgacctgctcctccaaggatcgtcggcggagaaggtaatgaaacggacaattgtggccatcatcccgctcgcagccatgtcggactattctggaaaattaagaagtttgagcgctggtggaggaacgttccaaactcgagacggcggttggggcgaagtcgaggttagcgtagtaagaaaaagagacgaggaagattgatcggtgaccgatcgaaaaactgcaaattctaatctatatatgttggaagtaatccttctgtttcttcctcactcgttctatgcactccttgcttgctagttcagaagattctgttctcttcttgaggatcaacatctatgagggttagtaaaaaagagaacggcaaagacgacaaagagaattagataaagaagtttactagctcgtaagcatcatcagtgaaattcaagtaagagtaagctgcccagtccttattctacttcatctcctctgaccagctcggatagaaacaacacttccgacaataccaacttggtttcctatcccattgaatatctccatcacatcttagagcaaagtccacacatattaaaccgaggaaaaattgagaggagcggcgtgacgtctatttttatttttcgtgtcagaagtcatttatcatttagagaggcttggccgggatctgggtgaggaggactccaaatcgcttcttgatctgttgcagaagcgtcaaacaaaggcaagtgagatatcgaaccaaatagagaaaaacgctcttgaaccgagcggtataccacccgcaacgtctcactccacgtcaaaactcgagaaagaaaggatgagagtagacgaacggtgactcggtgtcgggagaacttgtcatcaggagagaaccgagctgtcgaagaggaggataaatccaagcatacacgagtgagttttcaaccaggatgcgtccagataaatagtatgatgtgaagagggcctgctcaaaacaaacgtgatcacttaccagggtgtgccgacttggcgactcgtccggtctcggtcactttctgtatattcgtgcacattcgtaacaaaacacaaaggggaagatgaacaagggtccccagaagggaacgtttggattgacctaggagataggaagaaccttcaaagtgtagactctaaggtcggaaggacggattgacgattagttttagaacctcatcatttgtttctcgggtgaaaataagcaagtgaaaaaattctttcaaacactcaccgcttgccatccggaccaagggtgtacataagatgcatggcgaaagaagggtttgaagaaacaagagtagtcgagggagagaagggcgatagttatcaagtagagggtcgttagaaggtgaaagcgaaaagcgaacggtgcgagaaatttcatgacttgtgcgggcttaggcgaaaatgcgcagcactgactactacatcaggcgtccatacacgtacgtatccttgctacaaacattggacgaaagcgaccatgctatatcgtagagagttgatgacaccacggtggctccaaaaagatggggacaaaagcgagcttatggaaagatccaagagaaggagaaggacactcgatctgagaagtgattatctgcagagtgatgcccgagaaagaccacagttgcgtgcgcaccagaaaggaagaaaagggagcaaaaacaaaagaggggtgtgtgtatatatctgtaacgggtatcgaagaaaatgtttgggggtaacaacgtagagcaaagtattcgtagaatggtgtgggcagattgtagtagagaggcatcaaaggacaaacgaaaggaccatgcaaacatatataaagaaagaaagagaaacaaatggaggggaaacaaatccaaacgatataggagagaaggcagaaatacaaacaaatacccatcgttcatctccaagttccagcagaagttgttctacctcttaagctgctcgccagatcaaaagttcctatcgacgatgctgacgacgccgctgccgccgccgtttttgacgctgttggcattgcatagctcggtatcggacccgctgtaagcgccaacgatgctctaggtcttgcatatgacgttgctgtcgtcgacagcgacattctggtcggtcttcttgctgaacttgaaggtaagcttcccaatgcgcctagctttcttggcgagttccgtccaccgccgatggcaataccattagcactcgtcatctcggtctgaagcatccgacgagctccgccatcgagagcactccttgaggttcctgttcctgaagatggagtgatgaagtcctcaatagatggagaacctgttaggcttgatcgaccagaccggctcttcttctcatgtctgactggaccgatctggccggaaatccgacgcgacttgggcgaggaggttgagagtgacatccgatggcctgctggccgaccaggggatttcattcgcctgatcaagtttgacgaggaggatgccttggaatgatcgtgtgaaggtccactgcgacttgcagctgctgctaaggtgacattaatccggtcggttaccgacgcgccgccttcgcttagaatctgacgaccctcattgggcgttggcgcgcgcatgggagacaaggcaatttcgttttcttcggaaagagatttcatgttaggcgatcgcgaggacttatgaaggtgattcgtccatggggctagttttggcaatgcaggtgctttataggatgacgaggatgttgaggaagtggagcaacttgtggtagaaggagccgttgatggcagtagtggatgagaagaacaagattgggcaggtcggacaggagggcctaaggacgagcttgggggttgtccgtccggcttgtcatcttcccattctgcgtcctctgaggtcgtgtcttcggtgaaacttatcctcgtcgcgtcatcgatcgctccctctccggcttcgtccctccatctgaacgcttttttcgccgattcttttattgacggctccctagcaacgatcccgttagcggccgaccttgccgagcgaagtggggacattggcactaacggccttgatgtcttgagaaggcccttccggggggaggacaacaccggtctcgaggatagagaagcccgaccacccatgagggaatgccgagctcgaagaggttttgctggcgaggaaggtaggctgggtttggaatacgaaagagattgacggcggatggcagttgaagccagcggagcgtttgacaatcgacgcgcagtggtagcttgttttgttgctgggaacgaacttggatttggggggttggataaattggaagagggtagagtgaatgatgaaatcgtaggcggaggtgctttccaaccgttcgtgaaggaagagattgacgatgataaggtcgtaattgaagaggaggccattgatgttgccgaaacagactgaacctgggcagcatcggacgcgatcgatctcaacagagactcccagatggtcgtgttgagctgggcagcatcccctagggttcttgcagcctcggcgacctcagcaacctctggatctccgtctccttcccaagcgattccagccttgtcgagctttgcctttgcatcaaccatagctgttaacgacctagcaaacgcccctgcaaacgacgcgacccgatcggcctggttttgaagaatttcaatcagcttaccctcccgcgcgcgcattttggcgacctccatctctgagttgcataccgaggcggctcctctgacggtttccacactcaggtcatctagcttgtccaaccgtcgctcggagaccgctcggacgacaccttcaaacatggatgcggatttagaagccgactgaagccgttgctggactgaggccgaccgaagaacatcctcatctggacgggacaaccgctgaaggaattcgcgctcagcaagcatgaccgggttaagcgtgccgggcgtgcggtcgatatcagccagcctagatcggatgggtcgtagctttgcttcggtggcgaagatgacggcctcgcatgccgcgccatcaacgatgtggtcttttgtctgtgcggcttttgtcttgacgtccgaccgggctttgtcgacctcgactttaatatctgctcgcttccgtttctccatcgtgctctcgtctgaagccttgtcttccagctttttctgcagtgtagaaaccgtgtgggagagctcggcgatccgttggacgtactgcttgacgtgagtgttgacattatagagattccggctgacgtccgtctttatctgcttggctcgattagcatacttgagggtgttttgtgtgtcatcaaagtgaactgaggagggcgagacgcaaacgatcatgcacgtcttgcagtttccaccgagagaaaactcgagcagtcgggtgagttttgaatcccggtacggaatatgtcggtttcctcgctgacagagcgcgttgatacagttcccaagagcgagaaaggacttgttgatggacgagccttccttcatccgggcacctaggttggaggttgcggcagcgcgctcacttccggcaagatcgatgatggataacgtggcgatggtcatagcgctctcgatgccggcctctctcggcttgacgacgacgttgatctggagaacggcatgtgaacgcgatgatgtcttgttcgcgtttgtcatctctgtccgtcgacgtttgtttccaagttcgatagcctcgtggatatcttccgggttggacggtcttatctcagtcaggccgggtacgctgatcctagacttttcatccttgcggagggcgagtccgttccggggcggttccgcgtcggtaagaaggtcacgaatggtctcgttgtatatctcaaggtatgaaaacgaaacctgagcctcaatcttatcagatttatcgtcaatcagctgaaacagatgatccatcgtgagttgtatgacccccttgtcgcgaagaaccttccgaactctcgaccgaccgtccaagggatctatccaagagtcttcatcatactggccgttgatggtgtgtgtcttaccacaacctgtcgcctagagaagatgagtagagaaatcgtgagaaaacagctaaaatgcccgaagatgcgcagaacactatcgacgagccggtcttgagagaaacactcactccatacgcgaaaactgtcgcattgaacccgtcaagaaggccgggaagaagcggaagggctgtgttctcgaagacttgctcctgagtggctgttctgtcaaagacacggtcgaagcaatacctgtttttggtgagtagatggaaagtatagtcaagtgagcaagtttcttattgacgatcaagaacataggcaggatcaacagaaacgatctatctaccgagcatctttgtaccgacgacctccagaggcaccgaggcccgaaccgaatcgagcaatgggattggtatctggagcgtcaaatacgagtgtccgatggtcgagcacatctgagggagtacaatagtaaaggtgctcaagttaacatttgggtgcctctcttaatacaagacatgatatccgttcgatcgactaggaagatataggatacgacaaacggaacgtactgataacctcgccaaagcctctgccaccgtgaccaaagccaatggagacttctttcctaggtgttccttttccggctaggaacccatcacccaagaaggtagttggctggctggacgggatacgggcctgctcggcttcgctcaacggtcgtacccggactaagaatcacaaaagaaacagaacgaaagagtcagtcacaggtctgagggtatactacggatgagactgtgctgtgagatgaagagaaggatcagagcgatcctcctcttcagatggaaagtgggtggtgatgacgatgatgacgaagaaaccgcggtcaatgcacgcagaaacgtaccggcgaccttgatcgaattttccgacatgagacccttgacttaaggccgagagggagatgtcgacaggtgaatgtaagtatgtctgtgtgtatctttgagcgttgatcaaaggagagacgaagaaggaagagcgtgaggttgatagttgaaagagtggaacaaaaaaatcaagaaaagaaaaacaggcgcgtccaacaacatctttgttggatggtcgatggtgaagacgacgaggatgatggtgaggatgatagttctctttcacagactcttgcagcatggtgttctcatccaaggactcttagatatccccgtcgtgtttgccttccctttcgtgtatgcatgtgttgctggttgtgagaacgctcatagaataaatgtattctcacaactctcctcattgccatcgacgatggcgaccctgttcatcccgttcagggtgtctctatccctcagctgatagacgaggagagccctatcagtccgtactgctgtatataatttgtgtgctttgtccagtttccataattcttgtccgacagtacacgagaagcagcgagacaacacttcatctcctaaccacccaatgtattaccccggccggtaaatgcttgaaaggatgatctaacatcaccctttcctcccgtatttctcccatccttcacattatcttgattggatctagctccagcacgttctccaaggtatccctcttgaatgagagcttgtcgaagatcatcccgatcagcgtagactcttcgggcgatgacccactggatccagctcgatggggtctcggcgagtgtttggccggcgtgttgcccaaaattgacgatgtacggagacgatgagtttgtcgatagtactgttcgagtggatgatggcgtttgggtttgagtacgagtatgagcaattatccgagacatctctagattgttggcgtcgtcggtttcgccgtcgatgttgttgcttgtcggatgttggcgaaggaaacgaaagtcgcctgttcaacaaccatcactcattcaccatcaccatcaccatcgatacaatcactcacccactcccaccaggtcatgtctggaccgcacgagaaattacttcgccatgaaccctcctcgccgtcgtctccattcatagaagaatctgtacaagaagacacatcgttcgaccaagaaccggatagtgccgtccctcagagcttcctaattgagcaaccgagcagaccagtaaatcgtcagcctgctcctgcttctactctcctacctcctggtcctccttttggtggtgttgagactgtaaaagcggaaagcatcacccctctcactttcacaaacgctccctctatccctcgagtgaagccggtggaggccgttctgcccttcccggttactacgcccttgacccatcatcatgctcacagccggcctcgtccgggctccccatcctcgactacatcctcatcctcttcgactatctctgcctcgacttcatccgcctcatcgtctcctcgctcatcgttttcccgctctccttcatcttcgaccaggcttagacggatacatcaatcgtcttctcatggtcactcagataaccatcaaaggaacgcttcgcttctcagtccgaagctcgatgcgtacgagaaagcgttgtgggactgggtcaatgtcgacgatcttgatctgttccttcaagatgtatgtcttttgttctcacacttttaagacgagatggtttctcaccaaacattctctttgctttgtacaaatcaactcttcaaggtgtatgagtactataaaggcaacggaatattctgtatcgttctctccagagccctgaacttgatgtaagcaaaactgaatcaagctcaaggcaaacaatacacgataagctcatccgtccagtcatcttgcttcaactcaacatgatgatctatagtactgttggctttgttgttggcttctctactttccttttgcgctgcgtagatttctctctattgcgcgctagagaaggtgaggtgacgtctttagaacaagttatcgttccacagtgtattgcgaggtatgcctaggtttatcactttcatcaattctctcattggatcctcatctcattctgtccattcatcctttgaaccacgcgtttacctatcagatcatctggaatcaccctgcttggtttcgttctgttcggtgcattttacatctggcagattgtcatgtttgcattgtcaatcaagaatttacgtgttctatccagattctactctcatctcctcaaaatacccgacgtgcgtttttctttagactatgaaatggtcactagagtttataagctaatcctccctcttctttgatcaaatccgactcaagaccgacatccaaacggtctcctgggcagaggttgtcacccgaatcggtcagattcgagaatccaaccccatcacctccctatcgtccagtgtccgtcggacaacaactggaatgtcctcagattcgtctcctctcaaactagacgctcatgagtaagatctcctttagtgtggttctttacattctttttcaaaaatttaatcaagtctgacgactcaaaatacctatgttcgacgccgtcgttcagcattgcaaacagaatccttcgacaagaaaattatcttgttgctctattcaacaaggacctgctcgatttgtctgtacctggagtaccgagtatcttcggcgggaacaagcaggttctcacgagagcgctagtgtggaacttgcgattctgtctgctcggctacttatgcagcccaaggaacgaaggaggcggcgtaagaaaggtgttcctcaaggaacgtaataaaacagcgcttgtagaagggcgagtcctttcgaacttgcattcacaccttctcatcttatggcttaccgaaggctgtcaattcacccgctcaggttgcgacagagattcatcttcatgggcatcatcaacgctcttttcgctcccttcattgtgctctacttactgttctattcgttcttccggtactttgaggtctgtttctattcaaatcatacagactagctctatttgttgctgacatcttgcatcctttcgtcacgtcttggtcaatcaaggaataccacaagaacccatcttcagctggcggccggacatacacacctctagctcaatggaagttcagagagtacaacgaactcccccacttgttcgagaggcgacttaatgcaagtcatccgatcgctaaaaagtatatcgatcaatttcccaaggaaaaaaccacgatagtcatgaggtatactctgttcctcttctttgtcatgtttccttcgactgaagtttatcgaatttaaacattctaaatctcgcgtccgtcgttatcactccgtcagattcctgtcgtttatagcgggtgcttttgcgagtgttctagtcctcgcctcaattttggatcccgatttggtgcttcatttcgaaatcaccccacatcggaccgttttattctacattaccgtatttggatcgatactagcaatcactagaggaatgattccagaagagggtcatgtagccgagccggaggttcttttggatggtatcgtacattacacgcactaccttccagacgagtggaaaggaaagcttcactctcgacaggtacgcctagtccttcagttcaacgatacttggtcttgtcttcactaagttgtgccaatcgatcggatctgcttctcatcctacgaacctttgtttgaatcgacatgccaggttctggaggaattcactcagttgttcgatatgaagattgctgtctttgccagagaacttctctcggtcctccttacccctttaatcctctgggtatcattgcctaactgtgcaccagcgattatcgacttcttcagagagtttaccgtacaggtcgatggtgtcggctacgtctgcagtttcgccgtattcgacttcgagcggcacggtaatgcgaaggtatgtttgaaatctgatttgaaaatcgatctgttcccaaataaccctaactgactgcttggttctgtgagcatgtgtagtacggcgctccaacagacgctccgcatgctcggttccaatctgaagatggcaagatggagaagagtttcctcaacttcaaagtacacttcctccttagtccttcttcttgtacacggtccaatgtcactgacactttcgtcgctctactcttaggcttctcatcctacttggaaccctaccgatccaaccgcctccatgttcctctcccgattatcaaccattgatcccttcccccggcctgatcggtctccccatctagttccctcacgccccccttccccctctctctcaccctcaagagttaacacgacggtactatcacctcctacagctcttcatttaggactcccttcgaccaaacacccctccctctcagttcattttggtccgtcttctcatccgaatcgcccgtcatcgtcatcaagtgctcttcggccacctcgatcatcaaacacacgagaccgaagcaggacaagtcggattgaagagcgtgaagaagatacagaccacctcgatatggactctgagggtccagaaagcataggtctcaaaggatgggatgatgtgtccaaagatagaaccaagactagattaggaagaaccgggcgaaagtatggacaaggacaagataatgaacgagagggtgaacaggagggcgacgagggcacccatccaaggttacctgatggcgacgtcttgagcttattgtccaacatctatgcaaccgctcgattgggacgctgaacgcgagcgctcaaaagggtttttttcttccacccgggcttgttcttggctgatgacggctcaacgtctctattcaaagttgtatatgatctttcctcactttactctactttcctcaaattccgtgcctcttgatgtccccttccccctccttttcatatatgtaaatccttgtgtcttttttatgatttgtttgacgatatatcctctatgacggtgtaatcatggcaagatgctagtaaaacagggaataataaatatatagatagaacgatgcagaaaaaagaataaagatgtcgtctgcatcacgacccggatcaaatcagccagctccggactctcaatacgatagaccaagccatcacataggccagctgaagtcttctccgaagttcatctgaacagctttcacgctctgtattccggtccgaaaagtgcccttacggtcagttaaaccagacttcgagagagaagggaaagcaaaggaaagaaagggcgaacagtgtagttctccagagcatgtgcccctagatctttcccaaaccctgactgcttcttaccacctggttcaacagaaaacaagacatcggatgaaacagatgagtaaagaatggatgactcagtgagtgcttgaagtggatcttggcggtaggatgatcgaagagtgaaggatacgtaccgaatgggatttgagggttcaggatgttcgtctaagtgaggttgtttcatatccgtaaagaattcatcagtggagttcaagtatggctagatacttccagatacgtctgaagaaacgacacaccatattgacccagacagttccagcttccaactcgcctacgactctcaaacactggttcatatctttcgaaaagaatccagcggccagtcctgagatgtaaaacaagaaaaaaacatatggaaagacgtatctcagtatggcagtgatgaaagcattgatgatcgggaagtagagagattggctgaccgtaggatgtgttgttagcgagcttgatgacttcttcctccgtctcgaacttctgaacggccatgacaggaccgactgaagacgtgaaggcaaatcagatagttagcttgcaaccatcaatgatcatgatatcaagatgcactgtttgtttgtttgtagatgactactcacaaatctcttcatcaacctaatggaacatcccaacaaagaagaaacaaggtctcttagaaacaagaagggagctatgtcagacagaaaaaaagagatactatgataacgaacaattttcatcccaggcttgcaatccgtgaagatggtaggctcaacccaccacccatcctctccccatgatttccctccagcagccaaggtcgcgccttctactttacctgcttcgatgaaagacataactttttcatactgggatttcgatacctgtgtaaagtgatagccttgttcaatcatgagacatagatgcgcaaagaagagcacacacataccaaaggtccgtgattgactccctctttgttttggtctccaatcgtgacaagtttcgatttggcaactagcctggtgatggttatacacgattacgttggttctgtcagtactattgataaagcacaaacaggatcaagaactagggacatacatctcgatgaccttgtcgtaaactgaggcttgaacgaacaccctcgagttgcaagtctaaacgtttcgactgaattcagtaaaaggcgcttctggacggccgtactgaatcatcgcgacgaatagcaggatacttacacaatcttgacctgtttgcgtttagtttgaggagaagaagagccattgaaatgaatacagatcccgctctgttgctagaacgggcgtagttgatggagacatacccatgttgaagaatgttcctataaagtccattgtgattcaaaacgagcaaagcgagttgtgagagacctatccatgacagcatgtgatcaacatctagtcttttaaatttacccagcattgcccagttagtagcttggtctagatcagccgactcaaagatgattcctgggctctttcctacaatgagaaagcccggttagcagttggatatctaagaactctcgtcaagctaaggagcaagtctcacctcctagctccaaagagacaggtttcaggttagacttagcagaggcttccataatctttcggccagtggcagtcgatccggtgaatgaaaccttaacgacccagaggatccgacaacgacgtaaatatgtgtgcatgcccgaggatatgagaacgacagagactgaccttgtcaataccttggtgggaggctaggacgccacccgtcttcccgtcacccgtaaggatctggaagactcctgggggatacccagcttcgacaacaagttctgcaaatttctgtttatcatgaaccccgtttatcaaagcgtgagcgctcattcaagcaaaggcgtaggtgccataaacaggcaactgaccagagcactgagactagtgaactcggacggcttgaggacaacacaacatccaaccgccagcgcaggcgcaatcttccagctcatcatcatcagtgggtaattccaagggacgatctgtgcgctgagtatctccacaacccatgcatatcagtcgatgctatgcacataaagagaaggatattgatcattctcaccagacaccaataggttcatgcttagtgaaagacagccttgtcatgtcgtttacttcagtcgtttgtccatggatcttatccgacctaaagagtgttgggagaacgaatgaaaagtaagaaattaatcaagtatcaagttgcaataggcgcgcaaagggatgaaaagatataccatcctacatagcaacgcgaagtacgtcccaaaagcaatgatcagtaatgaaggttttgatgggaactgacgttcaccaaaacgaaggatcaagtgctcttatactcaccggcatagtatcgaagagtggccactacgtccacaatatccaagtcgctgcaagccaaatttatcgatacttcaatcaattgacatatcaaacgaaccggaacgaaggatatattgcgtaccgaacgatgcccaaaggctttcccgagtcccaagcctcgatctctgataagacagatgcgttctgctcgatcagatcagccaacctgttcagtagcctggctctctctcctggcgcggcacgtttcccccaagtggtcttgaaagcggttcgtgcgtatgcgatcgcctggtcgacatcggctgaatgcgcttcagagatggtcgctaggtcggaatgaggaggcaggggtgagatcgacctatagttgacaacgtcagatccgagcagctcaaatgggtcaagtgactacggagacatcgagaagtatagttgatactgacttgaacgtctggcctccgatggaaggaacgaattcgttgttgaggaagagaccagtctggatagttgtagtcaacccggaaggaagagtgaaagaggatgtggatctgtgatgaagaacggagagtaagagacgactatgcgggtagggtttgaggagtctggaagcagaggatatgggaaaagagatcatcgatgctggacgaagggcaaactgaatggagattataagaagataaagagaaagccgattattaaattcaagcgatttaaacgcggttctggttgtaacagatccctcaggccctgagggacgttaagatcatgagctaggaacgagataaaagataggcgcggttgggaagcgccagcacacgattgtcatacaagacgttttctattgatcaaataatgtcgtttaacatcaaaggagtagtaatcaagtggttacgatgcttccctgctatatcagcaagttcaggaagtgccctctgggcgcgcaggttcgaatcctgtctacttcgttctctttttcttcttttcatcacctcttttggttcatcatcattttcttttcttttctatatatatttgattgtttcttccattcttctgcttgactctaatccgcacacacatacaccgattgatcgcatgcatcagctatatcataagaagaaaaatcacataacaagaaactacaagaataagtaagtaagcaggagagggagaagcatgtctacttatgcgcaataagatggaaactgaaagcggaaagatgcggggtaaaacacagaatgaatgaatgaatgaaaagagtacgacatgtcgatcgaggcgaaaaaagagaatacacaaaactctaaggggagacaaaagtaactaaagcatgaggacctcttcctcatcaggtcgggtactcgcccttcctcctcgaatcctaccccatatatttctccaagccctgccggctcgaccggccctaccctctccactccgtcttcctcgactgctatcatcatcatcatcatcctcgtgctcatccatatccacgtggagtaggccagcgtcccgcaaagcaatcattaccgggtcagccgacggacgatcagccggcaaagctccaccagcactggggttctcatccgaggcagtagctgagtcctgttcagcgctggtcgagcgacttcgagaagaccgaaggaatagaagccacctagataacccagaagcagccggctcgtccgacgtcgagtcctgagaagagagcagcgacttttcatatctatgcacacgccagtatcctcccaggcttgtaagaaggacaaacctacagaagaagagaaagagaggctcagtaattggaacggaaggaaaatcttgggggaaaaatgtatatgaagagcgaccaaaacacataccagccgaccgtcattaacacaaaactcaaccactcattcgcctgaccaacctcctccatcgtgggctggttgaattctggatgacgtcccgatgtcccggccgcactctcagatgtcgagaccggactcgaagtccaaccggttgcaggtgaccaagatagtccagtcgggcgagcttcactggcagatgtcatcgtggtgtggggatcgagcgggacgcctgtatctgaataaccgcctggccaggcccagcttcggtcggagagggcggcagcagtcgaggtagagttgtgaggcccgtagattccatccgggtcaatcccattctccagatcaagagctcggtcacgaagctgccatccgtactgaatgagagtgagacccaggccggctcgggatccgaattttgccgcatgggattgatgtaaaacgtaggtgagaaggaaaccgatgaattgaaacgacacggagaccaagagtgaccagaggaacgaaaatagcgtcccgaccggcagagaatcgatcagaatcgtatcgcctgaagtcgcgatagatcccaatgggcctatgaaacagatagatgtcggagcatgagtccaagattaatctcgaaaaggtatatcgaaagtcccaatcttaccaaatgaaggagtcaacacattgtgttcccaatagggaggaaccgcatctctcaaggcaatgttgtatgcctttttaaaaaatgataaataccaaagtcagtacacactcctggccggggcaagtgcagataaggtcaaaactaacgggtggtccgtctttcgagctaaactctgccatcacctcagtattatctccatcgctatttgtcgccccctctccacgtatttgttccggttcgggcttcgcgttcaggttcgcccatacaccatcggaccctctgggcgcagaagcagcggcggaatggtttgactgaacgaaatgagtaggaagaattgagcggaagaaacgagaaggaccggaagacgatgaaccgttcggacgtgggtatgaaggggtcgtcagaagaggtgtcgggccggtgggcatgtagttttccggataagcacccggtggaggggatccaggagggggaagaaactgaaggggagcaaagagacagtcatgacgggcgaaacggtcaggtatagatcgacgaagaagcaacatttggaaaggttgatataagtttctgtcatgaaagacacagaacgcctcccgcttttgtcatgcaaagtctgccaagactttgccgtagtgatggaaacccaatgttagacacctcccttcagaactgatacctctacagaggtaatatctccaacacttgaggcgaagagacagcgacgagaagagaatggatcgaacagacggaacgaattaaaagaaaacaacgaaaggagaggaagagcaaaggggacccaagctcacgagacactcacgtaatcacgatcaaagtcatagctcgactctccgtcagtgttttgttcggctctattttgttctctcagcatggtagacaaatccattctagcaggatcaatcgcggcgttgttgttgttgtttcctccgagagctgatgactcgtccactggaggaagctcgctatcttcccctgcatcgaatatggttaccccacccccgccgatggtggtggtgctgctgctgctactgttatctccgattctatcgccacggccgttcccattatcgttcgagcctgatcggttggttgcgaatttctttgatcgagagagaggagcgttttcatcttccgatccactctcctcgtccgagtcatcgaacgccgcttccatttcttgatcatgatttgatgcacgagggggatagcttggagaaccggaagtggagtttgacatagatcccccagccgggagggacgagtacctagacatttgaagatataaatgtgcgtacgtgtatataaacgtttatgtctgcgtgtctgacgctaggctcagatagacttcaacaagaaccctgacgtgtcaggatgaaggaagagtctttgggatggaagacgagctgggttgacgctctgggggtggataggataagccgagatgggcgagggtgaggtgttccgtagtaggtctaattacggctgtatgcacagccttggttacggaagtaggttacgaccgtcagagttcatcagataggtatacggtgagaaatacaaaaacagcccatcacttctagttgagtgtacataggttttaatatatgagagtgagaaacactttatcgaaatagcgagagagatcaaacagtgctttattaaaatctgtgctaaatcagatccctcggtagagagccatctgagcgtcgatcctcatcacttgaccaggagtgaactgatcgcggcacgaatcgacggtatagctagtgtcaaggatggatatatgtttgtcagggtctgtatggatcgctatctagacatggatcaggctccttgagcgctactcactccatatgatttcggatagggtccagtcctaaatgttcacaaataccagtaggcaacgcctaacgatcagactctgagtcgcaccggtttcgcggacgagtacaaaatgatcaagagaatgagaagtgcgtacctcctccgggacaagtatctcgcccggtcgggcatccagcagcgttcgatccttcagcaggggtgtccgagacatagtctccgtttccgtaacatcctccctgcgtgacgagaacggagggaaaaggctgatcagcccaagaaagataggcaaggatgagaatatgttcaaatcagatgagaacccacctggaaggtatgataaagtccaagccaatgacccgtctcatgaactgcggtctttccggtgtctggatatatatacaccttgaatcagttctgcaggcattgtcaacgtctttttaatgaaggagtgaaagggaaagtgcttactatactggttgatatactgtttgtttgttcatttttgtatttttgtatttttttgttttcaaaaaaggataaagactcatgaatgaaacgaattcttctagcgcaagagagataaggaaacaacaacatactcctccgggaagagagccccaggtaaggacgactccatcatccataggtgcggactggtagctgaatgggaaagtcgcataactacacaattcatgtcaaacaaacacgcgcgcacggatgaagagggaagatcagtggtttggtctcagaaaggacagaaagagaacgcgctctcaccccaacaaacctggctgagttgaaaacccgacagaatagatattcaaatccgccacgcctccctttcgaagcgcttccttcatctcggtctgttcagaattccgtcaccaaagaagggaggccgttcaaatgtgagttcacggatgtgcgcgggacgatgattattgagagggtaaaggagaacaaacctgaagatcgttctcaggagcgacgtcatcgaaccagtcttcgttatcagttgtatccgttccggctttataacacagcagcaaagagaaacacgcgcgtaagctcatgaaccagataggaagagcgaaagaacgaggaagagcacgatagatgcgcacccagaacaaagctataagtcgtattcgcgtactgggtgttcatctgctggatctgactctgaatttgatcgtccccgacggcccctctggcggtatcatccgaagcacggatgacatgaaagtagacgtttataggcacacttgtatttgtcgagacggcctctttgttggccgctcgctcggctcggatcagttctactttagcagcgctgtcctccaggaaacagaaagcgcaaggataggatgagcacacctgaataattcgagggaagaaagaaagggaaacaaacatttgatcctcgacctcgaccgccgctatctcgacagatgcgcatttaaactcgaacccctgaggagcagccaaacaggttgataccatcccgagaaggaaaacagttccaaagagttgcatgctgtcagtcggatagtaagcttgggaaagttcaagaaagttggtgaactttggaggggtagcgagatgaagaggatctggtctccgttctccctcgtcttatatacgaaccctcccgtttgcccttcccgtttctctcttggttatttcctttcatccaacccgccttgaaatcggcaaatccataaatatcttgaggatgatggaggacagctcgttcccgcttatgtatataggggatccgtgtttttctgttctatcaatacctggtggaacgtgttcggcagatcttgtacggaacacatttaatctatctagccgtctagcggctgggaaggtggatcaaacgcatgtactcaagatcttcacttcatgttgactgatgttcccaaaacgcttggctacttgttgttatcatttttgtttctattgaatcatgtctcgctgatacggagcatagtaaactgaaactatttaataaacgaggacgacgtaggaatgaggacgacgtaggaattaggacaggtaggtagaagtaggattgacaggacagacagaagaagatgtccaaagaagtaaccccccaagaatcggccagaaatccaagaaaaccgaagaaaagtgaagggaagaagagagaagagaggaaaatgtccgggtgttatgatatgtcaggtcttgggttatacatgatgatacagaagagaagaaacaaaggcaacggcttgaaggaaaaaaagcagcgatcagaaagatgtctgatacaaaaacagaaagcaagaaagaaattcaagcaaacaaaacaaatcggaggtggggattgagttggattagatgagatgaaggtgaaacatgcaagtgatggcaagcaaatcgattgttcgatgattatatgatgtaaagaagaagaaagacaaagggggaagaacacagaataggaaacacaaaaagaatttcttccatctattcagcttgataaagcgaacagatctcacagcctcggaggctcagtcggttgaggctgaggctgtcgcttgacaagatccctcttagcgaaggtggcaactgggcctgaaccacagaccgtaccggtaggtgtttggccgcctgccgtccatggatccgggtaggtgcaccctgcgactttgacgaacgctctggctgtatcctgcgcgttggcccatccgtttccggggttgatggtttgagtagagcctggagatgtatacgtcggtccaggtagagtgatcggttgaccggtttgagtgaattgggacagaccggtcggcacggcgaacgcgttctggagggtcgccggtggccaggggtttttggtcgacacggtgagtccggcgcctgtaccgccggtcatccaagcgtcgtaaaccccatcaaacggagtggattgaccgagcgaggcgcacgtcccgatggcctcccttgggtcttctggtgcgtaaccctgggcgagggcaagttggtaggaccacatcgggttcggaataacccctgtcgacagggttccgatcttccaggtccagaaaaagtaatcctggagggagtccatcgaggcgagcatgaactgtttgaactcggccttgaaggtggcgttccagttggtgtagtccgtccagtcggaacagtctccatacttttgagtgaaaccggggtaagtaccctcccatctagtaccaaggccaaccccgttgacgttcaggccacagtcattcggtgcgaatgagaattctccaccgttggcgagtccgaagttttggctggtcgtgttgattctgctaccccatacctgacaggccagagttgagagccctgaaagaccggctgcgtgaggggttccatcaaaagcaaagtaggtgtgggtgtcgagggtgactctatctgctccgttaaggaagccgccccaagagccgctggaaaagccgtcgtgaatggagatccagggtcccttaccttgtccaagcccggtgatggaacgaatgaggtcgtaagcctcggtgtagaacgagccgagttggtccgtgccgatggtgggcgcgtagggctcgttcatgattccaaacatcggcacaacgtccttgtactggtcctgagagatgaactgggtcaacgtccggatgtactcgagcgttcgctgagcgttggcgatacccatttgtccgtataccgtgttgatatagtcgagccggccggaatggttccagccgttctgagaacccggaacggcgtgtaggtcgaggttgatccgaagaccgtactttctggcccactcgattgccttgaggaagtaagtccaagagacctttgccaagaacggctcgcccgggtaggtctcgatagcccagtaaccgatgggaattcggataaaattgaagccggccgcggcgatctccataaagtcttgttcagtgataaacgtctcgtagtgctcggtcatctctgcctctagattacttcccatggccagggaaagcgtccattcgtcctttgcctggggggttgagttatagtacttttcgtacagcgcgggtgcaataaatggctcagtattcaaccagccaccaaggttgacacctctgatcttgtcggttccgtactggaacgtctcgttcaatccaggcgaccagctttgggatcggccggcgtagttgacgttgaatgggtcgctcgcgttgtaaccccagtggccgccaaatgggtttttgtaggtaaatccgtttgagccgtcagcaaggatgacggtggagccgttcgtgccgaacacggcggccgagacgatggccgcgctcgctgagggcgtgacggcagaggcggaggtagcggtggctgaccgggaggaggaatgagactcaatggaggccgcgttagggtcggtggtcgcgttggatgactcgttcgacttgtttgcgttcagactgtaaagggagagaaagggagagcacgaggggacgttaagcggaaggaagaagacgatggaaaggaagaggaaaagatgcgcaagaaaagagaacgaagaagacttacgcaacgggaacagcaacggcgacgacgatgactgtcaacaaaccaaatgctcccaagagaatccatttttttcgtctggcccagagactaccgttcgaattggcgatcgtatccttctccggttgatcgtagtactcggggtggttagaacgagcagagtcgtatttctctgcctgtgcagtagtgaaagcgccgctctcgaggcctgcagaagacgtccctgcaggttggtagctatagcttcggtcgttcaacagaggaaggaatgacttcattcgatctgtcgcaggtataggcggagtcgaggatccagtgccagagtagagctgtgatgacgggtgatgcaaggcagaaggaaagagctgatcagttttttgaaaataaaaaaatcttggcatgtatctagacgatacagacaatacttgtaagaaacaaagagagagagagagaaacgcatagaacaacgtacaccatcaacagagcctgaatcggaaaccgcaccagagtcggatcgtgcgagacctgggatcgactgagttgagattccggaaaagctgctccctcggactatacatatatgcgcgcgcaaggagaaaagaagaaaagagaagaggagggagtgtttctatcagcggttgtccatgttcgggttcggttgtatatacaagtcactctgacggaactcgatcgacacaaacatgatacaaagaaaagagagcgcaagaaaagaactcacagccggctatgtcgggagacaacatccccggcgcacccagaccggtgattccgtcgtcgggctcgtcgtcgttgatcgacctatgggtatctgatgagtttgatagtgggcggaaggacatttggtggtgaaagaaggagaagactaaagaggggaacgaagaagagaaggtatcgataggatcggactaggtgtgtttgaggtccgtacgtgcagcagatgtcccaggtcggacgtcgtcaggcacaccgagaggacgaaggcacgaggagaaaggagagggaagagaaaggagagagaggagagaaagaacagtgatgggagaaggagaaggagaggtacctgagtgaatgtgaatgagagagagagagagagaagagagaacggaggaaaggaaaagaggagaaaagaaaagaaggaaaagaaagaaacggtgtattcttatgtgacgatgatggagtgagtgcacacgcatgcttgagaccaagagaagcgtgtgtgtgagtgggtgcactgttgggcgagcgatcagtttgggtctctttctctcttggtgttagtcttgctctctccctccgttgctgtcatcttcttggagatttcatcggccaagagaaagagaccagcgccatgaggggaaatcagtcgggtaaatgacggcagacagggcagaataggccaatcggtcacacgcttgatatcaacttgccctgaatttgccctgtgtcctctatgccctgtgccctgtgccctgtggctttgtcgcccttactgtttttcccctttaacgtcttcccatgaatccactcggtggctcatcagtcaaccggtcagtcacactcgctcaactctctgcctctctcggacgcaatcatctctctggtgcagcattgtatgctgtgtttgtactctggtatacttgggtacattcgtaccagcacacacgcatgcacatgcgtttacatacatacacttatgtccgcacacagacgaatacacagacacgcatactatagcttgttcgttcactcactcattcattcattcacacacagacaccgctcgggtcgaatgccatcgggttggtgcatgaagatctactgcgctacgcgaatcatccttccgatcgctcggctcgatccgaagagcgtttaaattagaaggagacagtaaaagaaccgagtcccgtcggcccggtgacttacctccggcttgacccctaccctcagcctcttttcttttatgtttcgtat

SEQ ID NO: 2537 - DNA, 25095 bp, Xanthophyllomyces dendrorhous
gttatgtccgtctcgcctgccgtatatggattttctagttgatcagtcgtccgtcataattgattcctattctccccttccgctgactgtgctttgttttgttttgttttgttttctatctctttctttccacttcctacttgactatgctccgatcgatcctattgactgtcaaccattcatcctgttttacactctcggatacactcactcacacacgcaaacactaaacaagcaagcatacaaactgcaactacaactgcaaacgcatccagacactcactcactcactcacacgagagaacgatgcatccgatttacgtggctaagccatatgtggcagcggtataaaagtaatatgtaaaacacacagacaaaaacaggttggccagacacacagaggatgagaaaatgacagagggagagttagaacagaagaaaatgaaagaaaccgaacacagaggaaaaggtcagagaggcacaagaaactctggataaaggaagaaagaaaggagggagagctcatatcgcagatcgatgatggtggaagataggacaataggagggcgatttgggaaagtacacatagagaaagggggtgattgaacatgagagatagcttattataaatctggtaaacggagagagatggttgacaaagaagaacaaagatagaggaattcaatagatgaatattagaagttggcaagagaagagatatctgctttcggaaaggaaagaagaaaatgtcgcgtgagcccaagcagagatttttgtagacttcgatcaagagacacacactttaagagatccagctttagaatctcattggacttccaggatcctgcgccgacgtgggcaccactccattgttcgccaacggcgatggcttctttgttcgtcgacctagtaatgtcgcacccgacatatcaagctcaaaaccggcccctctgcccttcttcgcacctccctgatctcgctgaccagcccgaccgtcgtacaagacggcctcggccattcgcctgtcggctccacccgcaggctgataacccccattgttgttgttgttgtgctgctgggcacgactgttcccggcatgtccaccaccagagtgggacgacgtattcgaagccgtcgagccatcccggacatgtcgttgttgactctgaatcgtccgggcggcttcctccccatgcttcgccctggcttctgccacctcgtgctcttcctcggcctcttcgtcatcctcgttcaatccgccaaggaacccacgagcgcccgccccgccaggaccattgtaggctcgacgacgagcgccttcttcctccatccggtggacggcgtaggtgatatcgaatgcctccttgagcgaggccaccccaggcgagcgaccttccctcgcaccagggcctcgcatcgactgcaacaacggagagtccatcggggcgttcgaggccgaaagcccggcagcctgagtttggatatgtttcggaggagcctgctcgttgcaccacgggtgagcgaggaactcgtcaattgtgtatcgctgggccggatcgacattcaacagatgagagatcagatcctttgacgaagcagagatatcgtcccaccaaggcgaaaggaaagtgtagtatccacgagcgaccttctcggttaatactgcgattgactcatcatagaatggacttgcgtccccaagacataggaagagaggacgattctgtcagcccgaaccgttcttgatgaggacagacaggaaaaaaatcaactcacgggaaaccacatagtagcgtgtacaacacacaacccaatgcccacatgtcgacactcttcgaatacctctcgtccttgacgatctctggagcagtgtaaccgaccgttccacaaggcgtggcagtgtcctccgcccagacgaccttggatagaccaaaatcggcaatcttaactcgaccgatcccaccacctccgacgccaagagtaaattctccttcatcaaccttgtcctcgtcgtattgtcgctggaccggatgacgggacgggatgatcgggattcgatcgaacaagatgttttcgggtttgatatcactgtttcgaaagaaagatatactctgttcagtctttgtaccccaatacagagctctatagacgactgaccggtggacgactcctcgctcttcatgaagataacggataccgtgggcgacttgaaggattacatgccgagagagttgctcggaaaagtaggtaagtttgacactgagggaaccatgtatagacggtcagtctttattcagatctctagtcgggaccttgtcagcaacttacatctggtggaacaattctcctccctccattactacgagatgacgaatacaacgtaagcacatgacgacgtcgccgagaacttatcaaacttggacgtacattcgaggaccaaaaagtaatgctccgggctttccgaaaagctgacgagcttgatgacggacgggtggtcggttccacgcataatctgtacttctttgagaatgttggctctctaagaaagaagaaaagtagaagaatgaaagaaagaaaaagaggaagcaagggggggagaaaagacaggggaagtccgtattaagagggaggataagagaaaggagcatatgtaaggggaagaaaaagagatcaggcagaacgagagaaaagaagaaggaaagaaaaaggaacaaaagacgaatcaatgtcagaccgtctgcacacttctccattgagagaaagaaggttgtgcaggaagacagcagagcaagggcaaaacataggagggacagagcgacgaacctccgtcacccgaggcctctttttgaagttggggttcaggtgtttgtttccctcctaagtatagagattgagaaggagaacaagaaagagagccgtggtatagaaagggtagagaacaggagaggataaggtcgacagacacaatggaaaagaaaggggaacggaattgggatcagcggactgatacatgttggaggtaggcaaacatccggaaaacaaaacaggtagtgaaagtggcagagagaaaggtagatcgtgggtggaagtggatgcgggagggcagggactagcgtcatgaaaagatgcaagttaaatggaacgaataggacgggagcgagttttttttttactcccttagaatgtagatggagacggaaagaagacggccacgaaagaatggaagaagaaaagggcaaaagaaaagacaaaggacaaagagaagatcggagacaagcaagacgaaggaaagaaagtcttacctgagaagcgttgagttcgtatttcctgacgaccttgacggccgtcttgaagccagtccttcgatcgatggctttgtaaacgttggagaatgcaccactggaatagaaaagaggcaggacggacggacagggaggacgagaaagaaagaacgacgtaggcaaaagaaaggaaaatgatcgatggtgatgacatcagcaaacttttcaaatgagatgggggaggaaagcgacatcgaacgggagccgacacaatcgctgtcgaccagaggagagagagaaacagaacgacgtactctcccatcttttcgaccaggtggaaaccttctagaccagtgtagaccggcattcgttccttattcctcttttcctcctgaaccagatcctcagcctccttcctgtaagctggctccgcagtctgagtcttgtgctgttgttgttgtgccgcctgggcctgttgctgaattacattggacgattgcttggctgcctggttgtgggaagagtgtggttgggcatgggcatggacggtcgtctgcgtgggggcggctggcatagctgatgacgtagggtggtaggcggctgacggagcgctgtgatctcgttgttgagtaggagaagtggaagcagaggaagatgcagatgtcgaaccgggttctttggcgttcttgccgtgtcgaacaaagtctggagaagaccagaacggaaagataaaagcgggaagaaaccacgattaataagtgaccgaacgtcgagagaaatcaagatagcaagcgtataaacgatggatgggaaaacaaggaagaagagaaaaaaacaaggacgtacttctcagactatcgacaaaaggcattgaaggtatgcaaactgaacagagagcgagtttctaatagatacagctgatctcttttatgatgatgtgctattaacctgacaatatcctttgaaaaggaaaaagagaagaagacggtaaaacgacaaataaggatggaagaggaaaggggagaaaagaagtcgaggggaagaagaaagtgtagatccaaaagattatgataaattataatcgagttttttctcctatttggtttgggcgagtcgtctaagggcaatagaggggccttctagggaacgtcaaacactcccccgcctgctagaaggcgggtcagagaacgtaaccacatcggaaagtctgtggggtgtgtgacgacagcctcaatttattgacgtcaccaatttctctcccttgtctgcctgattgcttccacgtgctgttttcaagtaagttcgagctttgtatgacatcatccatggttacgcgttcgatcgaattctacatccgatagtggttaaggttacattcagatccctagacagaccctaagagtcttgttcgttcgtcaacagtagcgtcttcttgtccagcttggtgatcaactgaacctccttcagagatgtcgtagtgttgcctcgctcctagcgtctggagagcgactagagcattttggaagaatccaatgatgaacgtaaacactgctttggagatctgtcagccagaacgagattatctgtcagcatgaggccagaatcatttgtcttttcttatcgtgttctctcgtgcacgtgctgttgaaccatatgagacaagatgtaactccaggccacatacctctgtagcccatagatgaccatcggcggcgctcatcgatttgtgagagtagataggagccaggattgcgatcgaaattggcctggcagggaggttgaatccaagtagatacgagatgtcatcctttctctaagattatctattcctagttctacttctactcttgagtgaaaactcgccaagagatagcactcaccagaacagaaagaacaggacagctccccagatgacacccttgataatttcccgaccgacttttgccaggacggcactcgcgctgacctcctttccatcccgtctcgctctccaatacccgtaaggtaagagcaacactcccatcccgtccattccctccgcccagaacctcagtaaacctccaggaacagaccgccagtcgacctttccggacggaccgttccaagcctcggacaaggccggcagatgagccgttcgtggccaaggaccgtctggtagttttgaaacgcgggatgcgttgacgtctgggagaatcaggcagggtacgataaggtacgtcgctaggccctggacaaggcatgttaccccaaggtctacgtaggtcgatgggttcgttggcaatagcaggccgagtattggttcacatccatcagcactcgatacaaattatttcggatgaagcaagaaaatagcgctcaccaccagcgaacggaagaggaaagagccaaaagctcgtattaggttcgtactcatacatgttcatcgcttaaagagcccatttgaaccagttccaacacgaagtaagttagtcctccgattgttctcccataagtacttgtctctttcgattggatgacaagcgtagtatccggagaaggaagaacgaaccaatcttgaaattgatggctgcatcaatcagccctgctataaatccctgcataatccagatgtaactccattggacccagcttgccgttcttggcagagggaaaaagaccccacctttcgtttcagtaatcgtttgaggtgacatcctaaagcacaataacacgtatttgaagcgtcagtgttgtcagctgattgtcttcttgaagagatgatgagagaaggctgatctgccttacgagtagaatatatgttgatgaaagagcgaggatggaagggataagcagatgattttcggtaatcgccggaagcagctcaatggttacggtatttcttgtcttaggctatgtacagattgcttgtcgtctttctgtcctctctctccttgccatccttatactttgactcttggccttttatgacgcgtaatgtggaatcaaacagtacaccgccatgctgctacataaacaatcataaattattttgacataacctcctcctactgtcctgctccattcttctctagtcttctctactctataccacttcactctgatatctcaatacaaatccgctctcggacgctctgctctgaaatatggtacatttcatcgatgagcgcagatcggaaggtattcggccccttggtttccggtcgggcagctgccacctcggctgcaatcgtcatagctaatattctgtatcaggcgaagggtgattatacaatgttcactagttgctctcgcgaatattcgaaattccgatattggagaaaaagaagagatggaacgaacccagagagggctccgaggagcatatctcctcgtacaagattgttcgagtcgtcagtgtttccagaagaaagagacttcaaccgagcggccgcgcagaagcaagctactaatgaaccggtcatgcaaccagatccggtgatcacccccagctgttagtggccatatcagaaaaggaaggagaaaagaggttgaaatactgggtcaaaacaggtaaaattgatggaagagaaggaaagacagcccgtaccagtttgtctccgttcgacagcttgacaacagtctctccgtcagaaatgtaatcatccacaccggtacagacaacaatacagcctatgattttaaaccggacaacgcaaataaaggcgattggtaccgaaatagacatcagtaagtaaaaaccaagtgagctgatcaaagtacccttggttcactcacgttgtttcctagccaagtcttttactactttctttggatccttgaacaaagttgacccggagtctacacctctagaaacaacttcgtttgagcctgccaagtacgcaatctcacccgcatttcctttgataactgtaggctggaaggtatccagcatttcttcagttacaagtaaagtatcaaaaagagaaagattcgtgtcattgacagtaacacaggtagacaaaatatggatcggagatatttcttactcttggcagaagttcgtcgaaggtcagaggcacctacagccacaggatcaaatactaccggttttccatttcggttggccgctgcgcctgcagcaaggaacccatcgaggtccttgatcgtcccaaagttgatgagcaatcctccgatgattttgctaagttcagttacttccgaaggcaccgtcgccatgattggtgaagctccgacggcaagggttgcgttagcagagtcgttcgtgactacgatatttgtcagttggttgatcacggggccttctgccttgagcacgcttaacagctctccaaatgattgaacgattcgttctttcgtcagacctggctgcttttggaccgggacagccgaccgagctttctttatgatagccgataggctcgacgcagcgttcttaggtacaggcgaagatacaatgtcggagatgatggccgcaccagccagagatggagaagcatggaggaggagaggaaggtttgttgatttgataccaccttcgaagaaagagttgttctcccagttcagcttgaaacgaggatttacgactgaaaagattaaactcaccgatggcgactgctggacctccaaacgctttgacaacatcttctacgcctctgaccccaagaatgatcttcttgctcacatccttacttccagtccaccaaaccggaccaactccaatgtagtctgcgccttgttctttggcaatttcggcgtcctgtacgctagacgtagaaattccgatgatggcatccgggcaaccaaatgagtctagtagctgtcgggctagagggagaggaaggtctgtctgtccaatatgaataccagccggtggagaagatgaggtatgaagaagagcgaggaagatgtcgagtcgatcgttgataattaacggaacagaatactgatgaatatgtatgcttgggcatcagtatcgactctcggtgatcggaggcaggccgagatgacggaagaatctctcaccttgtcacaaagttctttcgtccttctggctacctcgaagaactctcctgtatcgacatccttctctcggacttgaacgatagtgacgcctccttgtagactttcttcgagagattcgtagtagtcctaagaatagacgagaaaatgcatcagatggagagttcgaagcagaaggaggatctatatcatctgtgccgtctcgagagacaaaccttagaaggaggaagaagatctctaccagtcacaaggtatagcgaataatcgatgtctggcttgaccatgaggaataaacgatgaataagatcaagatggtaggagagatgagattcacggggaagacgaagtcgagtttttcaagtcgttcatccgtccggacaataatttcaattccgctccgccgagtttgccgatatccaataatctccaccttgatgttttgttcatctgttcagctccttgcttttctctcgaggttaacccaagagcttgtggcttcaaattgatcatgggttctgaaggcataaatgacaacagtaacagcgatggcggcgttctctcaggtatctcgtccataatggtctcctccggcttcataaccgtacgtgtctgtgagcaaatatgttagggttatagaagatgaaaaagtgaatgtagagacgacacgaagcctccatccaatatcatcatcatcatcatcatcaactcaccatcatcaccattactccaggtccttgacgatcaatatggaagaacaatctgaatctccttcaacagaatctccagaggtctcttctggtatcttctccgacatcatcaactctgtatttgagcctggggtcaactcgttcgtctgcttttctctctcattcattgctgacatgatcatatactgatttgatacctactatgatctcctctctgcgcatgttgtcacgggtgtatacgcattcagaggactgataattggaatgcacctctccttcctcggcctgttctccgtcctgatctgtctctgggttcttacaaattggaacggtcatgtgctggtactgtctggtgtcagtttagctttatggggttcgacagcgtggtatgtttcctttgtctcacggtgttctggtgtttcattcggtctttgagctaactaattatgccgaatcggaccttatcacccactgtaggttcgttaacgaacttctgatagttcaggctcaacagaaagccagctctccttcagacgaaaaggacgcgacgacagcttcgattacagctgttgagctagaaaaccccttggcttcctctacaatcccttcggagcctcaatcagaacccaagaaaaagcgatgatgcgctagattgaaccgtgacttgtcgactgtatgaataaaaatatgtagatttggtaatcggcaagacggaagcctcgtgtagattggtatacagtactaacgggatatgtgataggaggggcgaaaaaggcaatagtacagaagaggaaagggtatatgcaaatgccaaacttcaacgaagcctgtgagatcatgatgagctatttgaatcgtaccaatgcttcatccgtcgagccgaatcttgagcgatagcaaacactagattttcacatgacaaaaataaggaaaagctctatcagcagcggcccatcggttgtattctaaaacatcttgcagcgagagaaccagacttacattcccgctcctctccctccaaaccatccctgaactctccggcacctgtaccagaacctaaactagcctgagcatgacttgtgattgatgccgcgtgttgagcttggtcctggatttcaggtgcccggaacttgaatgttgttaatagtagagtcgataaataggttgcctgaggatcatccagactgtcggccaccaaacacgaaaacaaagtcagtcagcaagagcttagatggcctgaacgcatcttgagtgaggagaaaacatatgggatacccacatgcctacgagtcgcctaccaaatccataccacattccaagaccacctaccaagttcgaaagcttaactgatcgtgattctgcgttcagggcgttccgaacccgattagaaaatgcctgtgggatattgaacgtgacaaaatcactacaatcgggacaattgtttaactgacacatcatcaagaccttcgggaagagatggcagagaaggagaagcagaagcggaagaacaaagaacacacttaatagctagtgtttggaccagccagaaaggtatctctgatttagctaattctttgatctgtagcgtcggccatatggatagtgagctcgagtcatcttgtgtaggaaatggccgacggtaaatccatcaacgaagactcacgtctgattcatttcctccatcaagataacctagtccttgtacatctagctggaaagtacatggtagtttctaaaagtatcagttgaacccagaaagaaccaccagttcagtttcatgacaaacaaatgcaggtcagacaggagagaattcttacctggttgtcagcaatgatagcatctatggaccagtagtcatcgttgtccatctctcttaagatcgactgagagtcgaagcctggtcgaatgtgatgtgtacagcagtgaaggttgaggacgaggagttcatttgtgaattgttcatcaaaagacacgtacgagacgcgacgcgtcatgacgcgtaatttcagaatactcgaggatgacccatagcgagaacgcagggcagaaagagactcgtaaaaacctcaagaacttcccagacttgacgtcacgtcgtttcgataatatcatgtatacacatatgcttataaatgagttcaatagacttttacagagaacgggaagtcatacacttttcggcccagtttccacccgattgaccaaatcgaacatgttcacttttgaggaaatttttgagagaaaccaatccggaaggattttctgacgttttttgtactacatcactgaacatgagtatgagaaatgtttgtcgaaagttaatgaagatgcacatgaatggtttggtaagatatgctggactgactttacgaacgtccgcaagaagatgttatcatctttggcgaaattggaaggagcaccgcatgttaagcgctcaaagacaatccttgctccaaacggaacgacggatgagactatgaacggagatggtaccggtggaggacccttgggtggcaagttttctccatcctagatcgacggagaatacatcgttcgagaaagtttagaaggattagcttgcgctgaattgactataactcaaatagcatacaccttacctctgggtatccgagagcagcgaggatggaaaccatagtattgtcatgactcatgtctggcaacagagagacctccattacattcagctgtacgttctatgctcttgacagagatgaaacagatagcagacctataaatattcgtcgacctccgggtggtgccagagaactcatgttggatgcacctccttgaactacatcactagtgtcagtcaagcgagctacaagctcattcaggtatgagatccccttggtctttccaaacggtgatccgtaagagtgactgtagtatttggaaaggtcgtagctgcatattgcgtgacagattcgatgttaaatacgaatcaggatgagtgactgagatcaagctggatggttaaaactcacaaatactcgttacttttccattcatccaaggtgaacacattacaccaagggctgagccgcccttttaccggtctcacactatcaaacccgcagagactcatcaagctaattgctccagaggttataagttagaacccaagtagacatgtgaggagtggaaagaatcaggaggagagaagagcttacgcaagagtgtcaacaggtgtcagattggctcctgggattaatgagttgagtctagaggcaattggtaaacctttagatttgatccatgcattgggtatgatgactcctgggagctgtaaaacacactccgtagaagccaaccagaacagaattgctacttcagatttcaatcgcaaaatggataagaaagagaaatatactcacatctatgctatcgctctctgaagcgcaggtagataccgaaagtgaattgttcattcccttgagagacgtcaaaaagtaggaatgaactttgcaactgagattctaaacgcaaagagacaagagaaactcacagtttccttctccattaccaaatctattgaaggaagtcgagtagtgccgtgatagccctagtgtattaataaagaaaaggctcgtctattagcatattcattcatatacgagccaaacgatgtacaacggacctgggagaaatgtcgaccgctttctgttgtccgtctcgatccggacgagcgtatgaacactgagtccgcgattttaccagcaaacaccttataacggtttcgatagaaccttccggcatcgtacgccctgaagaacacagacgagccgatggttgagagcacaaatcaacagaacaacataagcttttcatccgattgagtttggggctgagggttaaattaacgcagatgagcgcactcagttctaccataggcagttaaatcgccccatatttctccttcttcaagttcaagcttgaaatttttgataaacaagagtgtttgatcttggatcgaaccggaagcagcaaccactttatttaaagctgcttggatcaaggtatgtcccttttccgtaggatctgtcgcccagaaagaaagcatattagctcagttttagcagatgagaaatacaaagagagttgtgcccatacaccgtgacatgtgtcgttgtagctacaagaagaatcccccagaaatgtacagcccaacctgagctgagtgatagaacaacaagccttgagccgagaaaggaagaagggacctcactatggttacctgggttatttcacatccagcgggcacatagtactcaacatgcttcatcatatatggcgtgtaagcgccagtctaacatgaatcaggccgaggcagttggaccaattcaagagatgagatgccgttcgaaagtgaaagcttgtgatgttcaggtcgatacgcacatagttgaaaactagatcatccttccaatctacatgtttcgcttccaaactccagaacagggaagggcgaacaaagatatattctggagaaaagaacgttacataaatcgatagcactaagagacccggaaggagaattagagaacctggtgagggtatcttcgttagcatcgttagtgagagctcatcgtggtcttcttttggattagtcgactgcatcaagaagagatgatctaactgatgattggtcacgtgctttctctattgcttttgaccgtttgtctgctataactcattcgaggtgattttggagtgtcatatacatcgacagggacaaaacaaaatgcgattcagacgggagaaacagaatgtgatgatgacgaagatggtaaagaaggaagagggtaaaaaacaatgcagtgtgtatgtgtgtatgtatgacatataacatgatggatgagatggtcgattttagatgagttaaataaagttatgccaagaataaggaatacgatatggcagaaagggacgaaggaaagaagagaacaaggcgagaacgaaactagaaaaaaggaaaggaagaaaaaagacactaggtttgtccggacatgaccacactcggcttttcgatttcctcctctaaccgaggtttcttcaagctcccctcctcaactccgttcgagtcagattttgatccgtcatcttgaatggcttgtcctattgaggtttctaaagcgttaccctccagcttcctctttcccaagatcccactgtcggcatttaatgcaaccaattcaggagtctgtatcggggaagcttccggcaaggactcaacagattggtgacttattggaatgggttcggacaaaagttgggttccttgaatggacactggcggtttggcctctaacttagcaacagattctgtcgaaggaacagaaaacacgtcgttcccttgcggctcagttttaaccgaggacagtccttgcgccaaaagttttgccacgttggacaacgaagtggctggttcgatgggagcctctgaagttggttcagctttctcctgtttgacgactctgtcggcgatgggtgacatcggtggaggcgtcaatgaggataaccggttggaagaacctagattaccgtttgcggtagagagaagccgggtagtgagtgcattggggtgaatagagtcgtgtcggcaggtggcgtggaagatctgaggatgaagagaaggatacgatatcagtcaagctgcaactgtatctaggtattgaggtattatcgtagtgagagaaagatatacgaaccactccatcttcttcgactgcattgaaccaaagccactcctcctcgtcttccgaaaactcgcccttgaaggcctctttacaaatcggacaaggtctcgacgccacttccggattcgatggctggacaacaaacttcttgagtagggcttgtcgagcggaggctgataatccaccttgggatgaggcttcctgagctgatttggtgggatgagagccggtaggcgggatcgaatcaggcgaaggtgaaaagtcatttacccaatcctatttagaattcagaccaagtgtcaatacacagtcagaaccccgaaccaacatcaaaagcagagtcagctcctcctctccaaataaaggttgaaaacaggagggcaagagaaggaaatacaaaccttggcatctacaaaccaagcccggctattacccctaccttcgctttctcttgtccgcttattttgtctaaagtgccaatcgagatgcaaatctagtttggccttacccttggctgttgccggcgctcggagtccacactgtctacattgcagggggagttgagcagacaacaggctagaaatccttggaagatcactattgaaaaattataccaacagccaatctcagatgtcgatcttcgttaaagctgcaatgaacagtttgatacatatcggacatacgctttcaagtttaagttatctagcctcacgttcaaccccaaaatcatcttttcgtactcatccggctcactttccttgtcctcattttcctctttttgttgttctacttcctctaccgatggcacttcggacacgatctcctttttgggtacctgaggagagttggatgcctctcttggcttgagaacgctcgccatcaagctcaatagatctgcacctagagatgaaggcgtgcccgttctaggggcatttcctgagggtggcaagggcgagcgagctgttggttggaaaacctgaggcgacacagccggaacagacaaggaaggaacaggagcggatgaaggagggagtgtgaaaggtgtagaatgggatggtgttggatagggaggcgatgaagctagtgtaggaggaggcattcctatcggtatctgactcggaataggcgtcggaacagcaacggatggtgaagggacaacaggagggggcgcggaagtggaagcgtcgatctcttgaagttgagtctcgattgctcgaaggtcggtttcagagacattgcttgtctcgacgagctgttgaagttgctttaggatatcaatatgacgacggatgttctcgtccataggtgacagcgcggccgctcggtatcgtctggtgagaacctgttgtaacgtggctaggagagcttgtcgagtgagcactggaggtgagccatacgtaggggtcatctgagcagatggtgcttgtgggggatagctgtactgagtttgatatgtggtctgcaaacattgaacatagtccttagtttatggattgactttcaaggaaagaaagccacgattgacgaacctgctgatgcattctagtcacatagtcacgtccccaaattctcatctcaatttcttcttggacttctatgccaaacacagccgaccctccgggaccacccgttcgccaggtccgaagcatctcctccatcctggattttgtggatccatcgacagatgcatatgtggacgcaaagagagatgaaaggtatcgcaggaagagtgtagcataaggcgtcggaaagtttttcgagacggagtccaagagaaagaacggaggaagcttctgatgcggtggagcctgaagacaaagatcggacaaaagaaagcggagaagaagccaagaagggttaaaagttagagttagttgataaactcattgtttcgcttcctcgtttttgtattttctctctttctctttctccttattgcgcgttagaatccgacagaaagagaaacaaggagaacagagatagccatgtatgtgggcaaaaccgacggtcgctcgctcgctctacacgcgcgtttctgactgtggccaagaggaagagaaaaaaaggtagagaagaagggtcttacctcgttaattcttttgacgagctcttcggcaatgaccatggcgttggcaaagttagcttgttgctcgtaagccaactgggtgagttggttgatgatcggacgagagttgactgtcagaatggctagatggcttcggtagaagactcggaaagcctcctgggccgacatcggtggcggaggtggaggggcttgataggccccgtaatagggttggccagcagaaggataggaaggctgctggtaggtagactgaattgacgatgaggagggagcaggagcagcatatgaggtagacggatatgaggcaggttgaccgccgtaatgaaaagacatggcaaagaagaagaaaaggaggacgggagtttttactttgtttctctaacaaactctctttgatgtgtataggttaagcttcgttcactctctctctcgacaggcagagataaacaagaacggagatgaagtagacagagaaaggtgagtctgagcttcctttgagtatgtatgtgtgtgtgtgtgtatgtgtatgtgtatatatatgtgtgtgtgcgtgagatgagtattttatccccggaaacggaaagatgtgacttggacgggagaaccaagcaggcagcacgtaagaatatttcctttctgttctgtttgattgaattctctctcaaaaagaaggagcaacaggcaaagaagaagaggccgccaccagtgaaggagaagaaggcaaagagtggatggatggatcaaggtggatctgttggccgttggggatcgatggtgggaggttagagctggaggtgaacgctggcgggaaaaacctttcgtttgagggctggttacacgtgaaatcacgtgattgtatgattacataagccggcgtcatcaactacaacaaacacatatacaactgaggaaaaacacatactctctcttctttcttattcttgttcttgttctagatacgatcgcgtctcgttcggacgctcgttcatacagccgcttcagatgatattcggcaggagacagacagtggaagagaaccaggctagttcgcttcaatgccatttctgcctccagaccaccgtgttttcttcttcagatccggttccacatcggccgaattcgggttctttgaaggtcgatcagtttgcgccttctaccaactgccatcaagcaggcttcaaatggagatgtgaccgatgtgggtgttggaacggctgggacgatgtttgtccatgtttttttacgcttgaatcgatgcccactgtgttatattcattgaaacttgaggggacttatgttcctcttgtcatattttgcagagaggagagaccttgtcgtttcattcacaaatgcaagacccatccctcaatgcgggttcctttcagaaaagaggttagcgttgcgttgtcttcctcagcgttgagaatcgttttctctcacaggcatgttcgctcaaatctgtttctacaacagcgacctatccgtcgacaacatttccactcccaacactttcctcaaagtctccgttctgcagctcgtgcaccacaaatcatatgatagtcatcaacctgctcgcgaactacctacctgaagagaccgatcctggctatgaagatctcctcagcgcgcttccagcgtacaggaggaggctgtacgagaggtatccgccggtttgtgaacgatgtgagccgattgcagaggaagagatcagaaaaggcgattacaggttcgaatcttggtcgcatctttgcatctttgcgttttgtatcatcaatctggacccattcggactgactgatcaatggtcgacgttgtttacctgtcattggtaaactcttctccagggcaaagacctcggcgcttaacgggtttctcgtgaacacttcaacagttcttccctcaaggatacacggacctggtccctcctctttaatctcaccggaggtcccagcgtcatccgagtcaaatcaaccgaggggcccttcattcgctatcaaggtgctttgggaactcaaacggatcctctggttatctagtgcgggtgtaaacctagtcatttcatctgcttgtatgtgatttggcgttctctttcgacctcactttccttgttcgatgcaagccccgtcacctgaatctgtctatatgtatttgtgtacttggaaacgggggaaaagccatctcatcgacaatccgccgtgttgtccattcgattgatatcgttccggttaatttttcctcgtccgtaatctctgccggtgcggtactttcgattttatggatagcatgggatccaacatggaaaggtcttatcaaggcccgatcaattgtcggtccgacaggacttacaccaggtggtcgtctgagaaggaaaagatgggtcgttagtcctcgttcattcatcctttctttttgcgcttagtcaatcgtcgaaagacagaatagtttgaggttgacattctggaatttgacagcaaacaatgctaatactgtacccgatccggatcatcagcgggctgatcgtggacctcggttcgagagagatccgcggagtttgtcctactgagcgagcgattcagatcgcgaaatgctggatgggtctccatctcgttgttgaactttttgttagtcttcgcttccttaaaaccagttgcctctttgattcatgatttaactgattcagatcggctgccgactcatccttgcgctgcaggttctttcattctacgtgtacattgtcaacctgcccctcgtccgacttccccggcctatccatctcacgcggacggagccttcgtctggttctgttcaaaaactccagcgccccgattcattcgatcctaacaccggtgccaaagtcagcagtgactatcagatacgttcgacgtcgggaccgacttacagtagtccgtcttcggtcgacgttttcggaagacctcatcatcctcttttcggttcgggcactttccctgcttggcccgtttccgctgcttctttcgctggtcctggttccggttcaaatgccggtgctggtcccgctcagttctcttcttcttaccaggtcaaccgagcgggagacattgatggaagcccgatggactggcaacctacgttatcaccttctcaacccggtcaagtaacaaacatggatgtcgacaaaatcaagagcgataggaaagataagatcaagaaaaagagagcaaagacaggagcgcgtggatcagtgttcgctattaagaaatccgtgtttgatcctgcccctcccgatagtggagctgtagacggttccgacagagagggttcagaggaggatgaagaggaagaagaagaagaggacacgacctggctagggttcaaccgagctcctagggtctttcctctatccactcgtctagaaaatcaaggcgggaacggaattgggcctgacgcggccggtggattggagagattgtttgaaggctggtcgattggtgaagaacatgtgccggtggaaacgacagggagtggacttggtgaccggtcggacggccaacgacctgaaggtctcggtcggttggttagatcattctttgcgcgcgggtagactaggaaatgtgctgtgtatgtatatgtgccgtgtgcagatatcatgtgtatgagaaccgatgtgaatatgctagcgtgttcgcggaactagaacctggcatctggctcgcctaggatttttttttctcaatacatcccacgcagcaaaagccaagacgtcaccggtgatgcggtcacctacacgcactcttcatccatagttggagtaagttttccttaattgggtcgcctgcttccatcatcttcctcattcaatcctcatctcttgcatctcttcttgtcgtttcttgttctttccgttttccataccttactctcctttcaaaagtcaactcgaatcattatgcgatttaccgctgccgccgctcttcctctcctcgccgtcttcggtggccttgcctcggcttctcctgtgaacgagatccaaggtaactggaaatattttgtctctttgtcactctccctgtccattgctcttgcacttctcgactgtatttttgtagtttactccttgactgacagtcatccgtttttgctctctgaaaggccgaaaaatcgaggagcgagtggatcttacctcgctcttggcctcggtcacctcggctgccggaggcgacctctccagtgttctcgcttcagtcaccggggatctctcgagtgttctcgcgagcgctaccggtctcgcgagcagtgtcgctgcggaggcaagcagtgttggggcgaatccaagcagtgcattcgagaggtgggtcatatttcttccatcatctgtgatatgtatgttcaacacatgtcgagcctttactgactgctaaggaattctcgtctctggtaccgtcataccgacatctagcgctctctcttcgatctctgcttctggtacggccgctgtgtcttcggttgctagtgcggcggcgagcaagacatcatccgccggtgtggtcggctctgcctcgtctgctgcgacttctagagccagtgcattagcttcttccgcggctgctgccactaattctgccgctgctgccgtctcctctgtcgtctctgcaggatccaaggcaaccgttatgggatctggaactggacttgtcgtctgtgtggctgcaggactcgtcggtgctatcgctgtgttggcctagtctatgatagagaagggtaactcccgtgtattttttcctttatcatccatcttccatctgaatctagtaaactagtatagatttagttgtatctttttgatgtgattatacatgttgtcactttccgatagttccgttgacgtcaacagtcagttctgcctcaactaaaagtcatttctgtgctccatgtctcacctggtatagggaactacggaagggaatcatggatgagaaagatgaggagatcaaacgtgacgagatgttacgtaagcggttgcttatgtgtttcttcccatcacctcctcagaaatatcccggtatataaacctgatgggctgggttcagccctcttgatctcccttgtacatattgatctcctcatctctacacctccctcttcgttatccaataaactccttcagcaagaaaacatcatggttgctaaaatcgctgtggttatctactccctgtacgtcgatttcatgtatgtttctttgttcgaatgcacgaattgctgaccatccctattcttctttgctttctcttctctccatctctattttatattgtccttttagttacggacacacctcaaccgtttgttttcgcttttatctgtgtgcgcgccgaccggctcgatctttgttccgtctggttaatgatctccatctccgattcctaatttgtccaaaagctctctgagtccgtcgtcgccggtctcaaagaggctggagcacatgtcgaggtgttccagtttcaggagattctctctgatgaaattcgaggaaaaatgcacgctggtcctaagtcggatctccctgtgatcactcctggagatctcgcaaaggtatttcccttgtcttgagacgtttcttcgatgatggctgctggggctgatcgcgttcggtatgattgctatgacaatgcgggtagttcgacggcttcctctttggtttcggcactcggtacgttcttagcctttttttttgttttcgtttttgtttttgttttgtttttttcgttagcctcatcagagcttcctcttttggctgaccagatctctgtatgtcttgtgttgtcccaattagatacggtcgagctccagccgcggtgtcctcgttttttgacgcaaccggttagtcgacaacatcgagcatctaaatgagtaacatgaagtttaatcttctctctattattccttctcgaccttcacctcgtcttcctccttaatcaccttgtcccatcctataggtggactttgggcttctggagctttggtcggcgtgagtcgttctatgatcccgtcaatctctccgttcgacgctccgcatgtttctttttttgcgagcaatgtctgaatgcagttttcttggatggctttgagatagaaattcgccggagtcttcttcggcactggtagcgcccacggagggcaagagactaccgctttggtgtgtatgctttcggatatcgtcgccagacaccacatctcggcatgatcaacttatcgctctcttttctttccatatcgtcctacgtacagaccaccatcccgttctttgctcaccacggaatcatctatgtccccatcggattcgtccgacctgagcttagcatcgtcgacaagaccgtcggtggaagcgcttacggagctggctagtcagtctccgtttcctctgttctcttgaaattttctatcctccatccttcaaaccagacatctaagctgacaagtcgagcatgcaacccatcgcttctttcctcttctacatctctcacagcgtcgccggtgggcagggacaactcccagtgaccgaggaggacaagctggttggccattaccagggacactcgttcggaaccctggtcaacacctttgtcaagggacgagacctttaaatagaactctttcctccaatctatcgttacatcgtgtaccaagatagaatttctttatggaccatcggtcagacactgttgtccatatagatatgttagatctctatatgaatatcttgtagacttgttagacagagaacacccgtgagggcgataacaaggatcaaagaggagtgaaagatagaggaggagtaaatgagaggagtggaaaaaaaaaagcgagtcatcaattcaaaattacagaccgcgcccacggcgttgtccggtccgagtgtaccgagccacctgtatccgacaaagacggtctctgaggctcttgtgcttcattcaatcctcaacgatcatcctgattccttctcgcacacacatacacacacgtacatccacacttgtgtttcctcattgacaatgccgacagctggaagtttgatctggtcaggcttggtgccagtgttcaagctatatcgtacgtgtcatgccatccttgtgaagatcaagaacggcgtatataccggatggggaacgcttatcgctttcaaccttgattctcttcttctctttctctttctctttctttcctctcctctgtgtttctgcatgttcgatgtgcagtgagtgagtgcaagaactattctgatgtggtccatcatcatcgtcctttccatcgtcgtccgacgattcggatgtgaatcacgggtcttttgcgcgtaagaaaaattcgagaaagaaaggcgctgattgcaggctttctcttaattccgaatctcttctccaactccatctgctcccgtatgacctctgaaaatcaaacaaaaattgatggcaacattccgaattcaccaattctaatctttggtcgcatgtaatctaacgcaataatcacacggactgcctttttacgaacttgctatcggatttgggtgacatgcagccatcgcggctgggttcgttctcaccaagaagggaatgttctcgcctgctgcctctaaaggactgggacaaatcactttggttagtcttctgcttcttccctatctctatcggaattcttttgagtcgcaagtcgtcaaaagttgctacagttgtgagagttaagataagagctgattcattcggtttttctcctttatctgtgcgtcgacttgtgcgaatgaaacatcacccttgtttctttatcttgactgttatcctaacgggtacgacacaacgacaccattaaaaaaacatttccctggttggactcgacagaacatctcgttaccatgtttgatattcgcatcgatcgtcccaagtttttcagcagataatgtatgtatcgagtttccatttcttcttctgtctctgtctatcggccgactcggttctccttcatgaattcaggtttcggctctgggaccgttaattatgtcggcagtattgtatgaactcatcgtaagtcggcgagaaggttccatatcgctctcgtcttcctccatcgcctcgtcctcttctacatatcggcgaaaagagagcgaaccgatgagtttgatgtgagtttggttaaaagactgatcgaggatctcccttatcacaccagggtctcgtattctcactcatcatccgagaaatcttctgggtatgtcatgtatcaatttcctcctgcttgctctctctctctctctctct

SEQ ID NO: 2538 - DNA, 29609 bp, Xanthophyllomyces dendrorhous
ctctctctctctctctctctctctctctctctctctctctttctctttcgatcctacacaggcttgagctcagatggtctactcgtctttctgtatctttcatcttaggtcccgagaaactttcaatggggtattctgatggcaggaagtgtgtatctatcccttccatcagcctcctgtctctatcatctatgttgccgagactgacaagtttccttcgtttattctatcttctcgcctcaaaaagcactgtcaaattggggtaatttaccgacggccatcgtacagagtgtagcgacaaacgcgccgtttgatccagatacggatcctacgttgggtgtggcttacatctcggtctttatgattgtttacaacctttcatttttctcaggtacggagcaactttttagaaagcatgtgtctgtccggtcgattcgcttgctgatgattgctctcttcttcgatcacggccaaccctaggcgcgtacaaggtctgtgcgtgggatttcttgggcgatccgaacgagccagatgtccgaatcagcttcaaggaaaaatggcgtcgacgaggacaaagattccaggcatggagaggaaccggtcggaaatctgttgaactggggtcggatccagagaaacagaaagtagccggcccagccgctgctgctgcttctatcgccggtggtggacatcgacctgcttcgttgagagaggaggatgaggcagaagaatatgcggaagaaaagaaagcgtcgaaacatagctcgatggccgtccagtcgacactctcaccggatagcatggtcaaccaactggagaaacatcaggccggcactcttcggccacggacaggcagcttcaacagggaacgtgcagaccgattaacaagacagatctcggccgttactgttgaatcgattctgcctatgcctctggtcgggtcatctttgcagccagataaccgggaacaccaaagtcctattccttctcacccaaacagatccgagatgatggatgataagccggaatcagcccaggtcgcggctgctatcgccgccagaaaccgatcaggtttccatcgttggttccatgcggtcggttccgtcctagccaccatcgtctcgcccgtcgtggcagccctgatcctggcgttgttatttgcgctcgtgccaccgatgaaggttctgttagtagatgatgtgagtggatggagtgatggaaaggtaccaaactcgccgaatgggacaccaattcttgcttttgtgcaggacgtgagtcaattcttctttcttgtgtgtgtgtgtgtgtgtgtgtgtgtgtggaaatggcctgtatacggctctggagttttcaaattcagtggctgacatatgaatcctgtatacagaccgctactttcgtcggtggaatctgcattccggccagtttgatgttgttgggcgcgagctttgctcgattgaaaagaccgagctcatggtccagtctgcctgtgcctgcgatcctcagtctgatgataacaaagatggtgttgttacccgtcatcggctgttttttcatccaaggtctctccaacaagacgacgttgttcccgaaagatcaaaaagtcctgtcattcgtcgcgatgcttctggtgtgtaccggtgtttctttgttgttctctcgtccggtacaaactacgtcggacgatcaagttggcttacctttctacgtgggtgtgattgcgctcgtcactccaacagtctggaactccaacggcattgaaccaaatggtactgacccaattggtagcacctgaaggaggaacagacacattgatcgccttccttctacctcaatacatcttcttgtgcgttcattcttttctttcggctacttacgttgtcctctcactcggttgttgacttggtcaagaggttcaactgacatgtttcgcgctctatttccttctgagataggtttttggctagcacggtcctgacagctgtggctctgaacctgatcagctgaacggccaatcttggagccctcttcctcactcccttgtttcatctttcttgctcgtaccttacaatctcatttcatctctaaggacgtctttcgccgttttcctttgtcccctatcagtcctttgctttccttcctgcctttccttcttgtcaatttcaacacccaccgctaagttcttcgttggataattataaatatagattcaaactaattcaagtccaactgtagatcagcatcatttgccgttcatcatatctcattcatgaacttttggttcccctctctcttcgttctaccttgcttatatcttcttttttcttttcttttcctcgttttttttcttcttcttcttctctctcttgcgcgttcacgttttattggttcaaccatgaaacccacatgtctcctgtatcattattatatttgaactttccaaacacatacacaaacagagacagacagattgacaagaagaacagagacggttgtttggtgataggtttgatcgtacaatgcccatctttattatcgttacaacggatcgagaacaactggaaaggatgcgaaaagagggaaaaggcaaaggggaaaagatgtctgtggatggatcgattcggtcgggcgcggatgcgatccatgagtgaacgaaggaagatgatgaaacgagatagggagtaagaagagggtgtcgggctaggctaagtagcgtaagactctcatcgggtcgtcgtcctgaatttccggtccacagcgatacaaccagaacggatgaggcggatgaggaagagggaagagtcagattgaaggaaatatcttgaggacgagaagatcacccagagatagagatagattaagaaaccagggaacatacatctctggctagatattctctttctagaagagattcgatctgatgtttgatcgctttcggttccggtggaaatttgtttcgacttttctcaaagatgatccacaaagagatgaacagacaagcgcataagtaaacaagaaatgagaacatgaagaacaaggggggaaagaagaacagtaggatgaagaaacgtacacggcatctacacagagattcgtcaactctacccacgtacaaacctttttcgatttcatgattctcacgatcgctgcgtctaacaagtgggacctatcatgcatcactctattctctgtttgaacgtcttcttccacctatgtgtcaaaaacatcacgagaaaaaaggaaccgagcaaataatggaaaaacgtctattagtcgtgaatcgtctatgatgttttggcaatatatagcaagaaggaaaaaaagaaaaagaaagacagaacaaaccgtttggttctgctgaacctgattgatcttgatctttactctaggatgagtaaacttttcgttaaatgtgaaactatccgttcgaagaacgtcctttcccgttggatgtttcgtcaacactcggactcttccacaagccagggactgtaaagttcgcgacagctctggttcctctggatgccgcccaaaaaaatcgatcaaccattcagatggagagacatgaaggataaaaagtcggcgatattatgaggcagaagatgaaatgacgattggacgaaccgatgcctgtcttctccataatttcctcccagctcaacttactatgtccatcgggagtgatatccacctgattgaatgccaataagacaagaccttggaacagactaacgttgagctctttagtacctgaggggaaactagccttgagagtcattgaaaagagctgatatcgataatctagtagtctggattgatgggattgggtgtagaactgcttgaagctctcgagaggatgggccaactgtttttgttcgtttgcaatacaaaaagtaaaagagaggaattaacgacgaagattgatatcgaggcattttgctctcagacaaaggagagtatcatacaaaggagggaaggacaaaagctttccatgcttctgtgacagcaggatatctgtttcagttaagaacacctttgagtcagtatgttataatgcctttgacctaaaaagagtgttaattgaaaagatggcacgaacgtcggccaattagccgagctgagaacggctaccgatagatcagagtcatccacagggtcatgtttgattcgataagacttcatcaacctatgtcgcgcgttgtaaaccccggagaaatggacccaggcagaacaatcgtaagtggctctgtgactgtagaagacaacaagaaagagagtagtcgtactcagtggaaaggtttaggtccgccagcattctgcagtgatggagaagaggaaaattcgcatcagagtccagttttgtgatcgaagcaaaaacgacggcaagacaaataagcatacccatctccggtgatgaaatcctctcccagttcttttttaagtcggctgatcatgcccagttctgcatcgtccgatgcactcttccccaacaagagacgtttggccaaggcattcacgtagaacgccttgaactgaaaggctcgatgaaaagaatgtcaagatctgatgaggagaaggatagaacaagtaagaaaacggacgcacgacgtctttatcccgaacggatctaacgagatccaagagatcatcaagatctttctcgagctcatcggatgaggttgaccgggatctaagaaggttgtccatcgctttggctagagagacgataaggaaacgagatggggtgtttgttagagaaaagaaaattcctcgaaaggaaacaagaaaagagagatgcgtaccgatcagttctgcccctcttgcccctcgagtctgaagacctcgttcaaacccactcctgaccgaatctgctagtgatttatccctctctaataagacagcctgttcttctgttctgatcgggttttcggtcgggtttaagggcgaagggcaagaaggaactctgatggcgagcgattgggatacgagccgctcgagtaatgctcttgctgtgagaagtgttgtgatcgtggtcgagtctttgaggaagatatgtcaagatgagatgtgcggacggtcgaaataagaatggaactaattgagacatacctttagacgcatcttttatcagctcggccaccataagagctacccatttcccgatggccgtcctgagcgtactctcttttccaacttttctcgtcaaggaactcaagatttcaagtccttcctcttcaacctgcccttctccccatcggacggtaccagttccagcggcgtctttctcatcgagaatgacctcaaacggtctgattataatccactcggctagacacctctcgacggtctgttcggcgatgccattctgtccgatcatttcatccagcacaactctttcgagctcactcgcttgctcctgggaaagactcaggatctggtaaagggttgactccgaatgaacggaccggaatgtctgtgtaagaaaatccagaaccggcacggacgcctggaagagtttattgtgaagggactgatagtgagcttgagtgagggcatatatagttgggtggatcaggaaatggagaggagtcaacgaggcgacgagcgcacgagagtccagtgggctaggaagaagaacattggatagcagagacgccagatgagcatgagtcaaatggtattcagcttggagcaaaacggaatagcgaatgaggggaaagaaggagactcacccggcctgtcgatcttgctcgatccaaagtgtcaagctagctagactagttgcttgtaaagactgattgaggaacacgagctgatgaaaggtcgtttgtgcaagatccctatcaaagtgtttgccaaaaaggcgagtagaaagtagggagaaacggtcaacgatgagcttctgtctgtttcagagggacccagatcacacggacctaatagactttatctctggatgactatggcgaatcgatcttgctaggggcgacagcatcaaactcagtacgtccttttggaagcagtacggatccagagagactggttagttcgttgttctcaaaaggagggtaaacttaatcgatatagattcctcaggaaacacgttgtacatacgattctcgccttccaccaggaccatgctctctcaatctgttccagccagctaagacctcggccggccaggccctgttcacgtgcagtatgtacgagagtcttggcgatatcactcgcagacttctcgagctcgagctgaaccttatctacgatggtccgtacgttttcagcgtccttggcgagctgggaactgagcgcataaattgactgaagtgatcggggcagcctggagagtgccgaggagagaggagggtgttcagtgcagggaacggaaggatctgtgggcgagaatggctggggagatagtatgacagaaacactatggaggatgagttgaggtgtcggctgtggtgttgctttggacgatgatgacaaacaaggtgattcggaaggaatttggttgagttatctcttgtaatatcacaggggagtaggtagtgatctcgagagggatcgagacaaataggaggacctaccgggagcaaccagataaacctgtctgacagccggctttcctgaaatagcggacgctacagacggtccgttcagatgattctggccgagtgcgaagaactgggtggattgaaaggacagcatggtcgtatgaaggtttaggaacggatgagatcgagtttcccaagatggagagcataggtggagggctagggttgcggggatagggaatgtatcacgtgattatgtggctgctacatcctgacgatccatttgtaaccatatctgtgttcgaaagtaaccggccgagcgccaagtgttgatctccggatcaccttcagaaacgggacggaaacgcgtgcgtgggcccacgcgaggagacggaacatgtcgttatgaccgtcctgcttgatcgtacgcccagggctgaatctaataagacgatcaggcacagtcagggcggcaggccagtaccaacactctttctgctcatccttcttctcaagaagatcgaaccatcaaagttctcgatcggcgctggtcggaagagtcaaataagattaagatcaaagggatccgaactctaaacgaatgaaattctgaccaacagagagaccaagtaaggattacgcctcaaataagagcgcaggtatgcatatgtgtgggtgtctaaacgttttctctaaaggacgtatgtgagtcttggattgaggaatgcctgaccaccgcttgggtgtctaaagatgtttcgtcctgatgtgctgcacgatgctttgccaattccttcgatgtgatcttcttttctgtgttccttcctcgttaccaattgttatcattatgattattctccttctccctttgtacgtgcacacgggtttgtatgtgagagtgcgtttcttgatcgggctctgtctttgtccttcggaagttaatcgataccagatctcgtatactatataagaccgaggtcagatttgacaagacccaaagacctcgttgggaaaaacctcttccttccttccctcatcccttcctcgttcagcactacatttttcctcattccttgatattcctcttcgttccttccttctctctctcggactcgctcctttacctatcgctcctttatacatcgttcgctaaccatcttcaccttctcgggtcgctctttttattcccatcaagacatgaaatccaccatgttgacacagcacaccttgcccgatctcgtcctttcttttctctttgtccttctgacggtcaatttgatcatggccccagtctcgcccaccgcctttttctctttctcatctttggccctgtcgcttgcccaatcagccgacccatcgaccaaccggtttgtcctctccgccacctctcttctcgccattttgctcctccgcgcacggtccctcctccggtccctttcttcgtcgcccgtccaaataactgcgccttcagcagccgacgcttctcttggctttctcggtctgttcctctgggcatcgaaccctctggaatctagcacgtcacccaatgtaattcattatggcatcaagtcatgccttgttgttttcgtcgcgctcactttatgcggcctctacctcgaagctgatgacgacgctggaagagaagacaagcaatgccttcgggcggtgaccgaaaagagccccctccttcctcgccgcgagatgtctatcgggcagtcaagcaccgttgatgctcccatcagaattgatattcacaacaccttgctctggatcaccctcttgctcacggccttcattgcgtttagcacctctagtattctgacctggatattgggtggtgagcttctcttcttcccttctcctctcgcgctcgcgctagacttcgttctgataccggtatacatcaatcattctcacagccagcccagccatgcttcccctcatccctgccgcgctttccatcactctctccttgtcttcgatgtgagctgattctcatgtttttgctctccaactgatgttcatttttctcacacgcattcattttcctatccccgcagaacgctctctcgcccgatctcggcttttttttccgagttgacacttctcacttcatttcatgctgtcctgtcttacacaatccaagtctcgaacgcacctacctgtggagtttgggatccgctgtcaagacctgatctgaaagatgtcgtacctgcactttgcatgatcgcgaaagttctttactatgtatgtttgcttgtgctattcttcttttgcgtgctgttgtctcaccagaccctgatatccgcacggatgttcttctttctactcattcctcatgctctctcttatcaacaggcttcatggacgactgttgtcatgctcttctacaagatctcgaaagatcatttagacaccatttccggcccagatcctattctatcttccaagaagacagatgctgacgttgaggtggcccttttcggaatctaagctgagccgtctcaagcctcaagtggcaggctaccactggcaggccgcgagtcgcaggtttcaggtggaacgactcagacgcaacctccagcggattgtctgaggcgttcttcctcctttctttttctccttcattttccccatcaattgttcactttaggtttccttttgggcttctctaattcctctgttcttccgggttcctcttcttttctcctctcttctttttttctaaactctgcatcttcagttttctgaaacagtttccttctcggcctcatctgacacttatctcactcagcgctcctgtacttttacgaccaagcctatactctactcctggatacacacacacacatacatatacactcggttggattcatcctatactcatacgtctcattctgtttcctgatgacggtgttatctattcatgttgttctcatattcttctcaatctgtctgtcttgagctacgatgcaggtgtgtatcagggttctggggttttagaagatctaattatagttctttttagaaaagagacaaattcagcctcatctttcttcgaagctcggatgcgatcaccctaagagaggaatgtttgctgctgttcctttccctctgccaatcctagaggaaaaagaagaaagagagagccactcctttcatggatgtcaacacgtttaaggcaagaagaacaagaagacgaaggatcagagtggatttaaaaaaaagatatttagacagacaaacaactaaacagatagatgcttggaataaagtatgtaaacaagaggctaccaagaggattccatcatgaccaactgtcttctatattctcctcaccagcgcgcggtagggtgatcgataaattaaggtatggcagtatcggatcaatgcaattccctcactagatgattccttcggtctcaacgtctttcttatttattacttttatttatttaacctattgaagttctgggtctgaattgatcttctccgatgtcaatatcgatggtcttcttctccttttgagatgtttctctttgaatgttcagactcaaaaggtttaacgtaatagtgtttgggttgttcacttacactctctgtcgttctagttgatcggatcgagagcgatcgaattagttcagaagataaaggacaggcgaaggccggcttgggcgcaggtagcttcccactgctaaaacacacacacacgcactgatacacatagagacagaaatagagacagagacatagagtcaagatgagcatagaatggacctagtctcatctcctaatatctcatcatcttcgatgaagctcatcttttcgatccttaccctacctgttgcaaattctttgatctgtgatcttgatacattcatgccttcaatctgttgattccaaagaaaatgtgtaagaggctgataacgcaagatgactcgctggagacgtgcacatagctcttcggtagctcaactcttgcccgagtacgagaatgtcacggtctttcccatgcgtcacataatctttttaccccatgccagtaacgaaagaaaaagacagagagagaaaaaaacaatacatatacatatcatgctgaatcgatatccagagatgcaaagctggatagccaaatggcgagtgtgatagaagtgtactacagttgagttatgcaagaagcgcgtcgactgcgttcatcgatccttttaagatcgcccactacatattttcagacaaaaccgcataggtttcaggaagaaggtttgtcagtccaatcccatcgattgcgcgagagacacttgaaataaacgagacagaggacagacttgatcaggtgagagcgaaatccccttagacccaggcttagcctcgcccgtcgtcttgtcggtataatactatttatccagatcgcaggtcaggaacaagggtaagtgccgatcgcgtttgtcaatacgatttgttttgtgaaggaagaaaaatgcatctagtacaaggaaacgaaagaccgacttctcgaagatcaatcaatggcttgccctgtccatccgaatagcaagacacatagaaaacgttaacacggttaggagcaagaaaaagaaacgagactccaatcgatcgttcagagaatgaggcctagactcaccttaaattctcgaacacttaaacgtctcgtggccgaaagctttttgatattataatgatgatgcagagatcgttctttaaccctctttgatatccaattacaaaacttcagtaaagaaaaaatggtatcgtctcacctcgacatatttctcgccttcaccgttcgttttccatgtccctgatagtgaagctgctgagggagctgacgttcgaggtttcttctatagaacaatgatagcaaccacgtatagagcttataaacacacagctgcacgaatctttgaaggaaggcaaacaaaacagaagacttgccttcgggggagcggcctccttcttgacagactttgtcttcggggacttttttgatttactctttaggccttcctcttcagaatccggattggcaacccctagatgctcatcatcagtatcctttgagggattaggaggatgaagaagtaaggggaatccgaaatcgataagccagggtgttcatgactatggcgatgcaacactgttctcggatgaggcctgagcgaaactcacctcaacatcatcctgaagagcccagccgacaaattccgaccagacagataggcagacataacgaaacgatcagaaataagtctctggaaaaccaaaaacgagatgaaacatacaccgacaacgaacgaatccattggttcttgttttgctcgcttgaccattttaaacgttcgaagatcagatctaggaagcgatgagcgtgtgcgaatgtggatatgagatcgagtgtatgtgaccgaagaatgatctgtggcaatttacgatctttttctgtggacgtgtcgcgtcgcgtcgatcatgacgcgctgtaaagaggaaaaaatttagtccgttcaaatccatccgtcctccctccttttcttgctcaggagaagcactacttccattatccaatagaacctcatcaaaagttgctcttcacaatgattacatcgataagagttccaaccactatccctcctcacccgtgcgccctttgttgttctctttgctcttgcgcataaagaaaggcttacctcttttcttcgaagtcttttcaatgtagaacctattgcgggtaaggagcttggggcagtagccaataaacctatcaaaaagggggatctcgtgatctcggagagaccgcttttcctattgttagtttccaactgcttgtttccatcaagcctagcgggcaagacattggtttgatgaactgaataccgagttggggaaaatatttactatcagcgacgcaccgttctcggcctttctattctcaagatcggccgacctcgacccagaggagaattcctctttcagcgctctggaccgacatattgggtccgtctctctttccctttttctgagtaggcttctctcggtaactcttcgttagccaaagttcaaccagccctttctttgcttgcttctctagtcgagcgatcgatcaattgatggagttcaagtcggcgcaggacaagcaatgcttgatggatctagcaaatacccacccagagcttccctctacttacgtgagtacttcacttttgtcaagtcagaattgtagtctctcaaagaggggttctccggagcttgaacaacctactttgacatacagggagtattcaaaacgaacgcggtgtgcaccagactttcacaaggcggactgttccctcatctatctagagtaaactcgtcctgtcgaccgaacctttctcgacctcagtgggatagatcgagaggattgatcgagacttgggctctcagagatatcgaattaggggaagaactggtatgcaaattccatccggtttaaaattgcgcatgcgcctttggatctgacagaggctctgagcttattaacaacgtagggctggatgtatctggacaattcgttccgaacgtcagaagaaagacaggaagaaactcttcgtgtgctaggtacggctctctctctctcttcttatttgttctctttgtgcctcgcttgtgaaggtcggacctgttcaaactgatgtctaactttcctttccttttggcgggggaacttgttgcatattatacaatacacaggattcaaatgcggttgcccgggatgtacgctttgcccccttgagcgcggtctctcggatgaccgagttcttcggctccgagagctttcccaaatgctaccctcaccgccgttgtcgtcgtcgtcatcatcatcatctacttctgccgggcctctggatgacagcgaggaagtcaacgggtcgataggccgagagacatacgatcagatccaaacgattaaacaaatgttacctctagcgagcatggaaggcatgtacgatctcgtgaatgagttgaacgagaggctccgagttttgagcctcacttggggaggaccgagaggaatgggtcggctcgagtgggtcggagaagtctttggtgatctcgggtcggagctcaccggttcgaatggagggttgagttgtagatgctgtatctaggaaaatttgatagtacgtcgacgaacgcgcgagacgaagatcgtgacgacgaaaggacttcttcgtcggctgaaacgataacaaaggattgacctcagaagaaagacacaacatataagaaatctttactattctgcgttctgtcggacgaggggagaagagatattgggaatgaattagaattgaagtacgttggagtatattggagtaggaaaagtatagaaggtcggatcggatgaatcggaaaaacccgagtattgtacagaacctcagatatgtacttgttctccgctccaacaaaaagaaaaaattacgagacgaggaggcgagaaaaggaaaggaataacgaactgcgaagaaagattgagactacgaagaaagaacgaatatgacctctacaaataagacgaaatcaagtatgacgatatccaaataacggggaatttaaagggaattttgtttacttggaacacaacgctctaaagatcgtacgcctcgtcgatcaagatgctcttgtatctgtatactcaaacgtttcccatcttcaagcttctatgacaaatccaagggatgctgtccaggtgccgagtgaaagagtgttatagccttcaatacgatctatcaattgggatgctaaggtatctcaacagcatcaaagttgtgctcggatagacgctctatgttcctctcatacttttattgacttctaacgatcgatgctgtgacacgtttctgtattttagtcggatgctctctctcgcttctacctatattacccggccgatcttcgtaaaggatccgcattccaacactacatagtcttgcggagaattggatgtataggggactacactcgctcgagaaggccgtttaaaataccgagcggagctcgaagagcgaacaagagcgagatagaagatgaaagacagtacagcgcttctccggtagacacaaaggtccgttcttgccgtcggctttgcttccatggctcgacttcctcatgcatcgaaaccggtctattccacatcactgacatcaagggccctccagccattgtcgggctttccggccgtccgtcggctcacttcttgtttctccatcttgtcctacgtttattgaatcgacggaagaaaaaagtagaaagaaaagaaaagaacacaacagagtatgaaatacagagttgacctccgctttgctttcgactttatcggccgcacggtgacttctgcgggactgtttatctatgaaaatcatcatcgtagagatacatccatgggtaggagatgcacagttcgtcggttccctatcttcctactatacatgtattcttgtttccacttgggatatcgtcgtatgttctctcagcctggtaccccgcttcagcatagagcaccgatagaatactatttgtattgaagaagaaaagaataaaggacaatacaaaataaaaataaaaataaaacccaaaatcaaaaccagaacgacataacctgagcgaacgatcggatgagcagccgcacgggtcgggatagcttcgagaaagagagacgagtgaactactaggcccgaaatggatttttttaacctttctctcgctgttctttctctatcttttcgtcggctggtagtccagaggagagggagagaagagcttgagtggatgcatcggatgatttgatttgatttaggcagtatcaggcactctgtggcgggggacaatagagccggtcgaaaactttaaacggaattaaaacgaaaataaaacatgtggcctgtgagtttgtacgtgcccgtcggttgccggccgaaaaaaggttttgtgcctgatcagatcagattttcccgtctttgtgcctgtgcttgagcttgagcttgtgcctgtgcctgctcccgctcctctgagcccaaacatgccgggcgtaatttccgtaggtccttctccttgctctcctgctttggagttcaatcacccatgctcgggttcggatccctctcttcttttaccttcactctctaacctccaaccccaactccaacctgcacttatcactcgtacgaacagtccgtcttccaattcccagaatcgtttaataagtacgaagggagaaaaaaattcaaaagggatagataggagacagcaggaggaaaaaggtcgagcgttataaaccgaggagtcccaacccactttttccatagacagatcgacaaacaatccccttttcttcaaagaaaacttcttcgccctatctgttcaggggtttctctttcctttcgcttttgtctctcgtcccctatctctctctgtcttctactcctactcgttcggtcactaccggcctggtatcctgtcgtttctctcggcgttctttgtgtgttgttttacctgttgggtctgcttctgttcatcctcggacttctcatctaaagcggacaacgcaacgaactcagcctaatagtccgtcgtctcctgctgtatgacctgggcaccccacacttttccacacgtacatgcccatcacgatagtcaatccggcccacttctctgcgtattcttctcaacggtttcctaaaccacatcatccctcacagccgcatccacaactagccatgtcgctctcctacccggatcatcatcatacccaaccggctttgcctcatccgccgagtacggcatcttcgcctttcgcgtgggctcctccccctttgacaacgaatccacagtcgtcaattgtggaacaacatcaaaaggcacatatcccacactacctcaatcattcaccgtcctcatcctcgtccacgatggccaatccgatgctcccgccacaatcggccagcccgtttgcgtacccaccacctcctcttcacgtgtatcctcaacagacagcctacccgtcccagggggctccaggcccagcctcccaaccaacgctttacacgttcaacgatcattttcaatcctatcaccaccagccctcaaacatccttccagatagacaactagttcggttggacggggccgaagaccatcactcgccggacttgtccgatgagccgcaacatgcttttcaatcctcatcagccacagcttatccgaatccccctgcttacaaccaatccgttccagcccaggttggtagcagatacgtcgttcatcaagcatacccgcccgtgtctgatgggattctgtcgatgacacagagggtggagcctatcgaatggaaagcagagaacggcaggtcagatcttgatgcctcgactggttcggtcatcaaaagcgcgcctaccgatagaccgttcagatgcgatcaatgcgcccaatcttttgtaagttttgtcccggtggtcatctttcggcctctttcaaagagatagtcagaaagaactccttcgaaaaacagtcgatgtgaattttgtcggaaccttttcctgacaccatcttcctctttctcggtacttcttatgatagaatcgaaaccatgacctgaagagacacaagcaaattcacttgaccatcaagtatgttctaaacccatcccaaattgtctacatccatatcttccttcgagatactacgctaacttcgacggttaatcactcgttcctaggccattcccatgtgataaatgccaaaaagccttctcgaggaaggacgcgctccgaagacattggctcgtcaagggatgtagagtgaatgctcctcggcaggtggcttctgatcctggagatcgtaagatccttctctttttacacacatgtctctttatctgtttcaatcttctcatgaacttcactcataatccgcttgcttcgcagtcaacggagccgacgccgagcctccatttatgtctcgatctggtagcttgatgacgcacgcgtcgaagcacaggcgtctccccaaggaccataaagcaaaagagaagacatcgccagagtcgagggtacccagacagacagaatctttgaagagggacggaagttctatcagctcgaaaagctcactcgcagactcttacggcaagaaggaagatcatcttgatgagcaatcagtctccgaggggttctcagaagttggtttctgctttctgaaatctcatcttcaatcttatctcacgtgctgatctagatcgcccgatcgtttggggtttcttttcgtctcatagcaccaaataccttacgggcatcgaattcatccatatcggcactcaaacatgtctccttcaccgagacgtcttcacaatacgccactgcttcggactagtcagccctatgctaggctcccctcgccccaaccaataccgatctcgtcctcgtcatcttacccttcggtatcttacctgtctgtccagccgtcgagtatatctatgccccgcgcttcgtcctacaccgatttatcgttcgtttcttcatccgagtacattagccgaagttccacatcgaatctgaccgggcaaatcccttacggtcaatctaatctttatatgcctccatatccgttgccatacgctggaccctcatcacatagtcagccagctgatcagggatcgtcgtataacgagcatcaagcgcaacaacaaagccatagccaatcggtcgatcattccgccgctggttatcaaccatcatccttcagcgagtctccctcggtcgcacagacagaaagatccggtccatggaattcttcatcgtcctctatcgggttgacagaccaagtcgatcaaaacagacggactcaaatggtttatcaatctgctcacgaacgaacgagccaaggcgccaacaccctaggatccacatcggccccaaattttctgtccaggccgtccaataggtcggacggaaggttctcaagatcagaagatggtcgacaggaaggttaccccgaacaaagttaccagtcctcgtcctcctcgttggttccaaacaatcatcatctgcaacaccagcagcaattatctcttgggctggaatctcgacagcatccgcttcatcaataccagcagtctcaaccttccggccaacttcattcacagcatatacacttgtcctccaatacacagtcatcggttcatgtacaacaccatcagcaacagtcggaacaggcagaactgactggctcatatccatctcattccttcgttcgatcggttcccacgcttcagcatcctatgccattgaatctaaactctagtcggccgtaaaaacaaaaacaatccccccacccaatttttctcatgaggctgcatattcatagagtttcgaaagcattcgactttcgggttcccatattctttatctcttttgatttcttgttcaccttctttctaagaaaaatagtttccttctcagttcgatctgtcttctcttggtttgtttgtacaaatgtgataagtatacacgccgtcgtcgcatcacctgttgtcaagttttcatatcccgcattcagtcctccgcatccactcctttgtttctatttacatttttcatctatttcttctctcaaactaacaaatattctcaaaattcacgatacgacgcttctgacatcatgacatgtacacgttagtttttcctcttgttatttccttctctttcttatctttgccttgatcttttctcttcgttcttttctttcctttcaggtcctgtatgtctcgtctctattggatttgctattcttcctgttcttctattctattgagtttttgtttgcccgtctttctttccgtttgttttcttgtctgtgtatgtccgtttgttgctttgcgtcatgttctgtctcgtttctacacgttctgttggttcatccttttatcaggcatgcacacgttcacattataggtcctttactttctacacatactgtttacattggatcaccagatcatcggattttatctcatcttttgtaaatcaatcgattcttggtctttggtgcttttcctctctctccttcgtttttatcttacacgaaagatcttactatcttacttgcgtttcattgaggttgatcgggaagtaatcataaaccaagcaagtccgaacatcataatccctttcctccctctcttccatcactggaaaaaaaagaagagaaaactctggagacatctttcaatctctccatccttgggagttctggagaagcttgtaaaaccattcggtcgtgctcaggtgtgcatcgatatggatcctttcgtcgacggtgtggaaattctattaagtttgagatttgggtgcatcaggccggtccaaagaaacaaaaagagatgtacagatatcagtgagggggtcctcctatcttgagggacttgaaaattcattgtggtcacgaagacaaagggatgtcttgaaccgctaacagatggacaaaggtaacatatgaagaaaagtgataagaagcaaaaaagaaaaagggggttcagacgaaccttgacgagttcaaggctggcgggaacaaatctgtagatatgttccgtcaaattccaatcccatttagcttaaaatggcaattcacacaaagagccaaacaaacaaataaacagagaaggagaagaacagtcacgtcagtttcatcggtttctttcttaatcatcccatcttgagttctacatcatcccgtctgtgtttcgtattgttttgataccaagagagacacaagaaggacttactgtcagtgttggcaatcatcccactcggagaaattcccaccggctcaaatacttttcttgttgtacccgccaccaattcgaatacctttccctcggctggtgtgatgggcgccggttctaacccgcgtccgtcctgtactttcatccttatcccgtatgaacttgatgagaccgagtgcggttcgatggcgagtatagaagagtcgtcgaggccgttggagaaatgagcatcgacatgaacgtgggcgtggtcgtgtgattggatagaatcagcagtaaccagcggactgatatcaagtgtcatgttgagcgatcgggcgattcgagaaacaatctcttgggtgtggacataggtctcgttgacggacgagaggaaatcgattcgatagttgatcacagcggtcgctacctcgggaagcgcgttggatttactaagttcgtgaagggagatttcgtttgatcgattgatcaacctcagttccagcacaagtgagataagaaggaaaagaagaaaaacaaaatagggacgaacattcctccagaaaagatgtctacagcttgggttgtacccaaaaatgctctgatagttcggtcctctccaatctcctctgccagatcgtcccactcggcagggtttcggattcgtctcttcaaatcggtaggcatgtccggcccgaatcgttcagcacattgaaggtacttcaggtaaggagttgccgccgtcaactttggtcggaaaggggatgcttcaaggtgggtgatcaaaagagagaggattccgattgaggtgtgttcaggagggacactaagtaaaagaatgtactgatgttaaacttcttcataacggacgagtaagagatagtaagcaacaatcgaacctggaatgaccacctggggtatcaacctccaaaaccaaattcatactacccttctcagccaagccaagactggcaaacttggctccataggcttcgtctactccagtaaatccctcatcgacaaggaaagaactatgaaaattacggcagacatcgagtgagcgacgaacggaagtgagcaggagaaaagatgacaaacattccgttaggaccatatcgtttcaacataaggtcagccagtggtccggctcctcgaggacctccgatctctgatgcatcagtatgtgtacacctctcggggtatcagcggaaaagcttcgtgaaccattcgagtatagtgagtcttaccttcatcgaatccaaatgagagcagaatggtcctgaaaaccggagcgtgcagaagatatttccgcctcaatacacgaacgaacgcaagtaacttaatgagatttagaatcaaggacacacctctctggctcaaaaccttcttcgattagtttttctgccaccgccaagatagccaatagagtgtttttacaatccgctgatcctcgaccccaaatccatccatctttgtccatcttgccctattttgtaaaaataatagtaaatataaaaatcagtcaaatcagatcatcctgggtaacacgaaagattaaaaacaaaaaacaaaacgatgttatgtacctcgaatggggggtgggtccatcggtgaaccgtagcgtccggaacagggacgacatccatctgttgatagagaacaacaaaagagtcaatccagagcataaatctagccacatcagcaggcgagtttgtaggagaaaagacgtacgtgcgccatgaggaggataggtttcagagaaggatcagtccccttccaagtataaagtcgggcgaacgagttgacgatttccaagtccagatgctccgttctatcagtttcagaagagatatgcaatcagacaaaaatcagcttctgaaggacttttgattcttgcgtctagaatatacgctatcagcagagaaaaaagtcacaaacacggtagggaactctaaatccaagaactcattgaaacgactgatttctttccaaacgggatccaaaggatctacgtgtcgaggcagatcgtcatatgagacaccagggatttgaactgatcgttatccatcgaccgcaattatcagaggatcgccagcttacgattagtatcatgatcgattaagaaaaggagtgtacgaatgattaactcaactggctctttgaagtcgggcagcggccttggcagcgtacgcattgtccttcataacatgctgtgttggtgatcgatcaggacagaaatcagacggaccaaaacggatcacagaagaagcgtaagttatctcttgttcttgtctttctatgaccttagctagctagatagacatgtgtggctgagaagataagaaaatgtagatagaacgatatgaatcaacacgtacccaactcgaaccaatatcaagcggatcgacctgtgtcgggcatctgccctctttttctaaacctgaccatccatgatctctgatttcacctgtgtcagtcacttgccgtccgagcacgctcgagttgacttttcggctggaaacagtcacgaatagatagacacaaccgaaaaggaaggcccactggaagagcaagattttggtaatttttctggatgcagctggaggatcggccactgcagcaccaggggaaggtaggacataatgtttctcttcgagtgacatcttgaggtatctcggattatgaaggcaacagttggagagaagaagagaagaggaatcggatggaagatcttcctctttttaatcattgtctcaggtagatgatgttcggacttgaccgatctaattttaccttccgtttacgcttcacttttcttttttcctcagtctggggctcgcttaatgacttgaacgaataatctatcaattcatgattctcacttgcccagtctggccttctcccagaatgaaatctcttcagtcacggcctttcccgttccaaatgaggtctgcacaaagaagaccaatgcggggtggcgcataagtttgatttcagtcgaccaatcttttctgtcaacaaagtgaagagatatacgagaaggtttgtgattgagcataaaacttacacgtaaggcttggactagaccgtcataaatggtgaatgtgaagatctctcttggacctgactctttgatcttgcctgcttgtgaggtaatcagccgggccaactcttggcgtagtcttgtcatactatattcgtttgtccgatagacataaagtagtcgacgagataagcgagaatcttgaaaagaaaagacaagaggaaagaagagaacgagcctgccaataatcatcgcttcgtctgctggtgtgctcaagctcaatagagcgttaaacaaagtgacatattgtacagcgacctacgacaggacgagacgaaatatttagcaagccttctatacaatttgcacaagtctgatttgaaagaaaggcaaggatatcgactcacgctctctacctttgaatccttgacttttgtcgctcccagccccaggaatgaagcgcccaacccggctgtttccgccaactttctcaaagactcgacgttcgtgcccatgtgcttctgaaacaccggccagagagcaagtcgttgacgaataacgaatggctcaagcggaatacaacctcggtcgagaagcgcttgaaaaattgagtcgtttagtcggatcatggatagcagcgaaggaagtgatggaggaagtggggtgagaagcgtagtgagaagttgctacgatggccattggcaacattgtcgggattaaacggtgatgagttgaatgtgcttgacgtcaacacaggaaagagtgacagaagacaggaggaaagaaaacaaacctgaacgtagttcaaagcaggatcgaatatctcatgccacatcttttgtaaccgctccttgtcctctttgtcttccttttccggctccttactccctttccagccgtcagccagtccacctccggcgcctacagagctgattattgaattctttcttactgatcttcctgccccaccacttcctgattcagttgcatgctcactttggatatttagcaatctatcttgagtcgccaaagtgtccggtcgagttgagtacaaacttagtcgggaaaagaatcgagtcaaaaaggtgtattctgcacaggcgttgtcgagaagaacgaccataatcgatctgaatagagcttctaatgggagtttctgtgacaaacaagaaagatatatacgagtgagatcttatcttcgaaactaaaagaggcaaacaggcaggtagcgagacacacgagatctttctcatccgcttgccatgcaagcaagaccccttcgccctcaatccgagagttagccaagagggaaccttcgagctctcggtcagtctgttcattgcctccgttaggtttgacagccgatgttgatgctatatgaatgaaacggaacaaaacaagagaagtcgccgaacacttaagcgacgaatataggaaggaagtccaattacactagaagaataaaccaaaaactgactattcagatgtgtggtcggcagagaagaggaagacgtgagcgacccgattggttctgatgtatctggacatcgtgtctagcaagagttgaagagatcccatatacagatgttgagccttttctcttccctttcatccgcctatgcaacgaggatcaaactgaccttgagcgtttgaatcactcggcagtatctcctgaaggatgtttcatagtagcctcttgtcctccacacataactccgtttgatctccgccgcaatcgctggtgcctctctttccaagaactcccagagtggtttgtttttgagtaaaactcccgtctgaagtgtcggcaaatttgtgctcacactcgcactgatcggattgagaatttttaaaagatatgttttaatctttcctaccgctgtcactctcagagtttccgcggtggtcaatagagaagatgccgcctgaactctggtcttacgaaggtgaatttcagaaagaatggtcgacagagtatgtgcagcaggataccaagcttcggagacaggcgtgtcgaggatcaaagtcacgagtgatggaggaaatgttatgctctctatcagagactttaatggtttctcgatagacttgagaaagcgaggagctctcagcgcaaaacttgtaaaagctgaggataaagggaggcaggagactcacacggcgtccttttcccctgcgttcaattgcttgacttctcgaccgtagatccttcagttgaccggagacagcttgtagatcagtttggaatgatgttagaaaggaggaaagattcgtaaggagttctgtagaagcctagcatggtgatggaccccggaccatggagggttagttctcaagtcgaaccaatggcatattaatgaagataaatacctcgatctgatcatgaagctcatgatattcttgctctcttgattcaactgttgtaatcgaaaggcagatacggtgaaatttatagctcttaggaccaggtattgtgaaaacgatcagagtcagaaacgaacagatagcgaggatggcttcatcttcgtcgtcttcttcaaacgaataatcctcctgattaattgcgtccagaagctcattctgatcaggtagaggagcgtcctcaaagtcggaaaacactgataatacagagcaaacgagtgagatcgtcatgagaatatgcaggccaggagaaaatcagaatctgaattacgaggaggaaggatctcttggatattgagctcagcaggctgatgaagtgacaacacagatcagcaaaacgcccggtcaggaccgacagcatgataagggcaatgtgacattcttagatggagtgttaaacatacctctatcgttgtgtctgcttccataggatagtttcgttcttttctgtattcaagctgagaggtacagagagagtgacaatagccaaaagtgtgaagaagaacagaagggcgatgggatgtggatagaagggaaagagtcgaaagccaaattcgttctcgttcttgacaccaacaacatcttgatcttgatcttcaatctcacctacagcttcatctcatctcatcccatcaatcttccttcttaatcttctgctcttaatccgatgaataccattcaagtacgatccatgttctgcattgcctcacttgtgccttttgtattattgactaaccactcatcggtcacagagctctttctgggctgtcagagattatctcgcaccggtacgtcagatcgcctcgatcactttctgttctgtttgttctcttctttcctaggcacggtgtgtctcatgaatataaaagttcatctggttctcatgggtggcaggttctcaaagaatccaaattcaaggaacacggtcgaatcacgcctggtatgtctattccctgatctatgttagcgggtggaggtcgaaatgcgagaacacagggatagaaatattgacacatgactgagcaaggagagcatggaacggttaatatacacctcagtgactattcttcactagctgactatgtgttttgtttctgtcatcgtcttcatgttcgcttggcaaccaccatggccattgtcaacagaggaatttgtggctgccggcgagttcctgacatacaagtttcccgtttggacatggtctgtctagctatatttttttgctatcacacgatgtctccgactaacatccacttcgctccctcccatcttctttttccatttgcccaaatctatatagggagcagggaaatccgtcaaaaattcgagactttcttccgccgacgaagcagtaccttatcactcgtaatgtgccttgcttaagacgagcggctaacttagcatacactgatctggacgaggtatgtctgctctcatcgtctattcggatacatgtcagccatcggatcgaatgatggatgagcgcgctcactcatctctcttctctcttcgtggcaacccaggacacggagagaatggtctcattcttggacgaggctgaagaagatgctccccctcctggaaacacaaaccctagccacaagtcatcagcagaggatgacgaaggctgggtagagacccatgctggaagatgttcgtcattcacgcttttctgtctcttagcaacatttccttgatcattcgcttactcatcaatattatcatcgcggatctgtatagcgacaaacccagggtttaattctcaaatcccacaagacattcctgatctagaggatgatgaatcatctcatttcacgcatggttcttcaatctcggcgaatgctagtacatctaatgagcctccctcgctggatgggctaaacctgaacgagcacacgctggatgagatcccagacatggatgatattccagacatggacgatgaggacgaggacgggtttggaggtgtaaaggaggtagaggatgaggccactgtaccgtaagcctctttccgccactcttggctgtggcttatcttcagttccagcatgcagatcaacactgacattgacatgtatctatgataaactccgtagaactcaacctgtcaagaccggctcatcaagaaacaataatttgctggctatccggacatacgacgtcatgatcacgtaagtcttgatagcaagagggcgatgtggtattgggataccgtggcttcgaatattaacgacgtttggttgccggaaccgtttacacagctacgacaaatactatcaaactcctcgagtatggcttcaaggttatgatgaagttcgtggaaacagtctttctatcctatttgcgctaccttctcacgtgttttgttcgtgatctttcttatttctgtttgttgatgtctgcaaatcgaaacgaatacgtattatagaataaaaacccgcttactcaggtcgaaacgtttcaagacattcctcttgatcatgccaacaagaccgtgacgtacgaggcgttcccccactcgactctcccactcgcatctgtccacccatgcaagcatgcaagcgtcatgaagaaggtaattgagaagatgggagccaaagcaggagaggaacagagaagagctttgggaaccaagacatctcttccgtcctcttcgacaacttcgggaacggcttctgcgacaggagcaaacacaggtggaaaggacaaggacaaggataaaaggaggtggttgggaggagccatcaggaaggtcactggaggagacaaagagaagtccacaacgacagcaacgagcgcgggcacaaaagatggtgaagaagacgaagacggaggattgcaggtcgatttttatctggtcatcgtaagtctcacctgcggcttatgtgttcatcgctaacgttacaatcatcgttaaccaagttacgttttcctctggataatagttcctgaagttcattgccaggtatgtgttcttgttccaaccaatgttatattattactgatttgtcatgatcgaaatttgtttattgcagtattgttcccactatcgaagttgactctacgacctcattctgagcttttcaatcggttatagtgaatgcgttatggaagctatctcgacatatgtttctttttagatcctgcaattctctatcgaccctatgtcttctcgacgatcacttgagtcttctatattcatcgttttgtttgtttgctcgtatcagtcgtgattcggagtgtgatgacgtgaacaaactagatgcacatggaacattcttggatacaagctcccgggtgtgcattccgaagtgaacatctaacgaaaaaattcttctatctcttccctccttttccctttccgcccttcggaccacctttgccttttgtcccgccaccctttcctttttttcctccaaggccaacaccatcatacctaccagctctagccccctcggtcctggctgcctcacccttcttcccgaactccgtatcgaacgccccctttccaatcttgatctttttccctcctccaccggctcctccaacagtgggtttcttcttctttggcttagaaagcgaggcaaccttaggttgatcctcggtgatcttgacgggtcgaagagccttcttgacacctcggatggaagcagcgatctggttgccgtcgttgtattcagcatcctcctcgatagccatctttcgccgtttgtctcgtcgggagagaccatcgtatttatctcgcttacgctgtttttatgtcgaattcatccgtgagtga

SEQ ID NO: 2539 - DNA, 11399 bp, Xanthophyllomyces dendrorhous
ataccttctctttaggttcgggagcagcaaccttcttgcccttgttatcaaatccacctacataagtcgccttggaggcatcggcagctgctttcttctccttttcagattggaaccaagttcgagcaggtcgggacatgatctcgtctctgtgctcaatcaggttctgtccttttcgaatctccatatctgccatcctcaactatttacgaagcggtcatcagagatagatgttgatcttagtttgggttgcaataagataaagggcgaaaagagagaggaaggtcaaagaagaatagcgcaaaaaatgattggaggacgaacagctttttcttccttctcttccttcaaaacctcttggacttcagtcttcaactcgtccaacctctttgccatcttgacaatggcttccgtaggaatcactcggtgcctaacttggtcggctggggatgctttaacacataacttgagcatcttccggtcagcttcacctacaagggagatcgatctggtttgcattaaagattgaaaacaggaaggaacaataatcagtcgatgcagttaagaaagacagatagataatagaaaaagtacgaaccgtcctttctttccagctcgagctgttcgaccaactcgatggacataagctgatagttgtccaggcaaatcatagttgattacaacttcaacaccctaaaatttataagaacaccctcgatatgacacgtcagtttgtttcgctaaatggaaggaaggaagattgtgaaagagcaaaaacagaccttgatatctaatccacgggaagcaagatcggtagcgagaagatattgaactgtcccatttttgaagtcgtccaaagcttgtaaacgctattgaaagtgatggtgagttagtaagaagatgacttcaatgacgattcgagattaagaaagactcaaccaacctgttcttgagtgaggttaccgtgcagctctccagccatcaagccgcaaagtccgaataaaactctcatctgatgagccagagccttactcctaaagaacacaatacacttgtccttgacggttcgcttgcaaagcgccaaaagaatggccgctctgtttccaccggccatgccttcctcatccaattcctctccccttttcctctctctaactcggacaaactcttgaacgagactccttgcggtcttcttaccagaatcgacaaacagtcgaacgggtttctctaaagagagtcgaacgagctcgtctacagagtcagtcatagtggcagagaagagcatggtttgtctcgatcgaggacaacgggtgatgatttcgttcaattcatcagagaatccagcttcaagcattcgatcggcctcatcgatgatcaacacgtctaacgcgtcgagggtaaatgactgagaatttcgaatgtggtcgattaatcgaccgggagtagcgatcaagatatcgggcaacgttcgaaggagagcggattgagcggaaagagaaagtcctcccaccaaaagggcgaacctgacgtctagtcctttagcaagagcttctccaacggcttgacattgaacagccaactctcgagtagggcagagtacaaggactcgactagcgcttccctttccgttctttcccttatctctgtagatcaaccgttccaggaccggaatcatgaacgcagcggtctttccactacctgtttcggctgaaccaaggatgtctcgaccaagaagtgcaagcgggatcgctcggttttgaatcggcgtcggattggtgaatccgagggcagtgatatttcgaaggagtggtcgagagagagacatctgggcaaaagtcgtacttgactttttcgaactatttggggcaggagctgtaggatcttcggagaagaacgcagcttttcgggcgatttgcgcgtcggtctcgggattagaggtggtggaggaggcggaggaggcgatggacacgttgtcatcgtcagacgaggcggcctcgtcatcatcatcatcggagggagcttcttcgtttccgttttgggaagagagatcgatttcatcatcggatgccagaggatcggctgcttcggggtcttcctcataaacgacacccattccaaatccttcctctgccaatgaccaagaatattgtgtataagagtatgaacagaaccgcgttggttataatgaccaagaacttgatttgggcaatgtcagatgagacgaaacgaaccttcactttcatcttcttcgtcttcattctcgctttccacgcctccccagctctcagcgtcttcctcatcttcagacgattcgtcgtttccattggaagagtcgtcctcgtcctcctcttctgccttggctctcttgtcggttgatgttggcttctgtttcgacttcttaagggctgttcttcgacgagcaatgatatcatctatcgaagtcccggcctgtagagaataggtgaccagatatacaggggatgttagaccaatgaataaacttgcacgcagtccaaacgtaccccttttccactagcccccacgtcttggacgaagtctgccccaccccaagacttggtatcattatcgaagcctgacgcggtgagatcgaagtcaaagtccggattaagatcctcgacatcctttgccaaagcggcgggcgtgttggagtcttgctcgttatctgaatctattgtaagaatgaaatcttccgacatggctgctgctgtgaagtagagtgaaggaatggttgaagaattagggcaagtaggatcaaggtgtcgaaatttggaatccaggctgtgcagctgggacgagcctgacaaataatttgttacagcatcgctcgatgttgttgtgaccactgtgaccagtaacatgattacactttgaaacacacaaccgcctcagcccagtttcattgagcatcacccactacgtccatcccaatcaatcaatcaatcaatcaatcactcactctgcatcttcttctttgatccatttctgcatctatttgaatacatatgggtcgtaagtagtcagcactcctatctgtttactgagagtagagaaatacagctgatgacgattgtgtctatctggattaatcttagtcgcgttctctagtttgtgggacaagttgttcgggctagcagagatcaaagtattgatcttggggttcgaccttttcaaactctctctgtctattctcagctttcaaaagcatcttggttgactgaagacatgatctctttacttgaaactattgtcgttaaatctgatcagactcgataacgccggaaagacaaccatcttggtgagtcgtctgccaggcccactcttgccacgtcgatccttcgaatatctcatttctttactcgatcattttgctgtagtataaaatttcgctgggagaagtcgttgccacagcacccacgtatgtgatttgtcctgttggagctcttcactctttcagctcgcgtcgcttcactcaattctgatcttgtttgctcgatcatcacagagtggggtctaaccaagaaacatatgtttacaaaaacctgaagttagtctttatcccatactgagtctttaacatcagatgtgttatctggctgacaccgtacgcgaaacttttcagattcaacttatggtatgttgaactcataatttatttataccaaactctttcgagccaatcttacttctcgtattctctaaaatgcttacgtacgcgcacttcaacagggatattggaggacaatctagcttacggcagtcatgggtaagcctttgatctcttgttcctgagctttcggtcctccgcctgacatatagatgccttgtattgaactctcgtggtctttcgaaaaccagtcctcgtactattcaaaaacccaggcagtcatccttgtagtcgattcgacggatcgagcacgtttgggactcgttagagatgaacttgcccgaatggtcggtgacgaaaaccttcgagattcacttttgttgatattggcaaataagcaggatgtaccaaactgtctgacggcagcagtcatttcagacacccttgggtaagtctcttcttcctcatcttcaagtctgcagctatctctgtctacgtccactcatttagtatattttcttctctgcgcgacacaatcataggttaacaaacttgaaggatcgagagtggcagatcgttccgacctcagctctgacaggcaaaggtttgccattttcctctttcgctcacgcgcactccttgtccatccgatgtcggatttcaagaacgctcgactgatctttaatgttcttctgtgatacagggttgacagaaggattcgactggttggctacaaagcttggtggtacaagccggtcatgatcacttccaatgttcgcttcgctattatcatcagaacgtctatctttcgccatcctagacgttccttcttagattttcattatccacttctttcttcttcagctttttttttgggtctgtttgcttgttgcttccttatatctcacactccactcacttcgacttccggttcttgatctgtatccagcctgtttcttttggcgtgcttctacttcttggtcttctccttcaatacaacgatgaacgtataagtcagaatgacgaacaacagaatttctcttccttttcgcagtcattcccaacatattcaagttatgtttgaagggaacgaagcttcctatgcgctcaatgacgtcctctcgatcgcgacaacgacgagaattaagagtatactgcgtgttgaagtggtcaaagaggatagaacatgccttcctgatgatcttcaactgagctgtcactgcgttgctatcagcaaaagagagggaagatttgtaattaatcgaccagattatctactgctgtattctctttctccaaccacgtcttccaccctgtttctcctggatgcggcaagacgacagggtcgttcttctctccctctccgactttgcttgaggtgtcgtttttagagcctgaggatgaggttaagggagaagtagaggcaagaatcgaggacacgaggagtcggttgtacgttgttgttgcttgttgaatttttttgattgtccctagaagaaacagtatttggggtaaccacagtagaaatgagaaagcttaaggattgaatcccattgtgaaggagaggaagcagtgaccactcaccagaacatcgaatgacacgagcgacaactctttctgaattgataggaccgagcatcgatagcgcagcccaaacagttctgtagtgatctcttgcgcaacgtataatgcacaaatttgtttgagggcaatagtatttcactgttgccattgaacgtatcaaacgatcgagaagggaaatagtatgatatccatttcaaaaccggcatcggagtaaagagacaggagcgacaaaagaaagaacaaaccgttagttcctccactaactcttccccagccgtcgtctccaaagatctgaatcacgctgttcttgatccccaagaagatggacttctcatccaacgctctccgctttcctgtctttgagttcggcggaggaggcagaagcaaaggcagcacgttcaaagcaggaaacaacaagtcctcttctaccgtggtttcttcttcttctccgtcttcatcttgactctcatcagaagacaaaccggactttgtgtgtgttgtttttgttcgttttgagggtcgaggagaggattctaccgggacaaacgagtcgggggaggatgaagacagagaggccgaggctgaggttggttgggacgtaggaaagagaaactccacaaggagccaacgattctgatcagagatagagatggaaggtcagtctagctgaaaggcggcactggagatcgagaacgggcgaagaagacacggttcaccttgaatctaaccatggctaatgaacgagtgagagttgaagtaaacctgttgatacaacagggagagagaaagtagtagagggtggttaagctgtgcaaaaattcgagtcacgtgcaaagttcctcacgtgccatgaatgaaacactggcgatgcccacgtcatcacattcggggtttcactcggagagatcaactggggaagaagaagagacggatgaatggccaggaagaaaggaagtaactgaagaaggaatagaagaaagaggttattctatcatgctgaatagtagcttataagaacaggggtctattactggacagtcaatcggaattcaaaaacatgctcgatatatgaccatcggtgttgaagagaaagagagtgcggaagacgacgacgacgacgatgatggtggagaaatgccatggtgatcggagcaacacaagaaaaggacgacgaattttttcgaacctcagatcgcttatatagaacttggtcttccagtttttagttcttgtgttcactcactctcatccacccacttgttcacctttcttcctttatatcctttacaatggtccttccgatggcaatgttcgatccggccgtcaagccaagagttgtaccaggaatctcgaaccacgccatgattggaaaccttcggagtgccgcgtgagtttgaacggttgtcgcccctatgatctggcaagcaatatcgtcgatcggagtgctcatgtcgtattttcttgatgatgtgcaattctctcagaatggtatctgaagatgcctcgatcgagagttactgtgtgccctactttgattcacccaggtttgttcttgttctcgagttgttatacttcctcagcgaaatatctgccttatggctgatcgtgtatcgatcgacggtcctttcagcgtgtttgcccggatcgtggacgccaagaaggggggtcatttctccatacaacctagagacatgaagtgtatgatcaaacaatcatatctgccatcttccaacgtactcagcaccaaagtacgtcttttactctgctctctcgttgccacgcgcgtactgtcgctttgctaactctttgacctctagttcttgcatgaagacgctgttggacaagtcatcgacctgcttgtgcctaagaaggcgatggaacctggaaagacacatctgccttggttgattcggtcagttggatctaattgtttctgtctttcacttgaactctcaacctgacgtttcttgatcgcctcatcgtgctctctacttataaatcacagtcgggtcaaggttctcagaggaaagatgacattccgactcgaatgcgcgcctgcctttaactacgctcgagatgaacataaacttgaagttcgtctccttttgttgctctttgcccacacgacctccatccatctatatccgcaacatcctcacagttcttttttttctctgtgacgatagattatagaggacgactcccaagtggacagtggaaaatacaaaaagcaaaaagcactatttacctcgtcggatgtgactatggacctgagagtggtcgtatcgggagagaacatcacttcagaggcagctcaaactgaggctgaacaggcaaagatcaatgctggaactgatggaggaaaggaatttcaaggagaaggtggacccgaggtttgtgtcggcttcgattttccaccctgcacgagttacaagtttgtccttacagttgtccctaccacggctcgtccttatgtcgctcaactataggtcatttttaaagagttagatcttagcaaggacggtctcctaagcaatgcggtctactccgagtttgaggtgcgttcttctctatccataccttccgcgctctagtttcctccgacgtctgcatcgatctcacaaccattgtatcaactaaacaggtcaacgcaggggagattgttgatttcatcttccgagacattcctgtcggcggatttgagctcaagacagagaaaggaaaagctacgatggcctttgctgaagagctcggcgtaagcctagttgatttgactaaggcggctagcaaaattcgatcgccgatagacccggttctgaacggtcatctagtggagaacctcatcagggtgagttcgtcgtattattttttttggttctgacactagagtttgatatgagatttcacctctcgacaacctgttgatcctgatctatctatcgattgtgatgggaacgtaaacacagaataccactcactattggaagaactggattgctaaatcaacttatcgaggtcgatggagagaagtggttcatcgacaggcgctcacccttaagatgcttatctatgaggaaacgggggccatcatcgtaagttttattttcgtatttttaaacattctctttgctctcaaatatgatactgaagagttgagatgttcgtaaaaccggataggctgcgcctacgttctcacttccagaagaaattggaggagagaggaactgggactaccggtatacttggattcgagattcctctttttcatgttatgcgtttattcgtttgggtttcaccgacgaggtttgttctgcccttatgcctgttttcaattagcggcttgctgacgattgtatcttctttggctctatcaaataggctaatgcgttcatggagtatcttatgcgagttgctacggacgagagagacgatgggaccttgcagattatgtatgagcccgttcttttttctcttctaacctatcttcagtatcaatcagacttcaggctatagaggtgtgcgttagctaacacattcctatctcaaatcatgtaggtatactatccatggtggaaaggtaagtatttaacctctttcgtctatagactaggttaaaacacgttttgaacgatagtatagaccatttacgattcgacctctgtgttttccagaaagcgccggaggaagtcttagatcatttggctggacatagagatagccagcctgtccgaatcggagtatgtcttattttctttgtgatgagagtaatgcctctgattacgcgtaactcattgcttgtcgtctattgaaatctgtctttctaaataaaagaacggagccgtgtaagtccttgttggctttcgttcggttcagcttctctatactaattcgtcttgggtctggctcgcgcttatttcatcagagaccatcttcaactagacatctacggtgaacttctcgatgctgtatgtctcttgtgttacctttttattgatcgattcatgacagaggctaatcttgcatcttctatctcatcagatttacttgacgcaacgtatgtatgctactagagatacgtacaaaaagaaaaaagaacttaatggctgattaccctgttataaaatatcgttgaatggcatgtatagggttgtccaagcctttatcttgggaccggtaggttccattcttgtacttgatattcatacgcctacgggtaaacctgacacccgcaatgtgatcttgtttagatggcgcgctgtacgaagaatggtagactgggtttgcgatagtttgtctcattttccttccgctctctagtataaaccctctcgaaagaatatttttttaaattaggtcgctcgtaattgattgcttgcggttgatatagactgggatcaacctgatctctccatctgggaggtccgagatcagagtacgtcttctttcatacgtctacgtgttctttcagagcggctctctaatttatcgtctcttcaatgtctctatctctctagagaaacactttgtgtactcaaagatcatgctctgggtggcggtcgatcgagggattaggttgtcagagaaacggtctctgccacttcctcagagggagaaatggttgggtgttcgagacaagatatatggttcgcctctttctttccatcctaactatgcgcgagattggattgtgttctgacggggtttgttggggtttgatctacagaacaagtgatggagaaaggatggaagttagttgtacctgtgattgaattgtcctcatttcggctccttctgatcgaagttttctttacgatggactgattagcgaggaaaagcagttcttcgctcaatcctacgagaacctggaggtcctcgagtatgtttcttcctagccctgttcattgatgcgcacatgtcatatgtctgactgatgccgaacataaactttctgattacttagctcggcagtcctcgtcatgagtctcacgttcttcctctctgctgccgatcctcggttcaggtcgactttggaacaaatcctgaaagtaccgtacgtctcttcgcagactcatgctttcttctctttcgaggattatatatcttgcacttctgatgaagcgcccttgtgaaaactaattgagctaacattcggatttggctatgtatccgggggggatctgtagtgagttgggaggattgacttcgaacaacgtacggatttctccttctatcattctcattcaccttctacatttactcacatatcgatttactttacatacgatgaactgtcaaatcggcttaacatcgagcagttggtccaccggtatgaccaagagaaagcggaggacggaatggatggtaaagaaggagctttctctctctgtacactttgggccggtacgtccttttgttctgctttgctttacattttattttattctgcaaagaacgaacctgacagtctgattacccggggttcgtctggatttcaaacgatataaaacttctgatgaaaacaaaagttgaagcgcttactagagcaggagagttcgataaggagtgcgtagaacgagcagaaacaatgtttgaggacttcctgggatacggtaaccacgttggtctgttcagcgaagaaatctcgttgggaggtgagggtttaggaaatcttccacagggcttttcgtccatcaccttgatctccactgtttttaatttggatagaagaatgggttgaaagaagactatctgactcagttgtatctcgttcccaagtttcttcaattatttattcatcccaagattaaatagatttctttgtagttctttttgctgtgtttctctctcgcacagattgtatcgatggtatattctttggttgtgcgttcaatcaagagagatccgctgaatgaagaatgatacataatattcagaaattgaaaatgaaaatgaacaagagtgaagggatacgacatgtcaagtaaggcagacgggaaaacgcaaagaaggggagaagagtggatgggaaacatgtgagggtgttagaacgtccatagcaaataaaacaacaaatcaagcagatagagaagaggtgatggaagtatggacaaagaaggaagactacttctttcccagtcttccgaccacaaacactccaagaacaaccacccccaggaatccgatactcgct

SEQ ID NO: 2540 - DNA, 10063 bp, Xanthophyllomyces dendrorhous
cttctcttcctcctctctctccgactttttcgatgacgacgtgggtagttctggaataggagccggtgcagaatgagaatgaaccttcgcggaggggaccattgctggttccaaagctgggtccaccgaaaatgcggtcaatcgttcgttcagcccaggtgtagaagcagccgcgacttccatcagatcttcctccgtcaaggcaggtaggccagccatagttccgggtgttcctactggaggtgaaaatagagaggaaggagcagcagaagcttcggtagcttgtcgttgagctttcaaagcatcttcccaagctttcccgccggaaaggacgagcaggactttatccgtcttttgggcccgggctaccgtgacagcgtctgtcacgtcgctatcagacgtcatgtgaacgagatcgccatcgtcgtccgtgtaggacagagtgaaatcagctgggtcgggcacgacgtgatcttcctcggacgaaggaaggaaaaacgggtcagagactagcttgccccctacaatctcccgaaggttctcaatcatgtccgacctggcttggaatcggtgggttcgtccactgggagtcttgaacttgaagacgtacgttccgtcatcgaccagcactgccactggcgcgcttaccgaaacagattggccatgcccaccgacatcggatccatcgtcctgcattccgacggcagaagcagaatctccaggaaggacctcgggcacggaagaggcgtatgagtcgtttcggatgtgctgattccttgacggtgttcgcagtgcgttgggtgcagaggatgaagcgggtgcgtgagagctcgagatgccggaaattgcatcgtcgtccattgcacctccaatggactcgaagaacttgccccacatcgggcctccagcgtcactgcccgttccgctatcagtgttcatgttgccgatctgtatgtgaagcaaattaggttatcagtacaggtgtggatgataaacaaacgctacgaagaggaaccccacctgttcaagtgtagcgtaggtcaacttcaagacgtcgacgatcccgaccaaccgtgcttccgaatcaaccacaggaagattgagatagtgcccgtctattgagcacgcgaaaaaggaagagattatcgatgattatccaatcgagccagatgtatgaagagaagatgttgaacatactgtgcatcttctttagggcgtcttgcacgctaagcgtcggcaaggcggtatccggatgaggggtcatcaccctgaccacactgcatctggtggcatcgaggccagcggcaatcaccctgagcacaacatccttgctggtaaagatacctacgatcttgttctgaccaccgatgacctccatcacgcagacagccgttgttcttcgctctttcataagaatagccgcttcccggacgctcgttcgaggtgagaccgtcgcagctggtttcgatgggtcaagcacggtcgtcaagtctggcaaagccatcttttctttgagtgagtctacataagcaagcatggcagctgcctgagggttatgggccatgttgggaccaagctcagactgaacgccggccaaggcagcggaaagctgagcggaagcgctcgaacccctctcgaccttggcaagtgcttcgtggaagactttggtaatgtcgagcagaccaacgacatctccctcttcattacaaacaggcttggatgatcaaagagctatagatgagcaagagggcttggtgatctggtggaggggtatgatgctgaagactcactaagtgtcggaagccccgagacaccatgagctggagagcttcggtggcgcttgtagtatctcgagtaaccataggatttcgggtcatgatagcggagacaggagtattccgagggtctagagactcggcagtgatcttgattgaaacgaagaagtagacggttcagcaaacagaggcgactttggttatagttgtcatgaatgttcttaccctgaaagccagatctttggcggtaaaaattccactgagcccttcctcatcgtcgacaaccaacacacagtctgtcctctttgccgcacaaagctgactagcatcagctacgctcatcccttccggcaccgtcagagccgggcttggctttagcccggcgaccgtgcccttcttgggcacggtttgctttcgatgactgttgtttctgttgtttgaagggaacgctccggttcgcttccttgagagttcggattcaatcttttttcggattgcctgatgtgaggtaagagtgagatgagtgatttgtcattggttacgacatcagatatgtcagtcaaatagtccagtctattcaggcgcatagacacagaacagaacatgagcaacgagcacgagcacgtcgttctaacagtctccaagaccagagaaggcggagggatcattgacaagaagatgaagagacaagaaaagatggagcgattacacaaagcgctgatacccagatcaggaactgaatctcgtccgcatctgatgtcttcatctcacactctctcgattccctcaaggaagccaatctctatctccttacatcatcctccgggactttctacaaattctcactcagagcagtgcggagagaaatttatgaaagttgacggaacaagagagatcaaagatggaagaacgatgatgacgaactgacctcgtctcgtttaccctgcttcaaacgggttcctcgatcggcaggactgtccctgccttgaaggggcgactccctaccgctagtttgagagaatacagacctaaaagaggagaaatgtgcatgatagacagcagagagaataaaaacaaaagaagacacaaagagaggaaccacaacggaacaagatatcaacgtctatcagtcaacatgttgattggcgatagccctcaagggactaaacgacaagattcgccagcgaaaaaagaacatacatgggtgattgagctggatgagatggaacagggatcctagacatgtaccaaggccgagatgaaagtaagggaacaagaagagtgagtaggaaaaggaaacaagaaggaaagaaagagagtctggaaaacgagaaagagaaaaagaaagatggaatgtttaatgaggagacgcgtcgcttgtttggttacgattgggttacaatcgttcgtaaccctaacacgtatgagacgcgtccaacgcgacgtgtgcagtgaggaagtacggctacaacccaagtcttgtggctggtgtccctaggactttatagtcttgcattgtgatcgtccatttgtcaataaggtggagaagcagacactcagataggtatcatagtttgtatgattgacatcatattcaatcagctggggagggatcatcttcctgaaggagaatgaattgcacgtctgacagacgttctatcaatcgttcttccgactaaatgcacactgattcatacttcatacatatacacgcgcatcaaatacccttattcacgagacatatctagtccttcaaagctcctgctaactattcgtctggtcttgcgctgctgaattttgagatacatatgtcccaagctgaacgagctggaagcgcaggcaaaacagataatatcccaagtgaaaggtcagattacaatcatgtttgttcatcaaatagcgacagtgagaaaaggcgagaagagacttactctttgatgagcataagaaccataccgcccaccgcgtttctccaccacacaggatctaacccctctccagcgtaccccttgcctacgaaagcgaggccgaggccaagtccgtgacctaacccccctacccaatcactccatccggatccggcccttccacctaagctcaaccctacagttccgactcgggaccgcacacccaaaaaccttgctaacgaagggctgtaatattgagcaacccatagcagaacatctcctgcgcaggaagcaaagataggcatgagcagagcgctgcaagccaacctggacaacgacgtccgtctaatgaacattgtctcagctggaggctggtcttcttcgtcgaccaattcaccgccgattgcatcttcggccccgttttcgaaacgaacaggatctacgcctccaaaaatgtgggcgaagaaaggatgcaactctctttcttcatcgtcactatcatcctcttcatcatcatcatcttgcgcttcttcctcgccgaatccttgatcaaattcctcctcgtcgacaaccccgatgatttcgtgctcattgatgtctgtccaatctgccggtggttgatcaaggtgaggctcccctcctgatataggatcaacaatgggctgatctataggggtaggcgcaagaacgggttctgcatcaacaggggccatcgctggtagcggagtggcaggatcagggacgggagcgaaagcaggagcaggtaaaggtaatcgatggatgattgtacgtcgattccatggaagacgtttgccttccactacgtatggataaaggaagcgtttcaaaccagctgttgaagaacaagaaaaaaatcgtttctcaagatcaatattgacctttgtttgatgacagtccatcgctggcagagccaaaggttgactgaccatatgctaagttgatcagaggaatcatagccaacgttaatcccggcccggggggatatgaccaacccacagagaagagctcttgaacaggagatcgatagaagcctacagtcggagggaatgcccgaggccgtgggaggaaaaagaatggagcgagcgcagtggttgtctcgatcagttgagatcgggaaaaatttaaatattcggatgccattgactggtttatcaacatcaaattgattgttctgtcagcaagatatatccaagctgaggaacggctgcatagttaacatacgttgaggatcaatgcgtaaggctaccaagatgagaagtactgaatcatcagcttcgactaagaaggtagtgatcagttgtaaaagcgcaactcacaattataggcaatccggtccaggcccaaagaggccaaccggcagggcctctggctcctagcgcgatccgtgacacttccggaccgaagaagaagcggaaggacgaaaaccctagtatagtcgaagtcgtgaccagcgaagaagctaaggctgtacatgttcaatgatgagcgatccataagaaacggacaaagcattggactatgtaagaatttagatcaaatagtcgtttcagatgatcaagcaaggacacttacttccaaccaagactagaaagaaggcgaggaggagaaatgtgtgatgatttgtcagaaagatcttcgaatctctatgagacaagacgaccaactcacaatacttgcaacctctccctaccaaagaatcgatcttgttgaacacttgcattgtcccgctcattgtctgaccaatcaatccagtttgtatctctgacgatcaaaaacaatgaaacgagagcgaagctgacaagaaaatagaaatacaaagaatgagaacttacttcagctagtacatatgtggatttacattgtggacaggtcaccgggcctttgccgcttgtacttgtttgctgttttgatgcaatccagacgagcaagcattgttcgtgcgcgagtaaagtgcatgagctgttaggtttgcgttcgatgatgatggcagtcacaagaatcgaaagggtcatgttgagccttctatcgaatgttgaacagaagagaccagagcacaaagggaagagactaaccagggatgaacccacttcatagctgaaggttccgaatcatcctccatacagatccaacatgtctgatcagataagaccaagatcaagataaaaagactcccagaattagcgctcaaagagtatcgtagaggatacacacatagcacactcaaaagtactacatggagatcatcctataaagtagaccacacacttacttttccttgaatatcattcaccgtgcgtggcctcgtcgaattagatgttgattccgctcgctcagtcgtatttgtctccgctgcaggcctcgaatacgatcttgatggagatggttctccaggcccggatttgacatccactaagggaggcatcgagccgagatcatcatcatcatcatgacttagcgtttgagcaaggttggcagcatcaacatcagccgggtgagcaagtggcggctgatcagcaggcagatgggtgaatagctgggacgaatccatatggtttccgagctgatcggcctctctttgataagacggcttggttgtttgaacgttgggatggtcgaaagatcacgatgacagaagtggaaggaaagtggaggaaaggacgaaaaaggttcactcccgctcgtctccgaaagcggctttctcaaatctccaaaggcgttcgttcttccttgctctcccaactcacatacgcactcgctcaagcaactcgtcgacaccatcagatgatcaacacccttcgattgtctactcggtctattccatcgccatcaatctgttcttctaggacattctcccgatccgtatcaagagtcatggcttctccgtcatcacctcctcgtcagcgagtttcattacccccgtccagcatggaggcttccattcgtgtcaaggtagccatctctcttctctttctttgaggctctttctatgtttctccgggtatgtctgacatgaatactgagcaatatcatctgagtaatcgtgataagctggaggatatcttgaagccgatccatctatctattagaaatgactcgtctaaacattcccaccatcaaccgatgaaggttcccggagcgtacaccgtatgttattgttcttgtcctttctttattccgttcttcacctccatctgtcaatacggtgaagcttatcgaagacacgtcttgatcttttgatgaaacagggagaaactcgtatgttccgaatatcattccctctgtcgcaaaagttgaaggaataactatactaagccgatcctattttctctgctccctgcaatccgtcttcagatttcttcattcatgctgtctcggctgagttcaacggaaagactcgaatagctcgtcatcgactcgtcaacaacgcactggtggatgaattcgctcgggggttacacgcactcagcttaaaattggagacggaggatgaatcgactcattgatcatatatagaggggttaaaagagcgctatcatcagagtagacatcatgtagttcaatatgatcaatgttgtgcttcaagataccatctaccgtcctttcatttgagtcttctctgatcaagagtttgttgaagcgtacgtcaattgatggtatccgataggtcggcgcggcttcgatggactctgatggaaaagtagtccccaatttatcatctgtgatgtacaacacgtccatctcccactccatcagtaaacataagcacaaacacatatatagtcctttgaatggagagcaaacttccttctgaaacacacacacgaacaaatgagcatggagatgtgataattctcacttcggaacctctagatgagcgaaatttgatcgaatcggtaaagtcatcaaaagctggagctgtatgcactttcatcgggacgaccagagacaactttgaaggttcatctcctcttcgttatcaatgttaccacatgctcttcttgattgattgatcttaccacgttctttagacaaactagtctcacatctatcgtacacgacctacgctcctctcgctctcaagacattgctctctattctttccgaggtccactctgtgccctgtccgtctctctatggaaactcacacgaactttcacctggcccttcagcaaagattcatcgaatatcggttgctcatcgactccgagccgttcctatgggtgaaacgtcgatcgtgatcgctgtatcgagtagtcaccgacgggaaggattcgatgtgtgtgagtgggtattggagcagattaaacgacgagtacaaatatggaagaaagaggtctatgtcaacggacagactctcgatgaagctctgtcgactcctctgctctcgtctgtgccatcatctgaaccaccatctttatcagtctggaaggagaactttccagagggccgatgggaatgaatgatcagagtccggccgggaaccgggccgggacaaccgcggtcgagagataaaacagacagagttctcttcgttgctcgctcaccttcgataaccgggagttcttgttttctccgttctctcattgactgtatggaaacccgcttccagataagctctatatgttggcgttcttggttctcttctgctgagtgtatcatataaggagatcgttctttcccgtttcttcgactgaccccgtcgttgtctctgacttacaattcacacttactgctggtcttcctgattctttccttcttgtgttcccatcatgcccatcaacaacaccgttccactgctgattgctcaacctatgacgtacgagttaattgagccatatggaaattgtgcgtctctgcagagctatcttagactctgcacagctcacactgacttatcgttctattcggcatctgcgctacgagcgatgtagtgattcaaggatcctgggatccatccactatgccagctaggattaagactaacgttgtgtaggtcttatttcattgcacaactgtgatcatttcttggacgatattcgatctcttgacgtttctcttgaggcgttcacaacgggttttaccagaccaaatcctcaaacggcttacaagtacaacagacaggcaccaatcatctctagtttcgtccgcttcacgaaattacattccccgcatggtcttgcactcggctgacgtatctaattatcaaactaattttacagcctaccccgctacatcaaatgcccacacggccattgctatctacagagccacaccacctaccggcatcaacctcgctcgggggctctcattcgacctccgaatgtttgaacgacactctttttcttctcaagcgttcctacctctagccagaggcacaggatcagatagcgtaggtgaaagtgaaggaggaatggtcgtcatcgttgccctcaatggatcaggtttgtcgctcattgatttgagagcgacgtcttgtctgcttcatcgagcctaaccagtgatattttcgaatgggcttacagatgataagccagatatgtctacactaaaggcgtttctgctggagccatggcagggaatttcttataacgccggcgtaagcccttgttttagtcgtacttgaaagctcaacggcatccaatctctgaccctcctttccttttttggtcttctaggtttggcaccattccgtgctaacgctatctccagtcgattacgcctgtgtcgatactcaaatcactcaagattcatccctcaaagcagactgcgaggcactgcgtcgagggacagatgtcgctccgtgggcaaaagtttatcttccattgcgcggtgaagaaatcaccgtttaggatttctgaatcaagtctttttctttgtttatcttcttaccgagttgagtttctgtcttgttgtatcaatatgtacatgcgtgaatatatgtcatattataatctcaacagaatggatctcgaggccaaaaaaatcgctggcgaagggcaacattgactaagaatatttacccctcgtacaatgacaatctatacatcagtcgacctgctgagatctgtcggttctatgctctgagggaagtaagatgggtggccatcaatcttgaaaacagcgtcaccgatgatcgatcttcacaatgaaatccaatccagacgtcactggacaagccgctgtcttgatcaaatctttttgaagccctctcaagagagaggcagacatcaagatagatttacgcataagtggacctccttcggggacgtagctcgtgtaagctgcgtagatctagtttcgtcgagctggaaatgatctgcttaagaggtttttttgatcgaatgaataaagtagatagac

SEQ ID NO: 2541 - DNA, 6820 bp, Xanthophyllomyces dendrorhous
  misc_feature (2677)..(2686): n is a, c, g, or t
gaataaagtagatagacaagacggacaagaaacaaagaagggaggagaagaagaaagaagataatataaaacagaaaaatcaaattataaatcgagtaagatgaacttgataagatgagagcaagaaacgaggaagtaagcaagtgagcacgtagaggtttgatttgggaggatgtgtactgtcaattttgtgtgtgcgagaaagtcacaaggcgtggaagattgtacaacgtgcgtggagagaagagagagaggacaagatgaaagagatgtcggttcatttcctctttaattgaaaccgaaagaaaaaaaaagattcgtatgctttgagagctcgagatatgtatgtaaaagagagaaagagatcttgctgcttttggctacaaccgcaagagaatgaatcaggaaatcatacgaagtacgatggcactccctgtagcacgaaacaagggttagaatcgatgataataatatacagcaaaaaatgtcagaaaggtttaaaaaaccaaaaggaagaaggaaagccggtaagagaggcaagactcataactaacctgtcttcggctagccgggtttctctcatctgtctcgttctctggagcagcttcgaatgtcttgaatgaagtcgaacccgcatcgcctacttccattattgatgccaggtttccgcatcggtaacagtaactagatcagtacacaagcaatcgtcattgttagctgaagtcgttctacagtttgtatagttttgagatttgcgagagtattgacacagttctcactttggtgcactccaaacggtgacgagctggttatcaaacatatgcttgtaaccctcctggacaagctgatgggctcgggcaattaagctgaggccattcagatggttgaactgggtgtgaaagccgaaagaaacaatcgcgaattagaaattcgtagatcctcaacgggatgtcaaacagcttatgtagacaaagtcatagaacgtacttcgtgggtgaccttcgccccaaacaactacgtgacaatgtttttgagttcacacacaatgagctttaaacgataggtccagagcaatcgatgacagtaagaaaagagaggataaaaaagaaggaaacaactaacccaacctgccccacgtggactgacggcccaagtatcgacatcgtcctgtggattcgggatcgagaaatcagacacaagaaggaaaagaaaatacgggttgtgaaagtggagaagacagagaaaacataccggatcagaccacatcacgtcgcaaaacgcgccctcatgcggaatctcctgcgctcgggcgattgtcctgatctgatcaatcgttctgatatcaggggaaagaccaccatgcacacacaagatctgtccatcaatcacctataaaccatccatagcccaagcgagcccatccgagatattagcgaagagagcagaacgatttcacagagaatacggggggagacaggtcgatataaggaccagaggttttgtacgcaatggatacagaagagaagataaaatggtgaaggacgaacggctcctaacggaagatgatcaaacacctgacaacacgctttccacacgctggcatttccgtatttttgttgacactcgtcatagaacccatagacctggtttgtgcagagtgagaagggataaatcagaattcaagatattggactgaattaggcctctcccgaacggatgtgagtaacaagagcaagaaggatagagaaagtcgatacctgagtaatctgtcttgactcatgatttcctcttaatagagttactttattcggatacctgtccattcgtgtacaggataggcacaaaggtttataacaaacagcgaatgaagaagaaatgtcgtaagtccagctgcacaaaacacaatgctcccaaaagatgcacatgagcaggaacgacatgacatagagcgaacctggctttgagagctagtaagagggagagagtctccaacgagctaattgatcatgacggcaatttcagtaagtccgcttggacagctatagagccgtgatgaaaactcaaataagggagaaagagacgtgacttactataaacctcgatcgacaaagtcgcctataatgttcgttcccccccattcagatccaataagcaagtgaaacacacgaacagtatagaaaagaaacaaccaaaggaacgcatcatatgagcagttatgagtaagtcgacccattggaaggtgcgaatagactagaagaaggaaacgtacccatgaaaacataacctctgccgccctcatcgtcacctaccattccgccttgtctgagaagttcgatgacatcccaaaattgaccatgaatatctccacaaacggtcacaggggatgagaccggctgaacgttagattcctcgagaaggattgatctgacacggaggcagagctgtttgatagtatgttccggcaggtgctgagaggaaagaaggaagcgacaggtccagagccacagatgaggatttgtaaggttgagcggatcaggaaagacaaaacaaattgacacgaaagactgaccttgcacttcaacaagtgagatattaactgatgcgagttaagggaccaggcaggcaaagaatgagcaacgattgatacagaaagtccgactgaccgaccgaccaatcnnnnnnnnnnatcctcatagcaacgtcggtagctcggacagagagaactgatcagaaagagagacgaaccgggtcatctgattcgatcttttccgacatgacgaatgtggtaaagcgttatggttgaccaaggaatatggatgagacgaatgatgccagagcgggatgataattaaggaagtgatgtgagtgaggtaagcatttggtctgtcgcctcgatcggaaccgaataccaatctacaccaagatcgcttctttcggttctctactgtttcttcagcttcatgtgttctacacgtttctctagcaccattgatgtacagttgtgttgtttccaagagacaataaagggacaagcatccatcaatcaaaatgataacaaggacaactagggtacagaagacaaagtacaagatggtatgtacggccagaatgcaaagcaaaaagaaaacatataaactacatccttccccaaatttagaagggggtcagaccggttatccagagcgggcctgttgtatgtaacaagatatggtttgaagccgcccgcccgagttcatcgcttcaatctctctcaccaccccaaacccgaatcccaacgaggggtttcaagggtctagagcgggaaagaggcgaggcgggatcatctcgttgctccgtggatattgtcatcagatgtctcaaaaagactagatggaaaaccgatgagaaacgttaggaatcattactgcaaagaagccgaaggatgggtatggaagaggagcttacgaggaaggataaagaaaagaagcagaaagaaagaccaagacaagcacaaatttataggtgcacctgagagggatttcacacgtgaccagctatggctgtggcttcgagtggcaagctactctgacgcgtcatctaatagcgtttcaaacgcgtccggagagccgcgtcaggatagaatatacaaccaatctttcgcctgtgatctcatcaaacgctctgaatagtatcaacacgaacgatgtttaactttcagaccaaaggactcccgacatttcagctcaaaagacagcgcgatcggatcgatgaacagatcactaggcaggagcaagaggaagtcaataggaagaaggctagagaggcggcgatgcttgcaaggagtgggacagtgctcgtgccagccagtccgccgaaggagaaaggtgtgtgtgagtgtttttttggtgcttggaaagaggaactcggcttgcgttgttgcaagttcctccagaaactcccgtccattgtttttgttggtcttattgacgctgttctttttgttaaatgtttttgctaaatgttcaccttgtcatctgttacacctaactcatttgaggagattagcaagacaacaggagagctcgaatggctctatctctccttctaaaaaagcacgtttagatcccaagaagggagcatttgaatgtaagatattagtcctcgctgaagcaagcctttctgatgtatgttgatgtcacctttgcaacccttcattctcgtttagctatccctgttaaagcgacacaagcctccaattcgaacgcaataatcccaccgagtagaccacaatcatcttttcttacgtctctcccccaggctgtaaaagctgtatcgaacgcgaaccgatgggaaagcgtcgatcgttcgatctcatttcattctaattccctcaagccaaatttcgatgatggcaagggcgcaggcgcgaaagctgagggtacgatatgcgacaaggacagggcagaggggatgagaacaacgtcggcggagaagaaatctacaagaagagagaccgatctgacagtcgttgaggatctcaccatgggaccgaaagaattcggtaaagatccctccggatcagatctttgggagagtgtggaaccaaacactggaattagacttgcgtttgtctcttcattctttttcggatgcgctgttgttcctgttgggtttctctctgattattgactgaatcttcattctctctatacccattactccaaaagcaagaggacatactcccatgaccttctccaagcgcatctttctgacagataccacgttccgccctcactcctctactcaattgtccgtctctccagggatggaacgttctaccacgttccactcgatggagatttcgtcatcatcgctgtcgtggctgaacagatcggtgggatcaagaccacgaaagctggaccttccataggaggcgagctctcgtctgacgaggaagagagcgagaagaaggagaacagatcgagaacggacagtatggcgactcgaaagaagaaaacagaacggaaggaacagagagtgaagaagtttgtatcattcaagctgacacagttgccacctaggggttctacagttggcgctgcttctggcgatgcaacgttgacactgttgatgttcgagtctgattcttctaacctcgttgccggaggaagcggtgggaatgcggaggttgccggaaatggaggggataactacgcgaaaagggtctatcgaggagggagcggtggagccttcgaagagttctggaaattaaaagttggcacggtgatcgcgatactcaacccaaaaatcttacgtccgctaaagaattcccaaagcccacacccaatgacaaatgcgcttgctatcaacccactctcggcagagagtgtgattgagatcgggcaggctagagatttaggaagatgtgcaagtttgaagatcgatggggagagatgtttgaactgggtcgacaagttcgtattttgctttccattcttctcttcgtcaggtctagacaggacggcagaaatgaatgaatgtgaataacgggatatcttccttttttttctgtctctctagacgagtaggtgaagtttgcgagtaccacgttcacgccgctatgaaacgaaaccgggccagtcgagccgaatttggtgcttcgttcgttggagattttctgttgttcacttgtactcttaaagacgactgccaccatctgactgaagttcaatcttctcttctatcagaacgtccaccttcgcgatcgggactcggccagtctcatatgcaacccaaggcaatggcgcaggcaacaccgccaaaagaacgcttacccgatcgacctcgtttccctcgacgttcccgtctagtcaaaaacgtcctctcggttcatcctccagtaacactacctacgatcctatccgcaagactgggcttttgccccgggataccatcagctcgtcgtcatcagcttctttcgtggtcaatgggcacgttgtacacccgggtagacagagagacccgagtgcaacttttggtccagagttcacacatgaaaagatcggtcgtcataaggaaggtttgttgaaacgacaaagagaagagcgagaaagtgagaaggagattgtcgatttgttgggcagggatggagggaaaactcagggtggacggtttttggaggctgcgcgaaggcaggcagaggcagcgggagagggaaacaataaggccgaggaaagaagaacgactgaaggaaaactgaaagatatagagaaaaagaaagaattatcggaagaactgatagaggtcaagaagcgaaagaagaacgcgttctcggcagagatgatcaaacatattggctttgatccaacggtgctcgccagtggaaatgttcgtggggacgagaccgctgaggagaagaaacgacgagtgagtcttagttctgtcggtgtagattatgtgttggttatttgacgcatgtgcacgcgcacgctaactcttcatgattctgtccctctgccccttccagctcgaggcgatctcactattggcagggattgatccagtttcgagaacgatctcgaagccagaaccacaactgggccctgtacccggtcgtaaggtccgtgggtggagttccgtccgggctccgaccgaatcatcgaaagtagccgattcggctgccaagatcggtgaagccgtcaaggagggaagcaagactgaagtgacaaaagaaaggaagacaccgaaatacgtggatctttcttcgtccgatgtcgagttggactgagagagagcatctgtgtttttgcatatacgtatgtatgtatgtatgtatgtatgt

SEQ ID NO: 2542 - DNA, 2366 bp, Xanthophyllomyces dendrorhous
agttcctcgccacagcaccctcccactggagaacaggtcctcaacccccgtccgttctgcctggagcagctcctccacccatcttgcctccagatataccgaccgagtctgatctgtccttgaattcatcagcgtccagtgttgatagaagagaactgagagatctatcggatgcagaatttcttaataaccttgccttcagagcaccaatgagctctcctcatccggccatcaatagatttctgcttcccaatggagaaaacgtcagctgtgtcctctgggctggactctatcatatctctggaacggacatcagtaaggctctttcctctatcttcttcctcaacttttccttttctttctgcccacttttccttcatctgtttttatatccaccactgtcaacatgctgaaccgcccttttcccctcatctctctgatattaatctgtagtaagagcactggtgttcagatttgaagcgtttgctagaccggtcgttaacatgaaaaaatttgaagaaggcgtgttcagtgatcttcggaatctcaagcctggaactgatgcctgtttggaagacccaaaggtcattaattacctcattttctccctctttttcccaatttttgtttctttccttacctctctgtccgtcactttccactcgcgattggaatggttactcacgcaacaactcttcctctttcttcctgctgatagtctccgtttctggacttgttgttcaagcatcaatgcatccgaacacagaaaaagcaaaaagtgtttttctggtatattccctttcttcttgatctcttctcttctctttcagatggccatgctgattactcatccaactcaaaccacatcaaatcaggttctcggttccccacgacagactctttctcgacgcactagagcgagacttgaagcgagaaaaagcggggttgaagccgacgacgagcgtgataggtgagccggcgcgtagcttccggttagtaattcttctcttttcctttctcctgccttcctttcatctacttcgtactttgtctcaaacaaaataccttgcctttgttttatcattgataggtatgatgttcggaagtcactctacgagcagtttgcagcacacaacactagtcttgctgggttccagccttccacagatactatctactactcgtccatttcgaagaaagtgggtcttcttgttgtttcctcttgctgtatttgatcttctctctttgctcatcaatcttcttggattttcgaccgaatcaaaaggaaaacccaacactctcgccggcttcaactcccatgcccttcaattcggctgtagatacgatccctgccagaccctcttcatacaatgagcctacggcatcttctagccaaaacggatcatttcaaacggtttcatctactccttctatcaaaaatcacgttccctacaactctggtagggccttcatcgaatccgacggctctcggggcaccctgacgactatttctctctccggcgatcaaaacgagaatgatatgaaggtaccgatcagagatgacggtggctctatcggtcggttgcttaccacgaagctcgggccaaatacgttgaatttagaggaggcgactatcaaattcggagagtcctatcggccgatggaagattcgtccgggttaacaacgttggccttggcaagtgcgcctttggatccgatgcctatctctcaagacccatcatcccactcttctttcacccgcccagcccaatctacaacttacgacggcgatcttcatccctcttcatcttccttggtaaataccaggtcaagtccatacgagtctataggcaaccaacctttgctcgctactacctcctctgcttatgccccgacttccgctttcactccctcctctggtccaccaccagtcactcggggcagactgtcgctcactcaacaacgacaatccgtcatccgaccaaccctgaatccgacggatcagacgatcataccacctatcgttagtcacaaggttcatccaactccaccttcacacccaggtggcgttcggacgtttgcttgtcctctaccgtcatgcggaaaacatttcaaaaggctcgaacacctgaagagacatttgaggacacacacgatggagaaaccgtacgggtgtgagacgtgtgggaaaaaattcagtaggagcgataacttgacgcaacacgcaaagacccacgagaagaccgataaggaaaaggagagggacaaggcgaaggggaaggaggatgggcagagtgaagctggggctgagactgcgctgacagggttcaaaaataagaccgggataaacagagactggatgttgg

SEQ ID NO: 2543 - DNA, 2613 bp, Xanthophyllomyces dendrorhous
aacagagactggatgttggacgtaacaacgtctgccgttgtttcttctggtggtctctggaatggaggagacggcgaaggtaaagcgggcaggagcaaaaagaaaagaaaactgtcggctggtcagagcagtggtgggatgaaaatctctgaaggaccggaagacgatacgggcgatcttgacgaaaagaatgacgggaacagagatgaggacgaagacgacgctagttctgtcgaaagtgatagtggaacagaagatgaacgacaaggacaaccaagacggaatcgtcaaaaacgatcatctcaaaccgaacctgccactcatccgccgagtggcccgtactctcaccctcaaccgtattctcagtcggaaactcggattggctattcacccacaagactctatcatgctcttcctcgagatacatacgcctatgacagcaacaacaatatcgttgctatcagtgactcatcagcggcggctgtcgagtatgccgaatataatcaacaaggctattcaaatccaccggtgtctacttcgatcgaaaccggccgttataaccgggatgtttatcagacctccgcacctgtgattgcggttccgaccaccgattcaacggcgatggatggatattccggtggaccctatgattattcatccctacctattccactcgccgccccgccctctgttcatgtcccctatccacccccggcgctcctgacacttcaaccactgactttcggcgatccagctttgccctcgaaatcgccaagattgacgacatcgccatttctagcacaaagctcatcaacttttattccccctccgccgggattctctcaatcaagattccgatccgcgagaggatcaaaattagctagactctcggttgatctaaatggggtttcacacacccaaaagacacttcatcagccaacagttgccaaacaggcagatggtttctcaggaacgacgactgatctaggatatcagacatatgattcgagaagaacatatggatctcaagattcaacccgaacgcgcctacatccccaatcacatccgtatacactcgcgcaatcacatattcaacacgcctccccttctcaacaaccgattggagaaagcatgagaggccgacacccgacaatttatacccagacttcatcttctgttcctcctcctttgtctttaccgatcgggggattgtttgacccaaacggaaacacaaacatgaatgggcttgaaaacgagtcgtatcagatggaattgaacacgaacgccaacggggtttacgtccctgaagtctactaccaacagcctcaccttcaagttcaaagtcaacaacccctaccaccaacacaaccacagttagatatcagcacacagcaagcgatatatccaacggatcatacagtcgtcgggtcatctggttatagttcacatcctttctgataccaaaagtcgacaacaatcacttctgttttgctttcttctctcttcttccaatttccaaagccgtagttcccgtttttgtcagaatcaaggggtctaatttaatatcctcatctgttcaacagccgatctgaatttatctcgatctctttctttgccctttcgttccgagcctcttcgtttttttttctttgtgtatatactgttactttccttctatacgtttatatgttttttctctgtttctctatagtccgtaatcttgtgcttatgttcctgtccatgtcggtcttagttgttcgaccgtcttcaaatataccagatttctcaaccacccttatagtgcttttctctagtcttcatctttctttttcttcctcattttgcttggtttttatgtgtcgcactcttctgtattcatctgattacccacaatatccagttcgatttcgaactccaaatcttcagttatgctcgaatcatctttcttccgtcattccatcagttcctatccaaccgatctacaaacttatctgttccttcgtttgctcaattttcgagttgtcgctggaaactaataatgtaatgttgtcctgacaatatctttttttcatcctccttttccttttctttcctttcctctcgatccgtttcgtttctttcaatccgatccccctagattgattataccattcatctcgaaagaaactgtgaactatgtcttcatttggcttgctttattaatgacaagacgaagtctatgatggaggttttggaaagaaaaagaagaaagataggacagggaatggtgcgtgacattaagtaacatgacatatagcaatctcccttcaacgcctcttctggcctttcgtagctgcattcagcgcagcgtcaagtccgtatcgatgacctcgagtgatccgtttcttgatgggttggtcattcgtagaagataactcttcccgttctaaaagaaagagtgtaaaagatggttagaaaattaagagatggttggtcgactgggaaagaaaaccaagagacatgcctctctttcgactgtccgatgccgatcttgaatcctgtggcacctctgcttcgttcccatttccattttcattcgcattcgaatcagaaggaacaaagacagcggccgtt

SEQ ID NO: 2544 - DNA, 8502 bp, Xanthophyllomyces dendrorhous
agaaaggattaccctcggctgagaaaatcgtttctcgcgttctttttctctttcatttcgatccttgttcgcgtccttctctcgatcagctcgaccatgatccctatccctgtttctgttatctcggtcccgatccgatcgatcttggatcctcgaagacaggctcttcgaccgatcgttctcccgtgaccgtccatctcggtcgtccttatctcttcgctccctcccgttgctctggacggaagtagctggagatgttgagcgtcgaccggatgtgcgagaattagaattctaagtcaatcaagatgatgtgttagtatctgatggatgctagaaattctatgctgaagaagtgctcgtaaaaaagagacctagtcaactcacctcgctgtcgattcggaatcttctgccactatcacggtctttgccatctcttatgtctgagtcccgaccatctctagaggatctgttgtctcttgaagagagcggagatcttgctctagggattggtgaccgcggcctcgatgaacctcttcgtcgtttattatccgggctgttctctctatcccctcggcgacgtttgccatctcgatcaggctcccctcgacgatctctttccttatcccgatggctttccctaggcttgttatctctctctgatcggccaacatcctttcgatctcgttcccttaatcgatcacggtcaaccctttccttttctctgtccttcagtcgtttgtcttccttctcgagttctttttcccttatctctttcatacgagtccgttctcgcgcgaggtcttgttcccgcgcctcttttgcttcagcttttgcctctgcagacataggtccagtgacaagatcctgattcttaggacctctgggcggcgattttggtctgacgtagggaccagaaccagggccagagggagtagcagaattagaactactggtggagatgcttgaagtctcggcaggaattgatgttcggagccgagaagggttcataggaagacctttcaagccagcaggtcgggtaggaggttgaatcgaggcagacgcagaagacccgttggaagatggtcgatcggtcgaggaagagccggaaggagcagatgggggcctgacgggatccgaacctcttaatcgagaaggaagacccttatcaaccgatgtcccactctcagaggtagctgatgatacaccagggcctggagaggccacgcgagacgttgggttgttgagatggggtaaagaaccccgactttcggacttgggagctgtagggacaggttttcccgatgaagtgaccgagtcagaagcggatgaagagactggtgccatggcagaatcagtggcttcagaattctcggaagagtttgcagcagctgaagaattagccacggcagcggggagagctgatacactagcgttggaatgagctggtgaagctggctcagaggttgtcaacttgccctttacagcagaaaactgtttgttagccaggtgagagtatataaaacagtattaatcatttggttcgataagcttgtcttgaattttgaggtagtcaatcaaaaaagacgcaacgtacgctaaggtttaggaactgactctgaggtatccaagccttcttgagtttactaagttgcgaagaatatctagcaaaattgacgttcgttatgttcagttcttagtaggtcgtcaggtaaggaaagaggaaaagagaccaacgactgcaggagaagcttcaaatcctctcttttttcctcagaaatggcttgcttaattctgacctccattgcttcaccatgggcaatatctcgagggaagaaaggcaagactttttgaaggacgatgacaatattcttgatgtgagagtactcagtagacgcaatgcacagttcgaaagcctgatgatgaatccagagtcaattgttgagaacaaagaaaatgcgaaactttcaactgaagaaaatgggtgacttcatacgcacagttagcagacggatgtgccatttgtgcataactttccgatatccatcccatggtagaactgctttgatatcaataggcgcggctgtttgtggtcgactaggagcagagaggaaacctggaagaacgtctttatcaccgacggcttctttgatgtaacgtttctcgtccacgtgccattgagtcagttcatccagacagccatagaggaagtgggctatattcacaaaccatggtcgcaagtcagtcaaagaacagaaggacaatgtaacaaaaaatgataggccaaccaaaatttcgggcttcgttctccgtaaacgaagagaccaaaggagggagccattcgttgatgatttgctatccaagaggaaaagccatccgtgtacaaaatatgaggttaaagtagtattcatacacccggcagaaagaattgaacgaaccaagttataaagccacaagctagagaaattgcaagtgcccatgttgtgcatcaccttgataaacttcgcacagtatgccgcgtctgacaaagagagcattgctcgagggaagatgcagtgttgaaagatgtgttgattgagtcctttggggtcattgttttctaatattgtacgaaaacgacgagaagcaggacggaaatagaaaggttaagcgacatgcagccaagctacgaggggggaacgacatactcctgaaccagacatttttctcaatagccaaccgtcgtttagtgaccgcataggcctccatctgttgatctctttctgtctgtaactgtttcgctttggaccggagtttctctctctccctctgccattcactcgtctgagctgaggtggggaatcggccgagatctttttcggctcggttgagtcggtcgatctcggtttggtatgagccgaggggaacctcaatgtcatatggcgtcaattgccaaaaagtgacaaagaatggagaactgattttgttcaaattcttgttgaagtcagttttaaaaaataacacacaaagacacttcaaaaatagcaagacgcgtaagacgaacgtcggttttgtatcttgaggaagatacttgacggcagatgtgatggtatctttgagcgcaggatggtacttcccttccgacttctagacaaccataaacatcacaaaacggtaaaggcgagttaatcggatgacaacgaaattcttgatcaactcaggaagagacgaacgatattagaaccagtcttttctcctgcattcccctctgaggaatcagccgctgcacctgatcgctttgaattcaacgccaacttgagtctagcttctttggcggccggagtctcagccgcggcttccaatgcagcctttttggccttttccgtgtcgtatttctgttcaagaatgacaaaaggtaacaagcacaggaattttacatttcagtatacgcaatgattagcgaaagatcaaaatgaagaagccaaccttgatattgaaagccaacttcggtctcaatatgtggaacgccaaagcaggcgaaatcctataagtttccacaaggtccgcaaacggggggatcacgtttgcatattcctcagctgaaagatgttgctgaagaagctctactagttgaagtaagacttcagtcgcctaaaaggtttgaccgtgttttgaaggcagacatggcttggttttagttatggatattgtaaagaaaagaagaattcggaagagactacgaacgttatcaaagagactggacagatgtttcatatgcgcctcgacttctggcacattgaacatacacccgtctcttgtctgagccaccacaaccaagagagggatcaacaatcctgaatccttcaggctttttattaacctgatcgtgctctttcccgtcaatgcttttttctctactggtgcttccggtctgggcgggtcttgtcctggaaggagcggtggtttgagaagtgtcacagtgggatggatgacttcttgcctgagcgtaggaccaccgccttgagcagatacttgattatcggacaagtttgctagaggctcgatggaagtcattgcggagatcagctcccgaaggatgatcaagtccttggtattaccggcccggagttgatttgcaatgtagtgaaggataggggtgcaatcgatcatgctatgatgtcgtcgacagagttcgccagcgaacgctgctagacctggataaaaacacgaagcaagattcattaattcatcagcccgagagagccgaagatttacgtcaaaggaaagagagaacctacttttgagccaaagagaggtactcgttccgtccgtctttgttcgatctttatccgggtttgagaaagcgtccagtaacataaataccaccacgtctgcacccaaaggggtcaagtaccttgcactctccaccagcggtttcactaagttatcataactctgaacctgtctcaatgcaacactccaagtgacgataggatcagagtgactgagctttccaagagctctcgcgtgaaacttgaggtcatctttcgagactcgtcgaagggcggatttagcgtcccgctcggcgagagcgccttggactttgagttgaagattggtttgataagatgccttccaagctccgtaaattccaaatcgggtttcgagggggtagagggagagaagggaccatatttcttgagatgtggcagatccacctgagagggaaagagaaggcaggaagacaagtcggatgaggatggcccatcggtcgaggatcttctcgtctgtcacgttctgttatatcgccgtagagaagaatgacagatgtgtgtgaggacgggaaaacgctttgcgcacgaagggggacccaagttcacagcactcacagatatgacatcctgcacacctaatctgcatatcccagtcaacaagcccatgtgcctcccgaccaaccctcccagcactctcaactctctctcgatgccttctgtagcgaaaaacatctctaggttttcgatcttatcaacaccttctgtccactctgggtaaaaccagacaaactgctcagtctttgtttgaagtggtgtcggcgcggttcctgtcagtttggccgtccgaggtttggcaacccattcctttgcccttcctccgtttgacggcaagagatcttgcaatcgatatcgaatcaaacgtagttgcaggtcgaccaacctcggttcagagacaaccaagcttccaaatcgggttgttagataatcaacttcgggtctagctccaacagccatcagagattctaccaggtcgatcttctgttgagggagtggtagtagaggaaggttgagaggagtggccgtcccgttcgtcttggtacccggcagagcggaaatggaggaagtatcatcgtcatcgagaagaggggcagcggaggctagcatggcgtttcctttggatgctcgagctagctcattaacggcttgtctgtacctagtgtcgtacttgttcatctccggttcgtccggtgaaagctacaagtgttcgatcgggtcaatcccagaggaacagagaggaaacacgtcaataaacatttacgctagagcagttcatgacaaccattgaggtaaaaatactgacatgaacccagaaatcagtcagcttcatgaacccttccttgatcaacacggccgccatcaagtaatagtaatctggtagtctctcgcctgatctaatgacatcctgatcctggtagtagccaaacttgaaccccagcacctgagctagtactgagctaccactttctcctcttaactccttctcacctatagtcgtactcaatgtaccagacgctgacggtgttgacggaggagaaatgggaggaggagcccagggagatgagcgaaggagatcaaggaaaaaccggtggtgtgtgacgagatgtgtcgcgaacgcgtcaagaatgaggtcgaccgtctttgaaggatcaaggtcaaagtatccaataacagacatgattttgttccaaagagaacgcgctcgctgagctcttttttgaggagctgttagtaagtaagcagagaacggagatttttattcagcgagagggaactgcgaaaaggtggacggagagttcgacgcgtacactcaatatctatcgccgtattaggatctttgccgggtcctagattttcgggcgtattgacaagaacaaggatgagagaaaatccctcagacgattcccgaagcaggttgaatttcttgagggaaaagctgcacacaaaccaagacacatgtatgaatgaaaaaagcaaagaaaagatcgtgtgagtgacctagaagtatgacgagagaaaaagagacttacaaagtgacggttgattttctcgtcgttcgactcgtagcggccctcagcccacttcccaagagaccaagtctatcaaagaacggaaaatcaaaccggtcccaaacctgttcattcagaaggccatgatggaacacggctttgcagaattctaaccagggcgttctgacgtccttttctctttgaagtacttgggtcgggtcggacgtgacggcgtcgtcgatctcggcgtccagaaagcatagggcatcggcgaaatgataagttggttcaagaccgaatttctgagttgaactggagaggatcttttgtaggaggggaagaaaagatgctagcgatatagaggaatacgcccggagcaccaggtggaagaagtattgaagagctgttggatcagcagaggattgatgatatattgacagcctgttggtggtagcaggaattcagcagaaaagtttcgaacccaacggaaaagaaccatgtaagttggagcaaaggtgcgactgtctttgagaatatcagagtcaaagaatatttaaacatgggggataagacaaacttacacaagagtgtcgtcaagagaggatcggtaactctccaacgcctgttcgaatgctgatctgaacgagacggaagccattagactgaattcctagaagaaagcctttcttggtcttgctcttggtcttgctcttaactacttttgccacagaccagatctagggatatagagcaccggaagaagcgatggcagacgaggacgaagaaagctgggagaggctgggcgggcgttgatggtgaaacagatgatttcagagtgcgatcttttggtcaacgaccggccgagcccacacgacgttcattccatctgtgaactttgttgcgagcatcttttctgagcacacacacacgcacacacatactgtctctctctctctcttcttttctcattgaacatgcagatgaagaagatcgtcttgtagactttctggcttgatcgagttctcagccttatacatggactctatgctgtctcgcctgatcttatgtccttcaacctcagctcacgccggccagcgcaagtgagggcgtatagttctttcgcgctaccaacatacacctcgcaagccgtatccctgtgtctgtgtcgtacgtacaacgacctgctagcatgctcgtaagtctgaatccatcatcgcctatcgtcctgaaatcttccagataatggaccttgtaaccataatgtaaccaacggcattaatccccccgcagaacgcccccccgcctttggatgttccttcggattcccatcttgctcttgacctaaccatcaaccatccttgaggagatctgccagttggctcataacaacaatgccctccatatacaccacttcgatctcgccctccttgtttcctatcaagtcaatttcagaggtcgagccaactttcaagccccattatatcttcgaagactccttccatgcactcctcgtcgggggttcgctcggtgtcgtgtttgcttctgttgccgttgagttctgtctttgtctcgtgtttctgcactggttgtctctgcctggatgggttgggctacgaatactgccgtatggcttgacttggtagtcgttcttatccaccagcggagtcggtcttgagcaagaggctatcggctcgattgagtcgagaggcctgagatggagaatagagaaaagagcctatgctgattgggtactgatcctggactttctttctctgccactcacggtctacaccttttcacacatccacttcaaatcattggcagaatgcctacaacaagcacaaccagggacctctcggagttttcactcgatatgggtacactatcggtttgatgagtatgttgaccttctttctcctctccgataaatctttcggagatcgcttggagtgcgacagttcagaacggatgactgacacggtcagttgatgttggcgatgattcagctctcgtcggaccaaccttcttggctgctcagggtctttctgccaatctacgtgaggtatggcttcgttcttttaacttattgtgatgtaccaagataaacagctgagactcgtgctacggattgctccgttgcctctttgggctcaaacagaaagacacccccttgaatgctgcgattg

SEQ ID NO: 2545 - DNA, 5953 bp, Xanthophyllomyces dendrorhous
ggtgtcaaatgttggttctctgccaattcgagtcttagtccatgaattgctctgaccaaagttgcctggattactttcaatccaacagccggctcgctcaacaaggcagctgccagttgcgccacgtttgctctcttgacgggtgctctcgattacactggaggagtacgtttctctctttgttttcttgtcatttccctacatatagggttaccattctaacatctatgtttgctcacatatcctactgcagctcactaatcccgagcaaatgaccgaggaccctattcaaaagaaaaacaggatcgaatcccaccttgtcccccgaaagaagttggctgatatccaccctccacccgggcaaggctattcggcagaggcttaccctggttatccacataactatgcatccttgagaactcaactttaaattagattgaggtatctgtagggcgatagctctatcccttttcgcgtttctatctgttgttcaacttgttctttagttgtcatttgtctcttttgttgtccactatcattgtgttctctccttcttgtattttctctattacttccctcatccacccgttaagactgactttcgaacaactatgaatgtcggtcctcacacaattcgtcacaggatacagatgcgggcgcacgtatcagagagaaaaaaaagctcatgcagaaggtggcggcggtgatgatgggttcgatggtgaagaaggatctttgaaaatcgtgtatttcgtctgttttggcggtggcaggggtggaggagccgggctgaaattccgatcgacgatcaaccgataagcagagaacatggtccaagtcagccatacatgcgacattgtctgtaccgccatttccgtcgggctagagacaaaaagacggcgaaagagagagacgcctcacgtaccgaggatcagtcttgaggaggtctattcgcttcgaaccggataccacggatgcgggaagatcaggaacgagatctcgagatttcagtctgtttccaattccattcgagatgattgtttaaaagggatagttcagtgttgaaacaaggtagagtatcagcacgcagatcggaaacccaacggacgatctgggggatttgaaagagtcttgattaagaagaagaagaagaagaaagagggacgaacacatcctcgatagctcttctgatcggttggtcgaaaatatagagtcctgttgcgcaacctttcgatggacagatgcagatcgggatttttatgagcaacgtacgggaaccacgatccgccggaggagagaggctaagaggaagaagcgaagaaaggatgaaaaagggaacgtaccgagtgtgatgccactcatcaaaaacaacactttttgcgaagtcatgtgtaccagtcgagatccaagtccgtggagagcgtatgtatgtgtatgtgtatgttctcttgtagatatgtgtgtgagtatgtgagcagacgaatgtgagcgtacgagtgagagtgtggatgaaagtgcatgcgtccagaatggaacctcaacgcttcaccgcctggttacggaactggttacaacatcccccgccgactcttgtgcatgggggaatggatgagcgagctgatcgttcaccatcattccagttcttcctcattctttcctatcagtagtcatccttgagcaacctttcaatcacttttaaatacagtccagctcgggagtcgttctgtttttgtggtctcgtaagtagaggaagaaacgaggtaaacggctgataacctagccatatacccaacgaactatagtcaatacgaaccattcctgcgtatcatctttcctcggttgtactttcaagactgttacttgggttgctcagacaactagtttgaatgtgagtcttcgtagagattgattggtttcgttttcttttttttttcttcgagcgtggtgtgatgcatccgatgtactgatccgtcctctttccttgtacaacccatgattccaagtattacgcgtggtggctggctgcacccgagagcaaataagaccgttgccttcaagcacgcgcatactttcgtactattcggccctcaacacgcattccaggaaaacagtagaactacgtcttccaaacagtcggatggttgagcattcaagtccttctatggatacgtggtccgcctcgtccacaccggcatcaaacccagaacctatcgttcatagagtaaacctcgaatacctcggccagagtatggactatgagaggtctccttcttcaacatccgactattctatcgatgctcgctcgttcgctacatttggatcatcttcaaacaactcttcagtgggacctgtatcgcccgttggaagatcaatcgaaatcaggccgcatccgttgtatcaagcgcgggatacaccggtggacgaagccacgacgataatttcgccagtcagcgcgtttggattccatgtcgatcgaccgagcggacataatgagtttcaatcacacccgcaagtctttcttggggagcagagagagatctcaaggacgcttgagaacgaagacgcgtcgggtttgccctcaggaggacagggggcgaagcgatctcagtctagaccagacgcgctcttgctcggcaatatcgccggacctaagaaaccaaccaacacgtctactcaaaacccttcactcgacgacatcatcatccctacagatttatcacgactctcttcgatagatccgcttccgagtcctcggacgttgatgcgcgttccgtggaacatcgcggccgatggttcatacgcagaaacaacgtacgaaccagccgctcaagcgcttaaaaaacagttgaactcaaaattgggactcgtcaaagacactcaaagggagagagacctgtacacactcgaggccgttgacagggatggacagaacaagatgtttcgaatcaggttggtcgcgcctttctcttccaaacgttttcatatgatctgcttcgaaaggcgttcaatcattgatgtattactctttgtgttcctgatgcgatttaaaggtcagcaacaccaccacctggtcaaatgccaacttcaatctttgcgttttcatcggccgatccgcgttctttcttcttggatcctgtccgagcgctgttcgctcctgattctcctttaatatcctctcgacttccatccgacatccctgagcccctctctccacctcctattccacataccatgacttctacagtacaacattcacgcagccggtcagagtccaagccaagcgattcacaaagcagttctacgcaagccaataggatgaaccaacacacgtatctgcaaaaaccaaaagagaaaggctccttaaaagtgagggtcagtaaaagtatgcagagcatgggcgctgtttttagagggtttgacaaggactcgaagtcgtatggagatagcaatcagagtgagtctattctgtgtataggcctttgatcgtcacttggcactcgtgttctgtattttgcgaccgaaaagtattttgacgcgtatgaccggtttgacccatcttctagatgaaccttctcgccaggtggtcggtctcatgtcagccttccagccaactccctccgttcgtcgccgacaaagctcctccaatcttcaatccctcaagaatcaacctgttacgtccttcttcgtcaatcgaccaccgacaccggttctctcctcttcccgaccttcgagttctagaacacctgagcaactatacaacacactgcactcgagcgaaaacagaaaacagatgcagatgacggcaactcatctgagaggtatgcggagttgggagagcacacagagtgatgacacagcccgaccgggttcgtctcgttcagctctgaatgaggaggaagaagatggcggtgggaaaggtgtcaatctgttgagaatcaacacggagggaatgactaggcttccgatggaaatgatcaaactggtgaactctgaagggcagaaggccgagagagccatctcggcacctgtctctcaaatcaactttcatcgagataccaacttagttgaccacataactaggtttcaagcagctgatatctactgtcgaactcagttgtttgattatcttgcgggtgacgtccgtttgacaatgtcccaaaaggatcacgaagaggaaggagaggatgaggatgagactgaaagcagacgattagagagttggaatcctttggccgaagacgatcctagattcgctctttgggatgtgtgtgttccggcatctgaattcagtattccctcctctgccgctggagtgtctactccatcaccgagcacggatggtgcgcacgaaacttggttatcggaccggtctgattcaccatttgcgatatcaacatcttcactcggtgtcatatctctatctctaccgactcaattcaagcagccttcttcgccgagccgacgtcttgtaggcgccacacttgaacgttggatccatcatctcactcttcactttgatcgcgaagccatctacgcttttcttctcacttaccgagtgttttgctctcctctcgatctgtgtagattgttaatctcgagattcgaatggacgataacacctgatcttcagagagggatagacgagatcgagaggttgaaaacaatggcgagggtgaggacgttccatgtgtggaaaatttggttgatgtacttctttgaagttgattggttaggaaatccagagatgagggtgttgacggcagattgggtgaatgatatgaggaaaagagaagatttggatcaggttccttcagcaatggttcgttcatctcctctaaaaatcggatcttgtgtcatcatcaagccatcttgtcagtcaaaagaatactaaagatctgttctcattcacaatctcctacgatctgttcagtcattgatcaagaaactgaaggagctgctgaaagaacgtaggggtacatacaactctcctgccggtctcacagcttaccaatccgtcttgacgactcactcgcccgcaggatccatcgcgccatctcagactctttctcaacatcatttctcgcgttcagaaacctctttaggtcgatcggctcaaccaacctatgcaccgttcaatatatcgactagtacctttctttctccgtctgttacagccgaatcgtctcgactggtcggacagagtctcaatcgtaaaaagtctgcgcttagaaaccttgcaaacggaactacgagcggacctcctccgctccaggctcattcaatagccaaactatggggtagcctgggtaggtatgctagggcgagctttggcacaacattcggtgattccaatgccagcagcaattctaattatctatcaactaccgttattcataagaaatcctcaacatcatcccttcctcaaaaaggagatctactcattgtggaaggcggcctcgatgcgctgtttaagacatatcccaatacggagactcctccattgactgacagggaaagtttgatgtcaatctcgtcgtcttccaatcgttcaaagtcaagcgaggacgatcatgaggaacgatccttttcgcctggttctggaccgacaggtcgacctcctattcagtcgcccatgctagattctgttcttgaggaaagattctcccacgagtatgagaacgaactcggtcaggtagtcgatcttcatccttcgtgccgtccgccttctttgtctaatgcctcaaccgaaccagctacaccgatagaaaatccaaacctgacgcctcctcaaagtccatcatcaactggaccggcttcctctcggacgacgtcagctacttccattgggatgtttgtcaaagttgaccggcctgcttccgggtctagtgactcaatgagttcggttgatagaccgtctgcttcctcttctggttcgaattcctctacagatgtc

SEQ ID NO: 2546 - DNA, 2298 bp, Xanthophyllomyces dendrorhous
attttctagaatgtctttttcggctaaatcacaaacgtgacccaccagcatcccatcgtctgttctggaagactgcaatgatcaagttcgtgctcttagcgaggtcgatcagttctttggactccgccgctgtgggagtcaacggcttttcgatgatgactgtcagatatccggaatatatcgatagtgacgaaccgagatagcatcatcaagaagaaggtgagaaaaacctggagaactctgaaccgagaaagatggagaagggacgaaccgtgtttgccagcggtgaggattgcctgccgaatgggtgaggattctattcttagcatcactatggccttgccatcgacaagaatcagatgaaacagaagaaagaggaacgaaaaagcccaccttgctgaactcgtagtgggtatcgttgatagtggtcacgaagacagcgtcgacaacatcatcttcaaggacctcttgaagggaagtgacaaccttgatgtccgggccgtagaaatccctagcgtcggatttctccgaagtcgcctttcgctcaacgatagagtgaagtttgaactgttcagggagcgcctggatgaacggaatatggaacactctgtgagagtgttattatgtacgaagagaaaagagagcaaaagatagtcaggtcatcagacagagcaggagtgaaagcaagaggcaagaaaacgagcagagagaagagatggaatattgagtgtagtttcaccctctcaagacgacaacacaagcaactgaacatacgtggcagacattccgatccctacgacggatacattgataggtgagctagacattgttcgaaaggtagaaacgagaagtgatgggttgatgatggttgacgttgggatcaagaggttgaagatgactatatagaacatcccaaagctgtgctttttcatcacgtgatctgtgacctttagccttcgtctcattcgcgctccagcccatcgagatgatctaaccatcaccaacacatcgatcttctcactctgtcctgctctttcactggccagctggcatctttgtttctatcagaataccctcgactaatcgttttcgataccctgctgcctgtttcttggctgaagtggaaaaatgatcattcgtagagcttttcatccgatcgcgtcttcatctattcatccgtccttgacctactggtcaacccttcgtccgatcggctgctcgtattcttcctcatcatcctctacatctccatcatcagggccaagttttatcagtcctgtattatactgcaagcagcaagtgcaaaaattcgatcatgaggcttacctcgccagctacttctttcccgctggcagaccgagagaagccttctgggctcttcgagcgttgaacgtgagctttttgtctctcgcgctctcctcttttaggcaacgatgcttatgtttggactcttccgaaatacgttgtgcgcagatggaactggcaacaattcctgagacggtatcaaatgtagcgataggtcagatcaggatgcagttctggcgggacgtcattagggatatttccaacgtctgttcttgttcttcctctcactctacttggtctttttttattcgaactgaccagagcgctcatattacctctcatctacagggcattccaccctcgagtcatcctatagcgaatgctctggccatgacatctgatcccaagactgtagacctaacagcctattacttgaatcaaatgcttgacgcccgtgtaggtgtcgttttccttcttctcttctcacatccattcctcatgcgcatacacacattgagtctgaccacgcaaaatcaaacctacaggaagaatctctcggctcaccaccgtatcccactctgacccaactccttgtccatctatctcaaactcaaacaccgatgacactcctaagcctgtctctagtcactccaaatccaacgcctacctcacaatcagcacttcaacacctctcgctctctaccggccttgcctctctattgctctctcttcccttccatgcgtcaaaccggaaattaccagcgatcccattagatatcgcctcgcgatgtggactcgttgctgaagagctgttcagaaaaggtcacgaagccaaagggttggatgacgcagtgttcgaggttgcttgcagggcgagggatgagttagaaacagccaaactggattggaaagacaaggggaaaattccaaaggctgaattacccgtctatctatctgctgtccgtatccttccttgggccatgtttattctct

SEQ ID NO: 2547 - DNA, 8428 bp, Xanthophyllomyces dendrorhous
acccaatttctgttgaagggggagagagtggaaaaaggtaaaacaagctccgttcatcagcttctctagcgataagtcactcaagccggtccgaaaggtattgagaggacaaactcttttgtgatcaggctcactagcaagagctgtccaacataaatccacagaaagaatgtaaagaacgcgttgacggcgacgtcaaacgcaaatgcccattcaaccttggtatctgacggcgagaaatgtgctttaggcgatcgaagtaggtggtttgtcatgaacctggcaaggtagaaaaggaacataagttagtctgatgaactcttgcaaattcaaagagaggaaagaaacgcaccattgcacagtggctaccgctgctgacgatagaaggaaatctcgaaagaccataagaagtgcagtgttgagcgtttgaagaagggtgtatccatgtatgaccgaccatgctatcgccgccactaaagagacagaatgacacagcatcgtcagtcataatcataaatagtctaataagaagaacggtcagataaaaggcagcgtacaaactagacagccggaaataagaacgaccatcgctgggtcatcccttgcccattggttttttgtttgtttatctgttcgtcgtagatggccaggttgtgagctatatgtttcatccgacaatcattttgggtgggttgagaacacgaatacaagtagacgaacggtagtatacgttccggtatctgttcatgcaaagagacaagccgtcagcgttggtattctggtggccttgctagaatgatagactattcccaggagtgcttgcaaaaagctctgtatcggtttgtgtgtccttccctctctcagatggtactacttcaacgatatttatagatcaaagacaacccgtcttctttgctgatccaacatgtatgcaacggatcagacaagcgatgtcccgtccaaggtcgggatctgacgtacacacaactgagactctcgcatgcgctgcttctaacaactttgcctccgacaggagagacaaacggccaaggaaatgaagctttcagaaaatattggagattggacactcacactcttctcggagccacacataaataagtcagattccagaatgccagctcgaaatccattcggccaaacttagccatctttctgatctttgaccaggtgagcaccgagggagacctaataaaattcgagccggaggaaggcgaagagttgtagcctcttattggagggttcgtcgaagatgatgagaacgatggagatggtgagttagaggagctgagagggtttgatgtcggaagaaggctgcccatgtttgctgaagagatgtttccggtaaaccgacggaagagctgaggggaggagctttggaacgaaatggtcggcgagtgcacctttggtgggattttgatggtatacctgtaattctttcctacaagtcttcctgcctgggtgcgtgtccggctgttaagatgcaagatccctaaaagaacagtgaagagaaagaggcagagggaaagatgaaagcagaaggaaggagatagaaaggagaagagaaacccgggatggttgagtgtgtggcgttcagcgcacacgtgttaaatgctgtgccagcggctcttcatatcaaccttgacttcttctttgctttcttgctctcttattacctggcaaacgaacatttgaagtgagctcctctttctttcctcgttcaactcccactaccacgatcttcttgctcattgcgctcaccttctcagaccgtactttaattgcagacatatcagaatcatggtttcagcaaagtctcttctctccaagtttcctatgcgtccaccggacatgaccgtcgaccatctcgtagtcggaggaggtatgcatgattaatctcgccctacaatacctagctcaggctcattttcttgcatcttatttaggtgtcattggactggcgatatctgaggctttggtcaaacggtttcctcgaaagacgacctatcttgtggaacgcaaaaaagccgtcggtcaagagaccaggcgagtctctccatcttctacacatcgaactcgaccgactacttgctctcagacttacctttaattttgcttcgggtgatcgaccgattgtttttttttcctttacccagctctcggagtagcgaggtaattcatgctggtatatgtacgtacttctaccaatcagccgtgtatagatgtccatagatcaaggctagaacgatctatgtttctgtcttatccgacgaaattttagactacccaaagaactcgctcaaaacgcgattctgtactcgaggtagagatcttctctacgagcgttgtaaagctgattctattcctcacaagaagaccggcaaggtaaactccatttccttgagtgtacccttcgtttccggcctaaagcggctaacaattgagctcgccttatttgatcgaaatcgcgtctaaatatgatagctcgtagtggcagggaaaaataaacgtaatattctctatgtcggtgaattattctctcacacgcaagatccgctcgtcaacaccgagtcgttctatcttaccggagatgaagcgagagagatggagcctgcgttgtcacccgagttgatgtgcgctctgtattctcgtgagttgattggtttttgtcgtcttcgtttctgtgaaagatagccaaaatcaagttctgatgttctatatatcgctctcccactcagctctgacgggtatcgtcgacagccacagcctgatgagcagcatgcaatccaacatcgaatcatctcccaacggagagatcgttctcggaacccaagttctacgaatcgagccttcattcgacccgacaccttcgaacccaaacactggatacctcgtccaaatgcttacttctggttctacaacccccgacgtcatcctcgccaaatcactggtcctctccacgggtctctcgacgttccatctgcttaactctcttctgccttcagacattccacaaatcacacctcattacgccaaaggaagttacctgtcttactctggtaagggtgccgaaggaatcaatacgttgatctaccctgtccctgaacaagacatgacaggattgggcacgcatctgacgctggatctagacggtaaagttagattcgggccggatatagaatggatcggagagaacggggagtggaaagaggatatggacttttgggagaaacaactgggaccgagtgaagaacgaaaggaactcatgttccgagctatctcttcctatgttcgtttctatcatgctattccctcttttgtttttccaaaaagaaaaaaggaaacttaatagatcacatttgtcttcgcagctaccgaacgtcgaatattccggtctcaaaccagattatgcaggtataaggcccaacatcgtgggtcccggggagaccaacccggacttcaagatttatcactccatccctaagttacccaactttgtggggttggccaacatgtcttcgcctggtttgacttgtgcgtctgttatcccttatcctttcctcttgttctttctttccaatctcaggattgctcatctgttcgcgtttccacaaaacagcgagtcttgctataggagaagggatcgaacgattttttgccagagagatatacgcttcggaaccggaagcaatcgaaggtgaattaggaccagtggtaggaaacactaaggaggaatggtggggtgttgctgataacaaaccttggtggaaggtctggtgatactacttcttccttcttctttctgcttccttctgttttcgtggtttgtttctttctttagagttagaaattcgcaatttgttaggcgcaaacggacgaaaatgatacaatcttacatggggatatctacgtggagaggaggaatcgaggagaaaaagaaaggttccaaaatagcaaaagaaagaaaagatgatgaggactggatacacgtaaacaaagcaaagttttcactcaaacatccctctccacatctctccccctatctctcccttcagatcccttaaaactcttccaacttcactatcatccaaccctacacccagcgctattctcctgaaatcgtcgactacgttaacagatccaagccctgagccttggccaatagtcgaagaagccacgtcgagcgcatatgatgaagaaagcgaggtcaggatggatagatattcggatgatgtcagtcgggtttttgaaggtgggagggaagttagagaactgaggattaaagaatggttgtattttaactgtggattaagcataacaaaatttagaaaagattcagcttgcgctcaagtctcctgtagtgaataagacaacgaagcacagatcaagaaaacgaactcttccccattcaatctctcctactcccaaccgtctcgtacatctaacgacagcggccaacatgactttttcaaacagcgagcaattcctaacgaattgcgccgtcggatttttggacatttctgccaacaccgcagagatctgtttaatccgaactggtttgggtagttgttttgaaggttgtacagggatcgctagttcaaccgctcgtctgttcatcaaagaagttcaggcgcatagtcaatttctatcagacgtgcccatgcttattgggaggctgtctcagaagggagaactgacctgcaaacgtcaagcattcttcttgcatcacctgtaacacccgtcgtttttgcagccgccaggatcaacgcttccttctcgatgacctgatgatccagctccttggctttcttccgaatctccaagtcaggatgaggaatcattcgagattgtacaatctcgaccaattggtctcttgtatatggcgggaaattgatacgttccattccttttgattcgcgccaatgcgtactcgccagccggttagtgaaaatcctcaaaacgacggatgagacgagaggttcctctgatgagaacttacccattcgactcttgactcgaccagctagtttttccggcatatccatcgtgttagctactgcgatcacgactagttgagagccaggcattgtcggccaattgaaaaagttgtaaacaacgtcttgcttgtttgtaaacatctgatccagctcgtccatcaacaccacgctagagaccccaaagcaacccagctgtgtcagaaagacgtacgacataatttttgtgaatagtgacaaggagagaacgcactaggtacaccgtccaggaccgatcatcgttcgcttgttgcccccaaagtaaccctcaagtcctttgagcgctgctttacctgagacctgtctctgaggtatcgaaccctcatcttcattgtcatcgtcactatctcttgctctctctttgactgcggcccccgttgcggcacctcggagagcattccagagcacaacgtatgcatgctctgggtctggaatcttcagaccgttgatctcaacatattcgaatggtaaaagctcctgtcgattcacaaatttgaggcaaaccaaatggcgatgagaaagatccaaacctatgtatgatctagaaagaagactgggaatgacgagaacttaccccgtcaagcgatttctgacgaagttctcgaataactgcgtgaacagtggcagtttttccggttcctggctgacccgagatatctgtccaagataagtttggtaactatgtaagaaatccaagttgatcctttcggtggtggcaaaaaatgaggagacaaacagatacatccaccaccgccaccatctatgacaccctcaatcttgacttgaacctcagcgtactgctcttctctgcatggtaaactttctggggttgcccctacatggagtagatgtagcgcacgcttgtatggatctgcgggaagcatcagctttttagaaaggaacatagtgatccaagcaagataatgtacatttagtctgtgcgtgtttgtgttaagtagaaaaagaaagagctcacttcatttggaaggtccatcaacggtcttgatttgacacctgcccttcttcgcgccaccacgatcgccatctttttcttcctctccgtcgccttctttgtcgcctccgccgtggttttagaagatgctgctttctcgttggccttgtctgaaatcttttttccggctgcagctcctcgctttcgcttttgcccggctacttcattgctttcaccttcagttgctgaaacctcctccgcatccttctcctcctcttcctcgacaacgatgacatcactggcctcttcgtcttccgatagaacgctaggctcagaggctggttcatccaatcgaggtttcttgttagtccgagataatgggggtgtggttatggaagccgacgctttttgaggagtcgaatccgtggtgtttgctactattactgctgtactcttgagcgtagcgctggaaacagaatttgtagtaggagctactctaggctttgtgggtgtagccgggggtaaggcttttttcttttggatggacgatgagaaagcaacagagaagggcggacaagaagtcagcgctctatgatacatcagcagaagagggagcaggggattataaacaaacgattggaccaggtctcttggcgacccatctttctaactcgcccattccttcaattgcctcctttctaaaaacctcccatccagggtgcccaacgtcttcaaatgaccatacatttcccgtctttgaatccgctatcgatctacaccaccatgacctactttccctcttactaaacgaaactactagcttctctatttctttcgtgttttcatgattgatctggtcagagacaacaactttgtcgagtatgatctctctggaacatcttcggacttcgtcatccggatttaccgccgaggcccagtataactcggtggcattggcttctgaatcgtacgctgggctcttcttcaaggaagtctgaactgtccatgggagttctttgaacctgaggaaccatttgatgtctacccatcccgatgagtaagcctctagctctctatctacaaggctttccttctctatatccataggtcctcttgagtctgatcgaggcaggaactccccaatttgaacgataacgcctacagacgagatttttggattgatggtctcgatgaacaccgtatcccctacacgataatctacatctacattgggttttgcaggctgtttcttcttggtagtaactttattgcctaggggagtgaccgaccgagtaaatccagaatacaggatcgttcgattatcaggaaacgtcgaggaaggcaatggatcaagccaggtatattctggacgatcctctgcggttttccttgtagatattcgtttgggcgatgaaggcgcaggtgaaaacaatggtaaaagacttctttgttcccttcttctaggtgtcgccatggttcctgtgtcgttcgagagggtgttgtgggtgatgctcctcgtgtggtatgccaacagaacgacgagcgatcaagagatctccaggggtcaagacgcgttgatcaaacgcgtaaccacaagaaaagcatacgcgctacgcgttaagagacgcgtctcggaggcgatggttacagattgggtaactctctgacccggacagattcggttgaggatgatcagtttctgaagcctcatgagatctattgaatgagacctcttagaatgagagcagacgtcgttctcagtaggctgtcgtcattcacactctgaatcgtaaagagttgcaccttagagttgttgtagtcgcagcagcagcagcagaagaggcaagacagtaactcatcatcaacctgatggtatatacagtcgatacaaacatctcatacaacgaaagaagaggaagataacaacaaagacagagaggtttacaactgttcgacaatctagtggaagttctggacgtgggactcgtctcgacttgaagaatggaaatcaaatatggacaaattatgagttcatcgagcacaagaaacgaacaaagattcaacagagagacatacccggctaggaacttatccataaaggtttgcggggaagctgttagaaggaaagtttagtagtacctaattagcaagaagatcgatagaatagaatggaaaagaaagatcggaatgtttgtttctatgaacgatcgtaccattgtcctacaacgcaaacaagaagaaacaaccgttatatgagaagcagtttttgagaaagatgctagcaggatatgattcaactaacctcttgctccttgaaccaagccaagacgtgaggctgataagcgattgaaagaaggtcgtgatcgaagtttcgtcatacgaaatttgtgagttcatatactgaatactgttgtttatatttccc

SEQ ID NO: 2548 - DNA, 24201 bp, Xanthophyllomyces dendrorhous
tatttcccaacttgaaaaaatgaccacatactgtttgcttccaaatgttcaacgtctcctggtactcctgtctgcccttcagaagcaagatgtcaatcactcggacgtcggtcacgtgcttgtgcttagagaactgttctcggatcttcgttcggaagtcgtacacagagagatcaagttggtagacctgaacaacctctggggccttgatgtggagatatgatgggtatatcatttcgatgggtacatcaattaattgatcagtttaaacaccatacaaggcggttgtaattttatgcaagtcctggaaagatgagaaagagatacgacataggagaaggcccaataaagaaagacaatgtatggatggacacgaaccgctctgtaccaatccctataaagaactctagctcgagaggcagcgtccttcaagtcggctgactgtcgggtcatcactgcaagtcgggccggaatggtcgtcatcgtagtttcttctgattgagtggttcttagctatgttgtcaagactatcggaggacagaactatggtcagcagatatctatacaagagacgaaggatgagatgaaagcagcatatcgcataagatatatgtgtactcaccgactgatggatgatggatggtgtttaaccctgactactgatgagaagttcaagaagcgaatgagatcaaatgcgatgagaacgctgttagggttagagaagattacgtaattagtaaccaattctcccaaggagtaacccaacaacttggtgaacaacattccgttctctttctacctttagtacttacccatcgtccttgctcccgtctttcgttctctctttgtcatactcaatcccaccgaaggacctctcctgtctgctacaacatcatcgaaggtgtagttgagcgatgaatgtaagtggagtttcttcagttgaatactaggcgctccgaagctggtcttactgcctgcgtgccatctttcgttcgaccatagactaatcataaaacaccttctttttttctccttattcttcacttttctctgtactgctttccgtttgttgaaacacactgcattcgatgaattaatccagaacgacagatctcgaccgagcacatcttctcgtcaaccgacgtcagtctctaggcaaagctacgaagactactctaagccttcgactgagattcccaatcgaagaagaccggatgtttcccggaaactcgtcgttgtaggagatggtggttgcggaaagacttgtctgctgaccgtgtaagcgtctctatctactctctgtcatgttactcatcgattcttcgtttgtatagatgaatttaatatcgtttgcctcaagaagagccattatctgactttttcttgtgtttgtgtttgataccttttcttcaaatgcgctaaatatctctatccatcagatatgcccacgaccggtttccagttgttagtagatttcctcacatcccagtgatagaactctgtctttgttcagtctgtttgctcactacgatctacccgggattcgaatagaactacgttccgacggtgttcgaaaactttgtgactcaagttcaatatgaatctaaagtggttgaactcgctctttgggatacggctggacaagaagatttcgataggcttcgaccactcagctataacgatacagacgttgtattgattgtctttgcatgcaatcatcgacctagtttggaaaatgttaaagacaaggttcgttacatcatcttgacgcttattcccttgtctaggttttgttccaatcagagaagctccaagaaagaaaggctaactagagtatgctctgtgaatgcttttacaaagtggcaccccgagatatcacacttccttgagaacactcccctccttctcgtctgcgccaagatcgacctgcgcacagacccacagaccttagccttgatggccgcccaaggaacacaacccatatctcgagtagaaggtgaagctgttgctagagagattggcggaaaatactttgagtgttcgagcaagaccggcgtaggcgtcaaacaggttttcgaaggcgcgctcaaggagagtttgaagggaaagttctcatttggtatcggaagcggggggagtggaggaggaggaagtggaggtggaaatggaggaagaggaaagagaaagaagggttgcgtggtgctttgaatagtatccttcgtacatgcaatttcttgttcttgtccttgctttcccctctcttgttttctcttgggattgtgctgtccgactattcagttttccttgcttcagttctcctgtataccctttcctgactagacgcttctagggcttcccttccttcttttgacttgttgtccgacttcatgacctactgctccattttcttattgctaaattttttttttcttttacttctacgaaacgcgtttccttcactctctttttctccgctatctccggtctttacagctttttgttcaacattcctttcttcttctctctaatcttgcttctttccatgtctgataccctcttctcttcttccaaacacccggtcttaaagttacttccttcttttttttttctttcgttcttttcgttgggtttcttccttcttttagttagatttcaacgagtatactcatgactgaagtctcatgtccgagccttcctgcatgccttctgcgcgacccagatcacctcacatagtcctattaccatacgacaacagctgtaatcatgtctgtatattgtacagaagaaaacggtatatgtaaacgtgagaggtatccttgctgtcgtccccttctgaagggatacatccggacgggttgaaagatacttagaaacgtgaacagtgtgttctgctagttaatcacggtcgttgacctcgcgcatgattctgtaggatctgctagcttcgtccaagggtaaacggcgctggggtaacctcctgatacctgtgcctggatatcctaggtgattctccgaggatcacacgcagaaagcgtagatgaactgtttgataagctagatacaatcctcaagttatgagaaacttatcgatcaacaagatcttcttgttcaaatccatcctttgttcgcggattagcgccccaagtccgtcccattcgatctctctaaatgggcgaaatcccaagacggtcgatccttctttcagtgcgctccggttcgatatattcttagggaccgcgttttcctgagccgtctcgtccaagatcacccatcttatttgatcctcggtagactcagccaagatagaggtggacatgcaggtctctaggatcatccgacgtggagagagggaactagggatcacgcgtcgaacggtcagattgatatcaggcttgagaggagaagatgtgttcgataaggtggttttgtgaagtgctgtgtagaattttgataacgaggtttgatgggatgacaagagaagcgatgcattcgaaaagagaaggccgtgactaaggtttaaacatgaattcgatgcattgtcaggatggcaacaaaagagaataacagatcataaagactaacgcgatttttcctttagtcgggctcttgcccaggaggacatctcgaacactgagttcctttgaaccagcctgatcagccaacagaccaggtcccatcaatccgctcatcaaacttcgacttccgacctgatcttgagttgatcgtcgctttgatttatgatgggccaagctgaatggcgatgagtttatctcaggagttatgttggatgatgtctcgacgaacccggtcgatgggtttgttaacgagacatgcgcagaaggagacgggtgggtgaataacgactgcttatttctcgatcgggaagaagccgacaagaacgagggtggaaccactcgggagggagtagtcagtctttctgatccagaaggactccctaagagagaacttattctaggcttcttccttctgggccgatcgtcacccttcaaaggcgacgaaaccaacgagagagctataggaagaggcctactcaatttggaaggggtaggcttggcgtgtttggatgctagtggcgtcggaggcaagcgcgtgtcagacggccgggtagaggatgaagaagtggtcggggataactgggtggggacagcaagtgatggaaaagcccatcctttcttagatgactttgaatcaagcaaaggcttgggatcgatagtcaacgtcggggaacgaggagaagcctagaaggtggattgtagagcacgacaataatgagcatacatcagttcattcgatcgcacatgccatgagacctaacgaacaatgccttcggcatggttgacttgctcctggtcggatgtatccactgatcccatctgttccagatgctggaattgtattgagagggagctcactgaccggcgtggtcgtgtgggtcggtcggttggaaggatggatgatatgatcgacccagcaaacgagttcgacatcttccacctaaacctaaaccatcaatcatctcaatcctccactcctcactctctgctctctcggcattctctcgcctcatctctcttttaccagagaagcatttaatagacataatagcacgtcttccgcgcccatcttcttcctctatcgaacctttcttcagcagtgagagttcttctaatcaacccgaatggagtctggctcgctttcctcatttgacttagatgatgatggatgggaaggtcggtcgaactttcttcatatggactctcattttcgagcccatcatcctgaagggttaaaaactgacctgtttcagtactcatccttgtgcttggtttccggaatggtgttaaatcgataactctttctcaacagatatgcccatcattcgttccgagccgaatgctctgggtctagacgatgaagaccaaaagaagtcagtgtccttcttgttatctatgtatagtatagctcggtctcttcaatacggactgatctgactgcatccaacattctccatcttgtgatcatcccgatttatactgcctatgctgtaggtatcattatcgtgcacctgccataaaggacgattcggcggctatcattactggaaacgcggccggagcaacgctagaatacgacgatctaaccgttccggaaggacaatcatggagaggaaagatcgatcaagatgaaaaggactgtaagcacacagtctctcctactgccacggatgaacgtactgtccatccctactgttttgtcttaactgtctttcctctgtctttcatagatactcgtttacgactcgaagaagaccacgaggcggatgcagtgcatatgcgaacgcaatacttgtttgacgaggaacaagcgatgacacctttgtctcagatgaaggctactaagaatcttctttcggaagggcagcggatcgcttatgtcgggctctgcaagcttgcatgtgaagagatggtcaaggcacttcgggagattaccgaagccggctacacaaaaaagaaacttgccgaaatagcgaagggaaaaggaaaggaggtcaaggacgaagagagcacagaggcttgcaaggtgtgggctctgaagatcatggcgcgactatatcaccatatggaacttcagagagacggtaagatttcatctatctagttctaactctactttattgcgtgtgtatcgtcactgacgtatatgccggtctatcacaaacagaacaaaaaatgattgaatccctagcagcacatggtgttgaggccatggatcttgtcccgtctttaatgaccacccactctattccaaaccccgagtatgatcccaaccaggcagacgagcgcagaagacaacaagaacaagacgcggcagcatcagatatcgaagataccgacgagagctcaacacctcgaaagccttctctagactcatcccttcctaattctttagatccaacagacgaagagggtttcccaccggaaaaagtccccttacccgttcccaaatcttccgacatcctcaacaccccgcatgtccctcaatctagagcgtctttccaacgctcaactaataatccattcgagagcgaaggcgaccttacttcgggctttgaggatgacgatgtggatgtcccggtcgatcatcaggcaccaacatccaaacctaccgaagattcgtcgctcccgcctccaccgtacagtaaaagagagaaacctccggaccagactgacggtcttcctgacgagggaggagatatcgggtcgtacgaagacgaggtagagggcggatcgatgtctaaagagcatagaaggccatcctcttcatcgacagaagacgagaagaaagaaaaagtggacgaaacggaagaggcagagaaggcggataagaagaagatcgttggtacgacgacggctttggataagccggaagaagacgtcaccccagttctaccaggagttactacaacgttatctgcagcggatgagacagtggtgttggatattcggtggacaatcctgtatatccccttctcattaacatcgcaacatgtcctgggtgattgatactgaccgcttgtacaaatttcaaatcattgtattgtatctctcgtttgttggtcaatctcaacacagatgcgatctcttcctctgtctcatagccgactcagtgtatgatgctcggtctagagtcttactagagcgcgtggcctctaaactccaattgagcatcctagatgtcgtacggttcgagaagcgaatcacagattcccttgagattcaagaaggagttgaaagattggaacagcatgatgtgattgaatctcgaaagaaagacggacggaacaagcgatacgttgctataggtctggcgacgttaggttcgtcaattcttctatgcatttcctcgcttcatctagagtcttactttgcaatttcttcatccttaaataacgtctatcacaggaggaggacttgtgattggactttcagcaggtcttcttgcacctgttatcggcgctgcactaggaggagctctcacgaccgtcggaatcacaggaacatctagcttcttggccggagcaggaggagcagccgttatcactacaggtggggtgttaagtggtggtcggattgccagcaaaggaatggctagaagaacacaggttgtccgagtgtttgagctccgagctttgcataatcagaagagagtgaactgctggataactgttcctgggtaagtatctacacatcgacgctttagaatgaggcaaaatagtcgagtaaccaatggtgcactaacactcgatgcttatgaccgagcagattcatggactctaaagacgacgatgttcgactgcccttttccacaatagatcctatgatcggggatgtgttttcaactttctgggaaccagaaatgatggaggaaatgggaaacgctctgaaaattttgacgacagaggttcttactacagttgggcagacggtcttgcaggctacggtcatgacagccttgttgagcgctttacaatggcccttgagtaagtgttggcctttccctgtgcgccttccttcagtgaggactaacgcgacatatgttttctctctttagttctgacaaagctagcatacttgatcgacaagtaagtgtgcagtacatcgttctactctcagtcctttgcatttccatgcaaagtatctgagcaactgacgtactctgctattctactctagcccgtggtccaatgcactagatcgatcaaaggcagccggtttagtcttagcagatgctcttctccaacgtcacgtcggtgttcgaccggtctctctcattggattctctcttggtgctcgggccatcttctacgctctcgtagaattggccagagtcaaagcgttcggaatcgtccaggacgtttatcttttcggaaccactatcacagctaacaagaagacctggttgggcgtccgaagcgttgtcgcaggtcggcttgtgaacgggtatgcaaggaacgattggattctcgggtacttgttcagagctacagcggcaggcaacacagttgccggtcttcgcccagttgaggggattcctgggttagagaactttgatgtgacggataagatcgctggtcacctgtcgtaccggccaatgatgcctcttttgctacattcggtcgggttacccgtacgttttctcatatgctgaaatgtctcgctttcttgaaactaatgccaaatccgcgttccgatcgacatcaaaatcaactcaggtaactgccgactacttcgatgagcctgaagagccagagttcttggaagatcgtatagttggtaagttgcttccgatgcctgacttccgactcttgaaaagcgctttgatctcaacccaaatatgttctcccatctttgatagtcaacgaagccgaagaagaagccaagaaagcggctaagaagagttggttctctcgtaagaaaaacaagccttccacgcctataacctctcgaggtaatagttccgacttgcgtcgaacggtttccagctccggaggtcccgtacctgcatatgatgaagaggataccgacctaccatcccgcgaggagaatcagttaccttctatgataccttccgcttcctccactcaacccctcaatcttgaatccgataacgcctcctcgacttctctctcttcttctcagccgccccagctagcttccggcgctctctctccttcggtagcagattcggatgaatttcaatctcatcttccaccaagagcaggttttgatttccaggcgatctctaaagcgctaggcaaagatatcgacatagaaaaccttccatcctcaggcacctcgtccgctcaaccgacgcttccttctttgaactctcccttgacgcttcgacagccactcgaacgatcagaatcaacatccgccttcagatcaacgcctctgacgctcgcatcgagcacactatccgtatcgatggacaatctctcgatgcaaccctcttcgccgtcgatgtcaacggatgagcgctttacaggatggacaccgactgaggtccggcccgatcgactagcagatccatggtcatcctcatctccactgccatcatcgtcatcaacaacatcggcagcggcagcggtggtgggcaacccttttgtggatgacatacctatcaaggggctgtccccggaacaaactgaagaggcgagggatgtcggttggggcggatccagagaggaaagtttaggatcgaagagcgtattagagaatccttggaattgagaactctcattctttctagttcgctttcgcctgttctttcgctctttctttgtcattctcgttctctcctatatgtttctctcataggtatgttgctctgtgctcaccctcggatctccccctcccccctgacctcatcaacctgcattcataatgtattccctacacatactggccctgccgctttctttcttgatcaccatcgggaatacaataatatattcttctaccatgagttttctctaaatagagaatttttcccctcgttttctttagaggatccaatgcgatcacatcaagccttatacatagacgagctttcacgtccggagtaatgctgcattgattaaagaaaaataagaatcaagatggagtgaggaagagaaaaagagaaggggggaggggaaaaatctgaagtgctccatcttgactgagtatctcctcccccaaacagcagcagcagcagcagcagcaacaacaccaacgacgagagacgaacaacaaccataagcagacctatctagagaacattcataacgtatggaagggaaaaaaacatgtacgaggaagaggaaagaaatgaaaagaaggttgggagaccccttatgctctcttccttggaaacttgtttttctttttaaggagaagacgacgaaacaaacacatgcgcgcataagggtagacgaagcgagattcgaatgggagagatgaggatgaggttttatgatgacaagatatctcaagcggaggtgacatccaagatcactcctcgtcggactttaccccaacctgtgtgcgattgcgtgatcgaagcaaagagtcagcatataatggccctttccctcgacacagccgacacttcttgagagagtgtgtttgattagaaagaggagaacaaaccaatcaatcgccaatgcttatcgattcgcctactgagtgcaattttctcctccacgtcagtgcacaccgggctctggagcacaatcttggccatatctgccttgacagagaccactcgagctccagaggcggtagctccgatgttgaccaaaagaacttcacctgcgggcgtgaaagaaaagacgttagaaggcataaatatttattcgtgacatagacgaacagaagacaagagaaagagacagaaggacacaacgtacccttggtcaacttggcgaccttggtctgcttctcctttccttctgttcgaacacccaacaatcgcctcaacatgaagcctacaggcagaaaaggcaaagtcatctcgatcagctccaagttcatactaacagaacgagagcagagaaggatcaaggcacatacactgaacctccaactcggtgtagatatccattcccttgccaacgtcactcaacacgtgtccgaccaatcgatcggccctgcacatcgttgggtcaatcttggttcccacaccgatcaatcctccgggcacggcgaatcggagatcgttgtgctcagcaaagagagagacaaccttggaaacaatgggggtgcacttgaatcgaccatcctcctccttggtgatgaaaccgggtcggatctcaatctcttgttgaagctttgtaacgaaatcaagaggggtgaccgtaggtgagtttcgattaaacttgaccttgactttatcatatccaaaacctgactacttactctcagcacaccagtcaaaatcgatcctccagcaactccacccttcaactcgtctacctcagatccgggcttgttgacatcgaacgatcggatgatgatcattcgaggggacgaagtgaaatctctcggaggaatcgggatcttggtgcaaatgtactcgtttacggcatcgatgttgtacttgagctgggcagaaatggggatgatcggcgccttcttggccacagtagctacacgattcaagatccgaacaaaacattctcatcagcgcagaacatagagctctgggtaaaagtggaatggaagagaagcaacgaaccatcgacgaatttcctgatctcctccatctgctccttagcagcctgttctcgaataagatcgaccttgttctgaagaatgatgatgtgctcctgtcccataagctccaaagcggccagatgctctgacgtctgaggctgagggcaggattcgtttgcagcgaccaagagaagggctccgtccataacggccgctcctgttaacattgtagccatgagcacactagaatgagaatgagagtaagcgtttgaggaggtcagtttttttttcttgccctggatctaagatataatgggccctggaggcagaagaggaaatcggtgtacgcactcgtgaccggggcaatctatattgtgtttgttgattgaagaagcacgtcaggataggcgaatggtcgtcagtccatgtgcaagaccttacgtggaagtgatgcataggcgagaaaaagaaattccacgcttaccaacgaaagagacgtgtcgaagaaggttcatctttcccttgcatcctgggacctcacaagggggatggtcctccttcgaggaagggtatgacttgtagcagctgggtcgggggcaggattcgttatcgcacttgtagatctgtgtggtgttggagaggaaggtggaaggtgaagagacgtcaaggaggatgggcagatcagtattctcttctgctatctactctctttctcgcctgtcccttctcgtctttttataattgatcccaagtgaagccttccagatgacttctcctgacccgaatctatcataccattccagagagaaccggcccttgcacgcccaagaaccaatcctttctgtccttttcttcccacagaccgaaactcagtgtctgacaaaatgaagaaataagcgactgactttggcgttggcgtaacccaacttgatggtaatgtttctctcgagctcattcttgaatcgaacggtcaacactccagagatggccttgacgacggtagactttccgtgggcgacatgaccgatggtaccgatgttgactgaaacggacgggacgaacgaaaagagtacaagagattgagtacatcatcatctttttcacctcctgctttccttttcctcttctcctgtgcactgcctgtcttgtccgacatattgcaggctgatacggacgacaccggcagatcctggaccgtctttccgacagcacgccagacacgactgcaagagacaaagacaaagcgagaagaaagaaaagaaagaaagaaaggaaaaaaaaggaaaagaaaagaagaaaattaacaagaactcactagtagcctgtctggaaatgacctcgtgactgagaggacccaaagtggaaggatcaacatccggctgggcctgaagcgtggtagctgcgagggagtctgcgagagtgtctggcatggctggcaaggtagagtagagagaacgacgatggctcgatgggtgggatggagatagaagctggtgagtgcgtgcgtgtgtgggtggtagcaaaagtgagtagaagagagttacctaagtatatatttgaattcgaaagttacttatgtatttcatttattggctctcccaccaccaccatctactttttttctcttctttctcgtccatcccatcatcaagcaagagcgtgcagcgtcgatcgtttataatgccatctgtaggtgtctgtctgctacttgcgagtgtggagaagtgtagggctggcgtggatcttactctggctttggtttggaatcattcggttcactttcaacagagaaccgtcctcgtacgtatccttcccgtttgtcattcctcgtctctttgcgtatcctgcttgaactgattggactctgtggcttctctcttgctcgtcctctagtttgtcaccggcttccgacgtaagcagagatggtgccagcggcttcagtttcgatctcgtcctgacggtacattcttttctcttggtcaaccttctgataggtgatttgcgagctcgggatctcgcctatgagtttgaaatgtacgtcctatcctcgttttagaccgtgtgccaagcatgttctcattcagatctttcctcttgcttcaaacagttttggccgactggtccgatgcgatattcctgctcttcgaggccccaactcttctccgtgagtatctcgacctctgctggctttgtctttctctcctcttgagcggctctcgcctgtcttctacggtgtcgtcggtgaatgcttgctgtcgagtcttacggatggaaacaaaatacaatcgatagctcgaacgaacgttgaaacagtcggtcggaccaagtcacgatccgaacgaatgccggacgagcgaacttttcaaagagcgattcgtacctcctgtattcctctctacgagcgatcagagttccatcggtcgagcaaccgaacgagcggatagacccgagctcgaaccagtcctcgtcttttccctccatccaacatacgccatctccatctctggatcccggtcaacttggattgtcttgtctttagcacttttaccaaacggtcactaaccacctccatccgattgtcctcgccgaaccgatgcatatcctgcttttcgatagttatgccttcattgagttcagaagagaagaagccgccgaggatgcttactttgatatgtacgtcgacctcttgcgtctgactagatagcaaccatagccaacacctgtcttcttaccgaaacaccctcgtttgatcaacgtcataggcacggaaggatgattgatggccaaaagatctctgttcaggttggttcttgtctattcatctcactacgtctttccgacgagcgcgctttcttctttctttctcttggtcacaatactgatttagttttcttccgaaacgcacattctcagtgggccaaaaactcgccctcttcacagtggcgacatgaggagtctgaccggtccgtccaacaccgagctggccacaggcgggacgaccgacgaggcggttactctgaccgagacgatcgacggggaggctacccacctcgccgaaggtctcgatctagatcgcccggttacgaccgggatcgaaggaggtctccttcgccccgacgaaggtctcccagcccgagacgatccctgagcccgcctcctagaagggagcgagagaggagcatcggtggtgacgacagggaccagagagatgacgccgctccagaagacagagcgaaggagcgagatgtcgagagagagaggagtgtagacagagtcgagagggctacgcaggaggaggttgccatcaggagagagagggagacctctagggacgattaagctgccgactcttttgtccttcagcctgaagcggcagagatcaggaaagagtatatgtgataaacatgctgttctatatgctgtacaaacaacgcccatccaaccgttgtacccacgagaacacagataaagcagaacgaatcgaaaacagacggagcggggatgaagggagaacgctgtggctaccggctacttaaccgccggtgataacttctgagagatacccggtcaaacagttaaacttatattttcaatcccaacaaccatcagtcgtccatccatacgtcataaagaatcgtccattgagcaaacatcttccacaatatggccagtaacaacctagtccttcacttcctcaacgatagtcgagcagagaccattgtgtggctcgttgaggagttaggagtcgattatgagatcaagttctatcagcggagcggcagtttgttggccccaaaggagctcaagtacgtccgatgatagtgatggaccatttaatatgatctctcaagatcatatctcatcgagagaggccgaccatctaggggttggactgaagcgtagggtccaaaggaagcaagagacacaggctgacgccccttttatcacttctatccgtatcgttcccgtagaaatatccaccctttgggaaaagtatgactttgccttgttcttccctttcttcctttgcgtgcatcacaactcagaagctcactttctcttgttccccaaaccgcatttagtcccctgtgatcacccacgatggaaacactattgccgagtccggagcgatcattggttcgtctacgctctcttcttgccgtgttggaccgggtttccgataagattgcttgtcttgaccttgaaactttgcacccaactcgatgcttatagcttacctcctccgaacgttcgacacctcggaatctggacctaggttctcgacgttcaaggatgaaaagtcgagaatccagaatgattactttgagcactatgccgagggtagtttgatggttcgttggggcttttacgtccattttcataaggacctctactccgcatcctcctgaatctgaaaccctctccgtgtgaacgatgtttgtgttggttcgatgacaacagcccattctagtcaagtgagcgcctatctgtttgtgtcaccgtacggtctggcaaagagcgctgatggggtttcggtaaatattcccccccccctgtctgtgggtttcacctaaagcaaacttgtgttctcaaagttcccgcagatggcaccttggtacgttcgacctgtgatcgctggattcgccgaccaggtcagagcgagttggttggacaaacagctcgccactcatctccaaatggtatctttgcctttcatttttccttttttttttctttcttgtctattcaaggaaggaaatagctatcagattactgataagattgactcttgtcttctttccttcgttttatggatctgaccagatcgatggagaattgaagaaatcttcaaccggctggttctgcaactctgaagagcctactggtgccgactttgttcgttcgctctctatctcttgacttctctctttcttccctcccctctccgacacgtctgttgacgcgaaccgaggtgtacatgtgttccacacagtcaatgttcttcccgttgttcaaactcgcaaaaggccgtggaggagctctcgaagctcctgagagtatcaagacctgggtcgcgaaagccatggatcggtacgttttccatccatccattcgttcattcactcttcctgtactttgaatgagataactaacgggaaggaagacatcgtcgctggattgaccgtccaaccctcaaacgaacgaaccttgaaataaataaataaaacaaacaaacagaccagcaaacgtccgagctcatcagagaatcaaagacgctgaagaagctcaggctgtcgccaatcctagtgaatcttccaagctctgaacgattctttcggcccttttgtttcctgcttgttcctcctcttccacttaatttggccggttctattctctcgctctcgtcttttctcttgatcgatcgatcgatctgtttggcgaaccaacgaaacggatgacgattgaacaaaagaaacatcgtgatctaagccaaggaatatagaaaagaaaacacagatgatggagtgttgaatatgagaaagacagattttcttttgaaaatcgtgttgccgttcagaaacaaacaagcaagaaaaggaaaaagggtttgagaaacgaaacgagcggtaaaagccatacaaagaaacgagaaaagggagggggatagcaaggatcacgatttgacagatgtatagatacaaagggggtgaaacaagaacctccttccaacatttaatcgacccgcttgtcagacccaacaccggctccaacgccaactgcaccttgtcgatcaaactcggtggcctggttggaagcctgagacttgagcgtggctgtatatccaccgaatgccgatgaatgttccggcaaatcagcatctagactaacgagaaggatgccctaaccggtctgacaaacaaagaacgaaccgagatcctgatctttcctagccaaagcgccctcgagctcgaccacctgcttctcgagttgctcgatctcacccttcgtcctggacccagcggccgctcctttcttgagccttccaagctcctcggtagtgtcgatcaactcgagagcgatcgagaatgctctggcgaggagaagggcgaggccgagggttcctccggtcaagtacatgtttcgctgggcgtagaactgtaagtttcgagagacggaagaagagtcagatcctgtctgcctcatcatccggatgggatttcccttattctcttttgctctctttatatagctccgagatgacagacatcaaggggagaacatgaaggatcacataccttacggctgtggatggcttcttcacttcgaaggtccgtcgttcctccagcctggttagcctggtccttggaggccactcggaccaatcgctggacggcatcgataaagagaagggtgacaaagatgaaagcgatcttgagggcgtattggatcttggcgacctgtcagatttccgacccgatgcgcccgaggcgaagacccatccggtttcgaggtgagatagaagtgacacgaactgtcagtagaccgtcatgactatcaactatagacaaaaggaaggagggaatataaaaagagacagaaggcgaagaaagatccttacgatagggttgacattcaagaacgtcaagatctgtctcctcatcgcgtgaggccaaggcccgagcatcaccacaccaagagcgatctctccggccaagagaaggaaacaaactggatacgatcgtccaggcagacaaagtgtgagcctgtagtgcagatgagtctgggaacgttaagatacgaagaaaggaacgaacgagagtagtagagctaaggcaaaggaaagatgggaacaagagggcaagggaaaacagagagatcttagttctgacgtggtccatcttttgtcaagagatctcgaaacagccacgtcctgtcactcacagccatattgttagtataaagttggtatcgaccgagatgttcacgctgtacacgtcgttgtcgttgtcgttgtcgttgtcgttgtcgttgtcgttgtcgttgtcgttgtcgttgtcgttgttattattgtcgtcgtcgtcgtcggcggtagaaggatgggaagaaggaggaaggaaaagaagagaaagaataaaagagaaaaaatccggctggcgattttcacgcagtcgtcagcaagactcgatacgtcatcggtcggtgtgggcgtgtgagcgtgtgtctgtttgtgcgcactcccgacttgtttctcgctcctctctgttttcgtgttgggtcggagaggaatcatgtacaaggttgatggaatgtatatagaatgaataaagcaaagaggataggaaaaaaagagaagaaaaaaaaagagtagcattccctttacacaagttcaaccggggtattctttccttccgacctcgtctttctctttttgatgaacgacactgtttcacggaaaagaagtggatagatagaatctcagataatggtcagcaggaaaagaaaagaactcgagagcgcaaagcgaacgacaactacagaataaagaaaggtttcagttaccttctcgagagatctgggtattctgcacccatcctggagggaacaacttgttcatctaagatttgtcgtcacagaagaaagagagagaaaaagatcatcagaacttccatcacacaacatttttcgaaagtgtggcagaacgactgacatcggcatacaacgccctgttgagcggcaggaggtgtttttcctgcccaccctcgtacctagccttttcattcgcgagcgtcagcgtgtcggacgtgacgtccatcagctgggtgagcaggtccttcatccgctcgttgaacctaaacttcctggacggcggtttgtcctctaccggctgtctagaaggaggcgtgcccggcggggggagcgggatcgtcgagtggtttggtgtatagcccgtgggggtatgtgcgcccgtggttgtggccggaggagcagaatccggcggaagaggaccgagcgaacgagaattgggcgaaccaggatccacactggccgatactgacgaagcctgggcgtggtgaccgggagaatccatgatgagcgttgactttgttgtttgatccgaattaattttttccggagaaaggagagaaagttccgaagaagaaaagaaggcgtcagctctggtttgatatattcagttgtatcaaagtgttcatgttgagacagaactcaccggtgtgcccggcctaatctctgagccctctccactttccttgtccacctgtttctttttctgagtctcctctatcagaagagacagaatgcgaacacgaaaaggaaaggttagctgaaaggtccggagaagaaaagggcaatagaacgatgaacgcggacttgccccactgctgcaacgaccgttcgtatttctcaaacacatcttccttgacccggttgatctcgttcgcgaactcttcgagtagatccctccgtttgatttgaagtaggccgtcatgaaactcgtagatttcccgcttgatgagtttctaaagatggggaggagccggtcgacaaatagacaccatcagactcgtaaccagaggaaggctcgagagagagagagagagaggagaagtctcccgggcaacgcaaaagaagcaaagcacttacagtcatagtaaacttgttgtaaggaaagatcgtcggcatgagttcaaacagggactcgccatagaatccggtgagcaacgcggtctttgcgacgtccagcaggaccggcttgagcttcggcgggaactttgctttgttcgtccagttttccttcttgacctgcttcttgagttcgtccagcttttccctcaacgccggcgatggcgtcggtttcacaatctcaatctcgtccgacttgtcaacgtcgaaaggcgcggatgccgagccggtgcctgtcacgaccgagaccgggcctgcccccaccttggagggtttaccttgtagagaagctgtagcagcagcggcagcagaagaagaagagtgatcgttctcggccgaaacgataagaggatcgttcggatcaggaccggaaccagacggagctacaacagatgagaagggcaaggacgattcggtcgaaggaggaataggcttcatttggcccccgaccgagccggtatttgcgttcgcattcagcgtcgagtttgcacttgtgctcgcaccggggacagcactattcgaaacggccgagggagcaatagtcgagctaggtctcgactttggtttcggtctcggttgaaggatgttttcttccgtcggtcgaccgtccagttttggctttttcgctttcgaaggctgactgacggccggatcggctggtccggatgaggacacagacgaggacgacagtgccggggcggaggccgaatgagctagtagagtgtgtgaagcggaggtggaaacgggggcaggcgaagggacggaagcaggtgtagaaagaggtataggcagtgtggcatttgccgataccacgcttgccgccttctttgctggctttggcttggtggaagggatgagagtgataggatttcttttgaacgcggagaaagaaaccatagaagaagaaggaaacgaagaggaaggaaaaagagtcaatgaatactggacacgtgtgggaaagaagagagaagaaaaaaagaatgcgaaaagagagagaaagaaagcacaaacttttcttcgccctggaggacgacgtctcctctacagacgtaaaagccgggtttagcaggaatgcctgaaaaatgaggttcgtcgatcccttgagtagaatcgtctacgaacgcgtccgtgatgtcgtattcgttgtctttgcttttctttttctggacagatacaaagaggccaggcgagccagatgcgcgcaaggaagagataaacaggaggggaaaaaggaaaagaaagattaataagtgaccgttctgtctatcagtgccagcagagaagagagggaaaagacgagagaaagaaaaagcgaagagaaagaacacgaacgatcgagacggcagacgtctttttgttgccatacctcttctcgagttcccgggcgagacgttcttcctccgtcccgccttcctcatcatcgttgccgtcttcatcttcttcttcttcttctgcccagagaccgccgagcatgcctctgagcgaaaagttttccatcgtatcctcgtcgtaaaactccatttcgtaggctctgtcgtacagactgaactcggaggccggcccgtcgagggtgtgttccagtcgaagggtgatatctggcttgacgggcgccggtggaggtgagggcgagggtgtgcgctttcgttttcgtttgcttgccacaacggccacaggagcggtattggtagcaacggcggtggcggagacagggccagaagccgagtcagagtctgtgtttacgatgggaggtgtggccaagccgagagtcagactagtgccagacagagtggccgagtttggtcgagcgattggtgtgccatcgtcgataggagaaagcaggaggccagacggagttggttcggaaggaagaccggccgatgtgaccgtcgagttggtagcgagcgcgatggatgagccgaggagtatcggagcggtcgcttgatgggtgtcgtctacgagagaaagtcctagccctatggttgctggagtgctaagtgccgaaggaaaaggggcgttgatggtggaaacagtgatattattagtagtattggtagcagaagcagcggcagctgacgacgacgaaagcctggccggccgaccttcgtcttcatcttcatcatcctcatcctcatcgtcctcttcgtcctcatcatcgtcgtcatcgtcaacatcatcagacatgttgacatcgtcgttgagctcgatagagagatccttgcccttgcgttcgaggtggctgtttccgttctgatgaaagaacgcgaggtctggcttgatgtcttcggtgaggaaagcttcgaactcgggtcgttcgatcacaacagagatctcttcgtcctcgctttcgtcctcgctctccccagaggtggtgtcttctaggtcgatgacctccttgtcgccctcttgaagcattcggagcggtctctttggcggtggcccaaggtgctgatttgatttgtaggttggcatgggttgagtattatttgttgatatcattgatgatgttgttgttgtcgtcgcatttgtcgttgacgatgatgccactggtgttgctgtcaaggaggtcatcgttggtgctgaagagagggtcagacggtgagaggttggttggtgagaggttgatggatggtgtgcgtagagcgagtgttgcgagtaagtgagttgtgatctgtgattgggagaggagccatccgtttggctgaagggtgagccagatggagggaataagtttgagtgttgtgattgtggatattgatgttgatgggtcggaggaaagagtgattctgacggacgccaggttgaatgagtgagcggtgaggacgaatggaagggcggtgtgttgatgtgttctgggatgtcgtttggctggatgatataatgttgctgaggctgatgctgatgatggtgctgaggctggtgctgctggtgatgatcagtgctagtgctgagattgccgttggtgaaggaagccgctcttccgaatggtttgttgatcaacctatcgagcgaggacggaacgacggcgacgtcggcgtcgatgctggccttggtagaagcaaagccgggactgatatcgtttgacgaacgccgagggacggacgagctgaacgaacgggaccgatcaaacgtcgagagcgatccagccgagtgggatgaaccggtggttgatggtcgacgcgtcctgtttgggttcacgcctgttgttgcggtggtggtggtggtgtctgtgagagctgtaggtgggagcatcccgggagaacgtactatagagaaagagcaagcggtgggtgtgggtattcacgtcctgtcgtccacctgaggacctctgtaatgaagcttccttgatgtctttgattgatgtctttctcttctctgcctttctcctcgttggaatggagagaaggtgaacggatggaagagaaggcaagcgagatttgattaggatggcggtgtattgagttgtagtgatgagttgtagtaatttgtattgtatcagactgtagtgagttgtattgtattgtgttagactgtgttgtagtgtactgtactgtagtgtgttctactgtaccgtgcgaggacgttctgattgtgcacaccaacacaccaactcaacccgctcgggtgtgcttgtatcgcatcttgactgagccttctcccccgctctctgtcgccatgtcaagttgaacaagtgcataaaatttcaaatagcacacatagtaccccaggctcaaattcgcccatctctttcaaaccccacgcacatccccgtccacaacgtccccttcccttcgtttcctcccccactcctcgcacaaccttcctcccatacacacacccacttgcacttaggcatcggtgctcatcgccaacacaggagcagaggtctgtcctcgagttccctgaccagcaacagagtcgttatcgatcgtctgttgatgaaccccacaaaggtttcccaaaagagaaataatcatctctcagcgtcctggtttcaaaacaccaaaagaaagaaaagaaaaaggatgggagatgtgcaacatgcttgtacgcgagcgcgcgcgcacacccacacctctactcactctaggtttactcgatccgctctcatccttcttctcacccgcaaccttctccgctcgctccgagtttctgtccccaggtcggtttccaccctttcctccccgtcctccacctcgaccaccccgagcgccaccccgac

SEQ ID NO: 2549 - DNA, 2005 bp, Xanthophyllomyces dendrorhous
ccaccccgaccaccccgtccggagccaccgcttcgactgctactgctcgttcccgcctgggtcaccgcctcgagagccttctttccctggaagtttgctcgagagacgtaatgcgcccggagatcgtctccctcaaggaacgaccactggatcttttgaccacccaccacaatatccctcgcctggagcgcggccagactctcaggagtgaatgcctcggcagagttctcgaacgcacctccggtcgttcccttggggaacgagatgaaaggtgaggtgaatccagcggtgaccaagtcggcctagagtggacccagagtagaatccagacgtatatgcgtgtacggtcagtcgctagacagcaaaggacaagaggaagaaagaaagaaaaacggaaagatcctcaccttcaaaactcgccaatcgccgtccggtccggctccggagaaagagaggacgtgtcctgtcgggggaacgagagcgctcggctcggccaagtttccctccgagttgaccttgagcttttgtcccaagtactcgatttccagatcctgtaccgtcaatgtgtgtttttgtttcatatccagtcaagatccttttgtcagtcacattaccgttgttaccacagacataaccacaaccaccatcacaaacaaatgaaaacccacctcgatcttcttggctcgcttcctctcctcctcctctcgctgctccttgttgtcctctcgctttcgcttcgagccgccggaaccagtgtccatcaacttgaacgcgttgaactttccttttggcatggttgacgaggcgctcgatcccctctggatagagttggggtcaatgttcttttccttcatcttcatctggacgtaagcatccctgagtaaccgtcaaacacaatcccgaataccgtcagacacgttcactttgaaaacagaagacacgtcccacaagcatacacacactcactttgtcatcgcagagatctcggcaccctggaacgtaggtttcggctccaacgcgaggaacttttcgacagactccatctctgcaaactcggtgaagaccgagttcttgaacaccttgtcgtctccctttcgcattcggacgacgttgaccttgccaaactggttgaaccactcctcaagctcgagctgcagcgaaggcgactccgcagggaaacctttctagtatgcccaagaagacgaagaagaaaaaagagaggaaaagacaacacgatcagtctgatgtccattcgtgaagagcaaaagaaatggtggaggaactcacagcatagacacttcgagcgaaagcatcggtaggaggcttcaactctctggttcgcctgaccttcttgccgtcctggtcgacggcgagcaactcttcactccttcggagagcctcgaccacccagggaagtcctttggcgaggtactccttcattcgagagaacgaagcgacggtcgcgatatcaacccagccctggtggaggggatctcgctgggtagccgtccagaggaatttgtcgtagggaaggttggaatcgttgaagtagaactcgactagagagagagggacggaggacgtgatgaagtggtttccagaagagcgtatcaccgatcaatcaaacgtgcacgttgtttccagacaagcaagtacaaacacaaagcatcacagcgatcagcctcgaagaacgctcctgaatccttctcctccttcccttgacacgcccgacaagaagagaacgtaccctgagccaaacacttcttagcaagctcttcgtcctccggaagaatcacagacgtagtctcagcagcgacggccggggtctcgacttgcatcttagcctcagtagaagcgacaacaggagcggattcttcagccatgattctgatacaaaactaggacagaaagaagatagagagcgatcgatgggggtttgtatggatcgaatgagaaaccaaacaagagttagaaccaacaactcaaaaaagaaaaaaaaaaaaaa

SEQ ID NO: 2550 - DNA, 2274 bp, Xanthophyllomyces dendrorhous
aaaaaaaaaaaaaaaagagtcaaaaatttaggaaaactccgaattatctttatgcgtttccaaaggtttctctcccggtttgtctcgataatctccttcgcctttggtcaacttcccccccccccggcagtaagtctggtctcattcagtcaacggttgtatcctcaacagatccgtaaacacatacttatacattcactcgcagtatgtctcgtataaactctttcaagcggtcgtgggcaggagaagatacgcctcagactgcagatgtcgcaaaggataggatcagaccgtcaatgtacaggccaaccggtccaacgttggccgcgagctcgatatcgtcaacacctcctcacaggaccaagccatcgtcttcgatagagatcatcgagcttgacgacgacgatggagattcttcaaggcaagcatcgttcggttctttcatctcaacgaactcccgcttgtcctagcgctctcgatgatctcgtttctgtctgagttgtattgacctcgttcccttgcatacgattacatgtcatgtcgcacgacaggcaatcagcaccacctaaacaagccaactcgtcgttcacacgcccagcacccgcaacagacaccacagcaccggctccacctgcttactcacccaggacgcggcgtcggatcgctatcatgggcgaagcagccgctctaagcccatcatttaattcgaccttcaacttgccgaccaaacgaccggcctacgaaagtctcatcgacggctccacaggacaaaccaggttggtctttcttttctcttgtttctctgtccagcttccttctctacggagtcttcgcagagtgaacttgtcagaggaaactaacctagctcattcactgtcgtttcaagaaaacgaattgtctctgagaattcagtcgtcaaagcagtggtgaaacctgtcaagaagaaggctatcgttctatccaacgaacaaaaggccgtgcttgatatcgtggtcaaccaaggtcaaaacgtgttcttcacaggatctgcaggtgagttatctttgattcctttgtgtttcttccatgtcagtcgaacgtcgatattggtcttgctcgggaagaccgacgaggagaagaagaggagatatatgcgctatcgatgtggagtatatacgtcacccgcgcgacaccgttccttcttctttccctcgctcattcttaactgaccgtgtctccctttggtcttttcgacaggaaccggaaagtctgtacttttgcgagaaatcataaaaggacttcgaacaaagtacgcgaccagaccggacgcggtcgccgtgacggcagctacagggatcgcggcttgtaacgttggtgggacgacactccatagtttctctgggatcggccttggaaacgagccagccgataggctggtgagcaagattagaaagagtaaacccgcgtccggtcgatggaacagaacaaaggtgttgatcatcgacgagggtacgtcttctttctgacaaccatgggcaattagagataggcaacctgtggagctgacttttgagttccttacacgtagtatccatggtggacggtgatttgtttgataagttatccaagattggcactatgtatgttcacccaaacattttctttcagtggtcgcgcgatatcctttgaacatttcttatcattatacgtttgtaaaattcaggttgagacgcgaccaacgaccgtttggaggaatacaggtgtgtctgggttcaagttaattctcatatctgagcgataattaacgactttggtgtatatgtgtcctctctttctctttctcttctcctttctgtcttccttctctatcagattattatgactggtgatttctttcaggtacgttttcaagtaaggtatgactcgtttgttctatagttaactaacctagtgtaatggttcttttctatcctctctttcccttctcagttaccacctgtgtcccgggattcatccgccaagtttgcattcgaatcggccatgtggaaggagaccatccatcgaactgtcaatcttaccgaggtgagttgacgtttttccctctgccttttaatgcccccgtgcctctcttacgatcttctctatcggcctatcaggttttccgacaaaaagaccagcgtaagtactttgttcgcgtccggacaccggtaaaaaaaaaattaaaaaaaagagtcattgtgatcgctccgctcaatgttctttgtttgtcctcacacacacacacacacacacaca

SEQ ID NO: 2551 - DNA, 24014 bp, Xanthophyllomyces dendrorhous
cacacacacacacacacacacacacacatacgcgcaggctttgtcgacatgctgaacgagatgcgattcggtcaactctctaacgcatccattcaggagttccaggcattgtctcgagaggtcgtctatgccgatggaatcgaacctaccgagttgtgggtgttatacatacttcttccttcgtgttgacagcgctttcttcaaaaactgatgtttcgcgacccttttctctgcccgagatagatatccacgaagagaagatgtcgaggcggcaaacgcgaatcggctccggtcgttacaccaggataccatccgatttaccgccgaagattacgccggtcagactgggatggatcgggctcagctcaagaaagagttgagcaacatgctcgctgtggaggaactcaacctaaagatcggtgctcaggtgatgttgatcaagaacattgatgatgatttggtgaacggatctgtcggcaaggtcgttgggtttcataccgaagccgagtggggaatggtctcaagagaatacgagctagatggactgagtgggttttcttccagtgggtcttcctcggttgatccaaacacaggcgaggaaaaggtttggtcggcaggaggtaaaccgatgaaagagcaaacgttaagacaacaggaggccgcccagcagagtacgaggaaattcccggccatcaggttcgctctcgcctcgggtggataccgaaaccggttgatcatcgcggaaagtttcaagatcgatatgccggatggcacattgaaggcggagaggaagcaggtctgtctccttgtttccattctcatgacgctgactttgattgagcgagtcgctcatgatcatatcggttttgatttgttccaaacaggttcctttgatccgtaagcgtcccatagttatcatccgtaaacaacaacaagatcgaccaagactgatttctattgtttttattcgatacgtgggtcgaaatttagtcgcctgggctatgaggtcagtatattactcctatgtagaggctagaagtttgatcgtctcgctgaccgatgtgttgtgtatgtgtgcacatatatatttggttatgtagtatccataaatcacaaggtcaaagtgcgtagtcgtttgttttttctctctctcgcgcgcaaagcccactattggctgactagtctgtgttgtggtgcattgtttaaaaattctttccagctctcgagcgggtcaaggtcgatcttcgtcgggtattcgaaaaaggtcaagcgtacgtcgcgctaagtcgagcgacttcgatcgacgctctacaagtcttgtcgtttgattccaaaaaggcgagtcatagccttgttagggttctgtgtggtggtgtaaatcgtgtggagtagatcgtgtggtgtatttaccctcatttctatgcgtttgtcttttcatataggttatgtgtcatccaaaggtacgtttttccctttggtctcttttgctgcgtagttcttcatccggatgtaatcctgacgtgaatttttggatggatcggctttgagaaggttgccaagttccatacatcactcgagacgatctaaatcttcgaagtcagagtctcttgacttttttctctttctctctgttctccaaactagattctttccccttcatccgtccgcgcatcaattttgtaacaccaccgccaccatcatcatcatcatcatcatcatcatcatcaactatcatcctttttgcacagatctacaaagtttccttctatttctttcttttcttttccccctgatttccaattccttgaaacattgcttcctacatacatacaagtcgtagcctcttctttccctacctgactagtccaagatgatacccagctaggcagtgctctatacgacgacatacgtcatcctgacttttctttctccttgtactgcccgtttgtctgtctaggctggtcattttgacaatctttacactcgtgccgagatacacgagtaatgatggacaggtaaacaagacgacggtgacaatacgaagcaagctttgcgagtctgataaaccagagaggaccgtgccatcccgtgtgctttcggtcgttccgcacggacggagatgggcagacgagaggaaaagaccgtatgccgggagccgggaaggaggagacggcaacgcgggatgaagttgagggagatggcgggacggttgaaagagacggatctatctaaagatgtgaaaggagttgtattggagggttacgaaaatcaattaaagcgttgacgaatgtgaatgagaggcgagagagagagaggaagtttagtgtcggactgggtggccggttagaagagtaatagaacgtccggatcaaagagagatggttttttacaccgcaagcaaactaagtaggcgagcgcactaaggcaacatacaggcacaaacgcgcacagaacacccgtacacaaacatacacactccaacaaggcgaccgtgcaagccgcgcacagccacactcccacccggacgaaaataagtgacgcgactgatttttattttattttttctcactcgcctctcccggccctgatctgcttttgattttactcttgccgattgtcctctgcccctgaaggccgagactctctgtttgagggatgttccgacccagggcaaccttctccccctggaatgcctgcggggctcgttgggtgccctgatcgaatgcttcacgcgcgcagcaaaccttctttttcgccgtcaccttccaccttccacctgtcaccttctttctctttctctttctctttcgttcttctctaacaaccatctcgctgattcctttctttctcttttctttcttcatcccttttgccctgttaagtttgaacaggtttccaactcgacactcactcactctctttccaactatccacccttttcggtcactcactcgctaaccaacagaggacacaacccatccggttctccttttcttcgctctttcttacagctcttctccttgctttcctccctcaatagccactcactcgtccaccagctttcaacatgctctgcaaccttagccttcttgccgccggagcggccctcatctcgcctgtcatcgccgctcagcaaaacgctcgacacggcagaccggataagcgaagcaaagaacaccgaaacctcgccgccctcaagaacggaccaaagatctccaagcgagaaactttcagcggaacgttcacgttagttttcaagctctcgatctctttgggtacaaaccgcttcttggtcaactgacaaatgggattctgttttgtctttcgccttttgctttcgtctagctactacgattcttccgtatgtcgttgtttttttccgcctcttaaaatagagagaaactacgccggtgcccatcatgagaaatacgactaaccgcccccctttttctttctttcttgtccttctttccaatcaaggtcggactcggatcctgtggaaactacagcaagtcacctcgcttgctcgccaccgtttcttctcgcaccgcatagctgaccttgtctttcccttcatccattcaacctgcctcacttcagatggaccggacaccatggtgagtacaccaagcccatttctatccaactcgtcgacctcagaaactgatctctgatatgtattcccgttcgttcctcagacctttgccttgaacagtgcccaattggaggccgctggaggagggtaccccaactcgtgcgttctttttcacactcgttcttttccctttcctggccatcgtcactgaaatccattcctctatcagcctttgcggaaagaccgcgctcatcacctacggtggcgtgactgtgtccgccaccgttcaggatgagtgtacgttcgattttctatcatttcattgccatcaacacttgctgatcaaaaccatgccgtccgtctcatttgtacaggcccctcctgcagctggggatctcttgatcttacccagggtttgttcgagaagttcggctcaaccgatctcggagtcctctctggttcttgggtgtgggctgatgattccaccaccaccaccaccactacggctgaggctgagcctaccacgtcctcgacctacgttacacccacttctacctacgtcgagcctacttcgacctatgtggagcctacttctacttacgtcaagcctacttccacttccacctgggaggcctcgagcgaaactgtggctgctactgtcaacgctgccatcgccgctgccgagtattcgacttacgatcagcccagctccacttatgttgaacccagctccacctatgttgagcctacttccacctacgttgagcaggtctcttacaccgaagccgtgcctacgtccaccgatgccgcctggacggctgctccttccgccactggctcctcgtctgaggccggtttgaacgccaccgagctctgtggggcatacgatgagatcgccttgcttaacggtactactgtcctctacgatggaaccactgaggatttcttgaactcgaccgctgggcctctcaagaacactaccggtctcactaaccagaccgatgtctccgtctacgatgctaccactgatatctgctacaacgccacgatcacccctctgctctccttcccaggcttcaccatcgttgccagcaacttcgtcgccagcaacaacggtacctttgcttccgccgccaacgttaccaccgcgttcaaccgaacatcttccttgatctccaacaaattgtcttccaagctcgccgacttcgttctcgccgtcagcaacactaccctcccggccgcctcgaatgagacctccgttgccaacagtaccgagattgcagattacggtatgcttgatctcatcagggctctggttcagaacttggtcgacagcgaggttgcgtatgatgatcttcccgagtgcgaagattacgatgattccgaggataactaggccatctagttgaattctctcgtttaccgttgcttctttggaattgtttgcacacccttccctcgttgcatagcatatatctatatacccaattttcttcttttcttttcgtgcatccttttctttcttgctttctgcccaactcatagtagcatctctttcagcttacctttcttttcttcctattttctcttcgagttgaccattctagataccccgattctaacttgccgtcggcttgtccggccttgtctttcacacgtcgtatatacacagacatgtatagatatctcataacactctcttgcaggtatcttctattctgctctgtttttctttttcttttctcgttttctccttcctctgtcgacgcttgcagttggtagaaggaggagaaacgtgtagatgaccggtttatctacttctactatgatgtttctttccttgcctcgcattcttgttctttctttctcgtaacctcatcccttgtcgttctaggaaggatgatcaaacgtagaacaagagaagatcatcagagagaagaagaagaggaagagctcggagggtcgacaacgtctgagtcggggagtgtaagtttgggttttatcatcacccagtattgggcttcgtagatgtatcgaaagaggccgtccagggtacctgtgtaatccgagtcaactgtcgatttcattcggaatgttgaccaaggggagggggggttagaaaagaggatcagcgatgacgggccagaacgaggaaaataggcagacagagagagagagagagagagagagaaaagagaaggaggggaaacgaaccggatcgaaggtccagttgctcgaaccctatcatcctcgctaaatggaggacctcatctaacgaacattccatccgggctttaagaagaaggaaggcatccacggtttgtcagttttgttcagacggagggggaagggtcgatgtgtatgtgtagtttgtaagaatggaagcgctgaagagaggaatgaaactggatatcggaaacgtacgatttcctgcccataagagaggacctagttcacgatacccacagaagattgagtacccagtccgattcaaatcaatacgagggaaaatgagaacgagaggggtgagagtagaagaaaagagagaccttcgttgatccagtatccgcccggtttgagtgctctgtagatcgtttctaaatacccaactatatcctgagctgtatcgatgaagaataaggtctgtcggaggaagaagatgtaagaatgcaatcgtcaggactgcgagccatcgatcgagagatgagtgagcgagaacagaaagagaaagagaaagactcaacgactacggcgtcgtatacttccggttgacggtataactctaaaaaatccccaggctggaaagagagcagcgttggtttgggaaggacgtctgggaacctgacttctcggctgtaacgacgatgaagaacgcgaatcaaaggatgtttcatgtaattaaacagatgatggacaaaagggcgcacatcatatcttgcgctgttcggtgatgggaaaacgaatggatgttgggaaagatccgatgctcatttatcgactctgtgtgcttgaagattagtcgggacgcaatactacacaacgcgcaagagaatgagcatggtcaatcttcataaaattcaggaaaggacagagtcatgtttgggcttacttcatgcttgatttgaataaatgaacacagagagaaggcaaggtgatgcatcaaacaggggatgattgaaagagtgaactgaaaggttgaggctcgacatacaagtacgagtaatcattggcgtctacgtcaaaaccttgaaggatattccaggacaagtcgttatagtttcagccgacatgttcagactagagaaactagagacaagaaaaacctagatccgatatctcataagccaatctgcccaatccgcacccgggtaccaagattctcaaattgtctcgctcaaaattgtccatcgagggatacaagtcttccaattgagagagaatgggcgtgaatagtgcgcttcgttctcgaactccctcagtactccaatccctaacaaagctagaaatcaaagggcaaagaggcaaagaagaagagatgatcagcggcaaagagcgcatgttgtcggggaagactaaaaccaaatcaatgctcactgtttcaacatctcaatgaccctcccgggctccggccttccacctccggctcctttcctccagccccagcctccttcaaaatctcgttttccaagaccgatcagtccgtcgaccaagtcagcgttggtggccgaggcccgagtgatctcttcgagctttgcttgatagcctaatgcttgtgcgtatcgcttgcctgtgctgccaagtgtccggaacgaccttttcttggccgacagagacgactgctgggatgaacggtaggcagaaagcgaggtgagagtgtgatggagagactcgacggatgtcttatgagagtaaccgccgagcttctgagggatgagaagtgaaaagggaaaaggaagcgagagggtgaacgaccggggaagtagattttgcaatgcgagaaacgtgaggaagaggaggctaaggattatggggaggagagccagaaggactagtgacggtgcagacggcgctggtgattgcgatggtgatgatgccagacgagtagaaaccggccgagcgttggctgccatgagatgatagttgttgacgatactgccagatggtgaatgaaggaaaaggtaatctagaaaattatctaaacgattctgcgattcgtcatagtcctctctctaaccttctcttcacactctacatcataaatgtgctgctctttgtactcagtggtatcgcgtgcgctcagcttccctatcttaccgccccatcctggtctatgaatgaggccataggaagtagcagaaggacattatgagggaagggatgattggtacactcgtcatcgggtaccctcctcacgtgacctagatcgtaaccaagaccctccggatttcctcttgctttcattcgccttctgtttcagccaagtcaaacgaccagcagaaagagccttttctttggcaacaacaaccttcttaacaagcacaaacacattcgtcatggtgagtgagagcaaagattgaatatatgcatattgggtctaccggtctgtttgcctgagagaggatgggtctcggctgatgactcttccaattttatttggactggttttttctttccctctcttcacaatctttttcatttctatccttacaatctctctccatcgctcttgtgtcgaacctgaaactattcaaaggcgcctggaggaccacctggaggaggacgaggccgaggaggcaagttcaagactaagcgaggaggaggacgacacttttctcgaaatatcggagaggtcgagggagaggacgcttttgagaagtggttcgtctatgtttcatttctactctattctctttcttcgcaagtactggtatctcggataccatcgtagctgccaatatgtgaacaggaaaaggcattgagtgagatgagaaaccagaaaacgtctatggagtgcctgactcttactccattcctcttctttactctatctcgaaacaccttctgtgtcacctccgaaattgacaggcaagccaaagactccgatgacgagtctagcgaggaggaatctgaggaggatgattccgaggaggagagctctgaagaggaggacacccccgctcgacctacaggcttcaccgttgatcccaagaaggctgcccttttcggaaacacccgttcgtcgattcttcgttttcttatcaaccacttggtgtacaccctatgtcctcgttcatactcatatcgcatctaaactttcaaaacaacagccgttgccgaagaagagccggagatgtctcgagctgagcgaaaagcgatgaagaagaacaaaaaggccgctcccaagaagaaggtcgagtcatccgaggaggaggagtccgaatcggaggaggaagtcgtggtcaagaaggtcaacaagttgaacatctcgtcccagcagcagcgaaagccggccgcaaaggtccctgtgcaggatatgactaggaaagagaggtatgatactctctcactcaagttctttgatcttctctttcgcccgggctgccgtctgatcgatacaatatggtctttaactgtttcctataaagggaggaggccgacaagaaggctgctgctgagaagtaccaggcccttcacgccgctggttcgtcgtacattcttgaaaagaccggatcggaccacttgaactgattgtctttgtcaatttcttctgtcaaccatgtaggtaaaaccgaccaggcaaaagctgatttggctcgacttcaacgaatccgaaaggagcgagaagaagctgccgctaaacgattggccgaggctgcttgttcgtattctgctctcctttcatttttttgtttttaaatgagagaacaacgcttaccttcttgttttttttttttcctatgaatttccccttccttcctcctcgaatgaacagccgccaaggaggaggctgaagcgaaacgaatcgctcagaaaggaagacgataaaccccttgctcgttctcccatcttttgcccttctttttcttccatctttagcctcttcttccctctaaagtctcgctgggtctggtgactacttctggatattcattagcctctttttgcccaatttttctattcattaaatcggtcgagatatctaacttgacaaaactcctcaactattgatgaatgctttgcaatctcttgcttacaggatgttatagagaatcatggaaatgaacatcagtcggatacaaacaaggggaaaaaagggacatggataaaagaaccaaaagatttctgtgtttctgactatctatccatctactgaatttacaacaaagtgccatgtcatgtccaaaggatgaagatccgggttaaagagaggaatgaaaaaaagagagcatagatgtttctgctcttcgatactctataagagggaggagaagggtgaaggggactaaaggagagaagaactgaactttactcagagagatggatatatagatgaacgtacgactttgagaaagacaaagttacaaaagataaaggaagatactctctagattataatatcctaccgtgattaatcgatgcctacttcgtttctccaacctgaaccttcacgaatacatctccctccttagcctgaatgatctcgcaatcctctgttcggtctccatcggtcgagatctgactctcgaggcatgcaaagtccgtcgggacaaagctcaacacagaatggtcttttttccgttcgtcagatgaaaagagatgttcgaattagactgacgaacaaactgatggagaaacataaagagaggtaaacatacgccagactccgacatcataggtaattgcctgagaggccgacgcaatgaacgccttggcggtcgacacgtccggcttgtcatctaagagcatccaacggaaagggctatatgtgagcaaacacatgatacacgcacgtttagctgaaaagagaatcggcttaatgaatcaaagaccgactttttccattgagcgcaacaacgaccagcatgccttccccacctctctccagtcctccgttctcatccttacccaaaggtaagaatgtctgggtagtgaacggatgtcgttcccacatcttgctttcgaacaaccagctatctccgccgagtttaccgaaccccttcggtggctcggatcggaaacagctgaacgcctgaatggcgccgctgttagcagggtatgtcgatcgaggaatagacagccggtgatatttcgacgcggtcgatccgtttgcagacgtcactttgatatcgcgcggagcgagagattgatcagggaatgcctggacgacctgcccgaaaggtgcgaacccggaggatgtcagaggactggctgcaatggtgggtaccgatgaggatgaagaaggcgtggtggtggggacggcaacagtggcaggggttgatgaagatgactcggaaggtttaggcgcagctcgggttccatacactcgaagtcgcttgactcctccatctaatttagtgacgcacggaaggaacaaggagttagctaccgagagaagactgtactttacaagaaggaagaaaaaaactatcttaccaggaatgatcgtcatccgaacgtgggtaaatacggtttcctcggcgaccttgatgtcatggaaatggtgctcgtgcggtccgacctttgtcctagagaggatctgggtccatccctcttcgacattcaacgaaggaatttcctacaagatgagaagtcccgtcagtaacgtagtagtgagtaccaagtgggtcgtagtagccacgtgtattcatcgctcagagagagaacgcttacaagaggagagttgatggcgtgaagttcaacgccagcggggaagttacccttgtagtgaagagtatcgatgtcgaccctttgaatttgtcctggagcgcctctgatcgatcacatgtagatgcacaggcaacaagccagatcagagagaggttgagcttcttcagggacaggaacagatcctcgcttaaagtacttacaatctgatgatgacgaaatcgtgatgtccagcggatcgagaacgcttggtctcccacccgtcacccatatcttttctgaagagtgcatgaatggatgtttcttggaatgttagtattgagacctcacatggaaaaaaatagaaggttctgcatttcaaacttaccctcgtccaggcaagagaaggttggctcctacaccgtagtgcttatcgctttcatacacactatcagaaagacaggatacggtcagtaaagacaattgagggatggattctgattttttctccttgaagaaagtctcgatgcacaagtccttaccatcgtcctccgttgaacgcatgggccaaatcgacttgtccaggcttatcaccatcccatgaatgttgcttaccccagatgggagaaacgataccgtaacctctgaaccgggcaatccctccgtcgggatactgtctcagtcggagatgggtgtatggctcggtcgtctggggaatggtgaacaaatgtctcgagtgaggtcctaaaggaacctttgggataagcggcgtccactgagatcggaaggacgagtgcaattcattcaaagcgtgtcagacagaattgatagactgtaatacgaagagtcgagcacgatataaaagtggttggaacgaacagtgctctggttggtagggacggcatcaggcgaatagataccctcaaccgaagcggcaggcgcttcgttgccgctgaagaacgaagtatcaatatcaaatcctttcaagaaggcagacgggggtcccagcttgataataaccctgtataattgaaaagaaagaaaggtcaaacgatgaatacttttgatgcatcaaatagccaaacctgacagcccaacactaaccagtcatgatcgggattgtgtcgtcgtgactcccagccagagaacagggctccgttaggaccgaattggcctttcatactgaccgagggctgaagcagccaattagaataagaaaattacaagacgttagtctagccaagctaggcacaaagctcatatgatagggaatcccatgcccacctcaaccttgagcaagtcggtagcactggtaccaaggatataattcattggagaaaatcccatacgtcggccgtccaagacgaaaagtccacagatgacatcagtcagaggataaagagataaaacgacttgaaacaaacaaatcaaaacaacatgctacccacggagaaaaaaagtcgtccctttatcccataaacacaatcagatcattctgtcagcctcgacactcgatacagccataaatatgagaaggaggagacaaaggaatgaagaggagtagagaaatactatctctctcccatccatccgtccatctacaaagaacgccagttcaagaagcaagacttacgaaacatccaagatttcagctccagtagccacactcgtcacttctgtcgtagttgcagcgagcacagactcgaatccagagattgggagggaattgaattgcattgttttatcaagagtttgaagagtaaagggagggaaagatgtaaagaaagaaagggagaaagagtgcttagatgagcaggtgccttttaccttctttccctgtgccggtccgatcggccgtcgccggtggagggaataattcgatatttgatagtgagtgccattagataagccgaataaggagtatcctccgttcaagtcggatactatctcgcaatagcacacacttttggtccccttcccatatggggtgaaccgggcatcaaatgaatcaagagagtagagtcaaataactaacatggatcggcgtgtatcaaacctgggatcgacagatatttaaaaacaattacggactcgaaaggagaatgaaaagttgaggggaagttgatggtatatcaaggctttttctcaagagccagatgcaagatgtaaaacacaagaggggacgaagacatttggaagcacacagaattaggacaatgtggtagggatgatacagtacgacacgatgtttcatataagttgaagagccgagaagtatattagaataaagtggaaagcggagacaaagaaagaagaaaccccctatcagagacacaagaaaaatatgaacgaatcaagctaaatatcagagaaaacatagaaaaggtgaaccaaaagcaagatacacctcagtttgccgaggctttcggttgagcatccaaatcacagagcctgatgagaaggaaagaaatgaccgcaaagatcagcaatcacaccctcgtgcgtaggaaattgatgtagaaaactcactcgagagccttctggtagatctgagcgtatcgccaagcctctcccttgagccgcttgaaatccacgctgtacagcccaggcagattcttgatcctcgtgagctcaactacaaaccgaatctcatcccctccgccatccggctggccgacatgggtagcctgagcggatgccgagacagacggtggaggcgtcgccccgtcagactcgaacgtcgagccggcatcatcaactgttagaggagacgactggttaaccgaaggactcttagtgctatacgagcttccccggtgtaacatcaggcccttgagacctgaagaggacaagaacgaggaagacgaaggcgaggacgagatcgaggcacctcgtctgtcggtcgatgacgtcttagtcaatccgacaagcgagaacccaccagccgatgtaggaattccacctccgacgtctgagattccaagtccgactgacggtcgaccaccgcctgccgccgacggcctctttgccctcacacatttcaatttaaactcattatccttctgaacctcaattcccatctgttgcaacacgctgacaacctgggcaagcaccgccggtggatgggctgaggtgacagcttttttgtcgaccactccatgatgaaccttaagcacggagtccttaaaggcagaggacggaaccggcggaggaggcattgccatagcgtctgccaactctctagcggtctttccttcaccgctgaggatctgtgaggaaggaggcgtggtcgagacaatcttgatgctgctagttgttgcgcttggaggaaccgagctcacagtccctattgacacatccggtgcgtcatccgactcgatttccgacgattttataaccgacgggcccgactcggacaccagtacgcttgtgaacgaagttcgttccttctctccaggtgtaaccgccgccagggcaggcatcgccaagcgaggctgagtatcttttgccccaccaaatgtgttcttcgtgcttttctttctgaaccaatccattaccttttttgcagcaccagtcgaggctcgggtactggtagagttgatgctgccactggcttgtcgatttgtgatgtccgttcctcggaaagaaccaaccggaatattggagttaggtcggaaagaaggcgttgtcggcgtccgagcgtccacagacacgtttctaggaggcttagatgatggcacagtagtagacacgccggacccaacgggcgcagtcgaatctttgatatttgatacgttgactgaagctgaatcgaccactataccattcgtagcctttcctttggttctatccctcccagatgcgctccttcaaaatggatgcatttaacaaaacgcgttaaattacaaaacgaaagtaccaactgaaaaagaaaacaaaaaacacaagaacttacctagtgattccaaaaggctccatcaaactcatcgtccttgccctgtccttctttcctttgcttccggagccgctcacagccgccgctggggctggcgacctgaacatatctgtgctagctctcgattcaacatcggcgcttgactttccagtcgagctgcctaagaagccggcgaatccgaacttgtccatcgacatgccttttcttgaccgggttggcttagtggtcattggtgaggcgcccccggagacgacggacggtgacgctctggaagtcgggacgggaattcttgaaggcgacgcctcttttcttccggcctcgttcttggaacctggctgaacgggggtggagacggaggcaggagtgaacacctgagaaatcagagaagactgagaaacctcttttgtgcctgccaagggaacagtgcctttcggtgtatccggaggagacaatggctttcgaatcgccctgggcgtgatgtgctcggtaacgacactcaatgttgatttgggtggtgtggtcggagtcactcggacgaggccagcagaggctgaaccggccgacgggacatctacagcattagagacggctggattcgaagtaggttccatgaccgatcctagaggagcagtttgaatgagaggagaatccatcttaacatcggtttcttctccgggcggaccggagtgaacaagaggggaagagggaatagacgatcgggatgtcgtcgaggatgacaacgtcgaggttctagaaattagtcctgttcctggtgaaggaagcaagattccaacatccccatgtacggccgaaacgattggtggagacagtgccgggtcggacactaaaattggggacgctctgtggttagaagagatcgacagaccagagtgtgttctagtccgaatagctggtggttctgaagccgactgatcgtactcaacctgaatcgtgtgtcgctgtttcttctgttgaggaatggacgaagatgacgatgccgaaggtgccggtggaggcggcctagtcgacctggagggttgaggtcgcgttgatcccggttgttctcctgcaggaagatcgactcttgatcttggttctcctctcgcctggccttctgccaagaacacgtcgctctctccctccgatcgtcgagactccctctttccagccgactcgccctcgacggacgagttgatcgaactagacacttctccgagcgaaatcccttgcgtcccgagcgtacttgcgagccctccagtagccacgctaggatcggcacctatcgagagcgtcggtaccggccgaaattgtacgtcaggcatggttgacgtgtgcggcaacgcactctgatgcctggcctgtttgacattatcggtctgacccatagctgccatgccgactgctcctcctccttctcctcctccgttacttgccaatgtggcactctggcttcgagccagctcttgcttagcaacctcgctttgaacggtgtactgtctaagaagctcctgcttccgttcgtcccgttgtcggaccgcttcgtgctttttggcaagatgactctgatcagagatccgttcaagctcaggtaccgtcttactgagcagatcctgatgtgcactcagccagggatggctcatgatctctggaaggccggctcggtaactcggatcaggcacaagcatgatcgacatcaggtgcttggcctcctccgacacatggctaggaaattgaagttgagtggagatgatgtatcggtatagcaagttgatgttgtctccatctgggttggccggatcgtcgtcaaagggaaggtatccggaaagcatagcgtacaaaatcacaccacaactccagatatcaacggccgtgccgatgtattgtccttcggatacaacaagttctggagcggcgtagcagggcgagccgcacgaagtggacattagatcatttccgacctgggtgaaacgattagcaaatccgaagtcggtaataatgacgtttcgagccttgtcgaggagaaggttttccaacttcagatcacgatggacaatgttttttgaatgaagatagtgtacaccagagattatctgggagaacaacttggcggcgtctttctcccgaaggtgtcgatgggccaagatgtgatcgaatagctctcctcctgaagagtcggcaaggaacatgaagagagaacaaaataagttcaggccattttttcgaagataagtatatgtgcgccagatcaatatactcaccgtcagcgatctccaaaatgatgccgatatatctctcggtctctacaatgttatacaagcggacgatattgggatgtttcaccatctgcacacggagataggaataaattcaagctggaagtaagtcactttggaacgtatggatcactcgaacaaagcaaaggccttccttcgtctcttcgaattcacgccaagcaacagtgatatagacagacaagaagctcaatacttacactcagtacttgaatctctctttcaactttgcctttcctcgcttcatcctccaggtttcccttccgaatcatcttgaccgcaacctgctcatgcacatctttgtgcactcccaacttgacctttccaaactctccctctccaagggtctgcagcaaaatgtatgacccaaaaagcagatagtctctctttgggtgatctttcttccacgcttcgactgccggattggatagtaaaagctgttttgaaagttccctgctcgagatcatcggttttcctgtggagaccgacagaggaacgaccgagtcgggttgtgcctgataggatgacgggttatgggaagctcgtttacgagatgccggtcgacccggctgggggtttgatgacgagtgagcggccgattgagtgtcggatggtgcctggtaggacgtcgggcgaggtcggtaggtgacagggggttgagggattagggattgatgctgataagattgtgcatacacagtcgattgtgatgatggtggaggagacgatattggaggcgatggataccggctggcaggatcgatcgagatggaaggaagtggcatggtcgatcgttcagcttttcgatggaaagacgcgccttctttgctgtcgttgtaggacgagacaggagtagtcatttttgtaaggaactaaaagaaaggaaaagggggggaaggaaattgtatgcagtccctttagatgtcaaaaggaaacgaccagataaggtgagtgagtatactgatgaggtgaataaatctgacaaggtcaagaaagggtcgacacgagaaggaaagcaaccgagcttccaggtctgacgctctctgatcacgatgggaccgaaagagagggggaaggttggacctactgaagtgagatgatcaatgtgaaggatgagagattaagagtatgttggtgtgctgggtatgattggtaacgaggtacagagtggaccgagggggcggaaacactacctacgagagaggaaggggaacaaaagacaaacagaatagatcccgtcaggttgatgtctctatcgccatcatacaccaaaacatttccatccgagatgagagtagtacccgagatgaacccacgtgtacagctagaggccggccggagaaagacttgacgattggtatatgcaaggaggagaggaaagtgtcagggacgacggctacgttgagtatatgaagtctgttttcggaaagtcaaagtgaaaagaacagatgcgtcggtagatcagaaagagaagggagggtgacacagatgacaaacagccgacaggatcaatattacggcaagagagagaaacaatgtcaacctctagaattctctgttcgacgctgcatgtattcaaacagtgggacgagcgagatagagacgacagtcggcatgaacgtaccaagaaaacagaaaggaaccgaacaggagatccagaggatgtgtgtgggtgtgtgagagcgtgagagtgtgaaaacaaaaggttaaccggtcgtgtcacctaactgcttctaagaggagagaagcaagagaaaccccaaaaagggggagaaggaggacgaaagatggacagaggaaggaaaaaggacggagaaggagaaaaaagatctttgttcctctgaactgtgtttgttttgtgtgcgtgagtgtttcgtccgaaaaggtaacacgcccaagtttcaacaggcgtgggaggaagtgttgtgaaagagagttagtaggagtgtttgtgtatgtgtatgtgaggcattctggtcacttccgcagttcaggcacaagagagaactgtaaagatgctctcttcatccgaagccattcgtgtgtgcccttgctgcttatggtttttcctttccttgtgcctttcacgtgaaacaacgaaggggtgagtgacatcacaaacacgtcgcgtgtgagaatgggaacgctcaacacgtctacgcgtcgcgtattgttagggttaggcttaccattgatcaactctggaaaccctttgaattaatcttcttcctttcactgatcacttgtctatccgcatatcaagcatgtttggagacgacgctctcaaacttatggtggacgctcgtcggtctaccggtatgtctttactttctctcgttctaggtctcgttatagaagccctattcttaagagcgcttctatattcctaaatagctaccgatacgcttcagaagtacaacacgacccttgtccgtcagatctgtctagagacccgattactccatgaagaaatccgtcgatctgcctctgtatctgcttctacttcatctcaatcgactcccttgtctcagaacagaggtctcatttgtgcactcaccgtccaacatctctcgaccagacggaacaaacgttgtctactcgcctaccacaaacatcgacttgaccgtctgtcctgtgcttactggcagtcgggcggtgcgttagctcacgtgttgaacgatagtgatacccggtcgaaactctcccctcaagaggtagacttcttgagagcgtacaacgatctcgtgttggactacaaatcagactttatcgatctactcgacctgagcgctggagtggagaggccgcctaaggggttgtacgtcactgtaaaggttgtgaaggattgtggaacggtctataccgaacgaggagcgatcgacttccaaaaaggtcacaggttcttggtccgaaagggagatgtcgaccgattgatctctcaaggctatctagaagaggtctagacagaagaactcttgcttggtttagtggattgttaaatggatttatccatcatgtggacatctcgcatcctttctccgaaccatgttgattgttgaaatcgaccaattaatattgtctcgtatacctcaaccggttttccttatactacaccccttggagtccattgcaaaggaaagacagttttctttctctagaaaataaaaactaattctcttggtacgaaactcaagaagcatataccccaaaatcacgctttagttaccatattatataaattcttgaccagatatcaatacatgtctcctttgtagctattagagtgaaggtttcatgcgttgttctttcattctgcatctttttattttagatttcgaacgaagcaaaaagtacaataaaagtcaaatcgacggatccaaaattctctcatcccttcccttctacgtctctacactcaagcagcagcagcagtcttcttcactcgagcccttccccaaacgacttttgcccgttttacaccagcctcaccctccaaatccagccctcctaaggcggacagcgcagaagcagctttctctgccacaggtcgtttatggaagtttaagaatgcgcaatctaaaaagagaagatgtgttttgttgatcatccaaagttagctatctttctctctcttctactcttctttcaaaacgattgataaacaagagagaaagtacaaacgggaagcagggacaagaactattgatttgagatcaccatgtgttatactaggaatttttgagaacagtgtcgtccgaagcacatcctccgtcagacccgtcggtagggaaagaagcaatagtgtagtctaccaaacagttgaagattcaagagttagtcaaggacatcttgactctaggatagaagcaaggaaagaaggaacgcacaattgattgatcttcgggagcggccaacccagtctgcacagcgttttcacgaaggatcttgtttgccactggatcatttcgcccgtaatatcggtcctgaatattctgtttcttcatgtctgaatcaggaggcggaagctcatgtctattgtgtagaggttcagatgaaacgagaaagaaggataagataaagatagttagaccatcgacgcacctaccaatataatgaacacaatgagaatttttgaaaaagaaccaatccataccgataggggcactcgttccctcgattacattcacccttgacgaagaaactgcagatgtgtgccctatttcgtttgtagtatgggtccgtccttgccattgaccgcagcatatccttcccagcagaagacgaccggagcgacagatcgaccgagccggacgcgctcccatctgctagttgtgattcaatgttttgagtgtagtattcttgaaaggtttagaaatgagagaaccaatctaggtgtcagaaaaggcgtctacatcataaaactaataaaacaaacaaaaaaccaaaaagaaacgcgtacgtttgttgatgtttgatgtaggtgcttcactctttagccccagagcgacgtctcggacttgtgtcggcaatccatactccctgtcgtaatagtttagaacgaggtcaaagttcagagatcagtatctgatgttttgatacgcatatccaaaggatcaggagactaacagatctagaatacaacactggcagacgtttctgactctgcagcaggtgttgcagatttcctgatcgagtgaacggaaccatcgacagtttgatagcaatagaagaacgaacgttgtgttagatcaagtattcaatctcttaccatccacataaaagacaaatgattagacatacagtcttcttgaaacgacttccttgtccggggttccacttgaagatggtgaacggcctagtgcaaatcttgcattccgctccgagcggctgcttagacattcgcacgtaagctgaaagacacggcaatgagtgttgttcaatatatgcgtccatttgaatcgaatgtacaagatcaaatatggggtcgcgtacgattagggccaaggcatacttcgcaaaggataggaaagtcggaggattcctagaaagaaaaatgaatcagaccgattaagttatttccttgttcatagcacgctcgatttgaagacacaacagaagctccaaaaagtgacaggatccatgacttacgactccggccttattgatatcttgtttgggaggcatggtggatgtcaggtgggagggtacaatgttcgacgtgatgggtaagaaagattcataattcaaaccaaatgagatacggtagtaagagtgggtatttcgggctgactaatcacgctgtcttatggtcttttggcgacttatgtaaggtgaggatctcgacgaaatcaaattctgaagaatactactgaaataaaagggtgaaaatggacttttcgttctggcacttgttcccaatcaagtcctcactggtttcccaaaccatatacacaccacccaggtatttcagtaaaatggattgagaaaccaggaaaacagaagggaaacccgctagaaaatttatagctcttcggaaagagagccttgggactccgcgcaaatagaggcaggcagatgatgtctcaagaagagattacaaataacagatgaaattatgtcaagactgctgaaactccaacaaattctcaccgttggacgtagtcgagccaataatgtcatggaatattcaactaatcaagaagcctgggtagtttagtggtaaaacgtaggtctcataatcctcagccgcgagttcgattctcgctctgggcatctatttttctcctctcgtcccagagttgcttctcccttcatttcatctgattatagtagctgctgtttcattggcaccagagagaacagttgtccttgtttttctgatatatagtaaagtacgtctgaagataaaggtcgaggtaaacgttctttcgatttcaatgtcaagtcattttatcccggaagagggaacgttggatcaagactcgatttgataaacttatcaagacattagaaagccatggtagaaggctaggtgtatatattgacgaagtgtcctgctaataggagataagtgtgagacaggaagaaaaaagaacaggctgtagaaggaggtatattgtcagaaaattctgatagtcataaaaaaagcatcaaggaaggaaggaaaatgaagctaacaacaaagaatcatcgagagggatcattcaaaaccaaagaaagggaggagaaaaactacaatagccaacatatcaaatacttcaccgataaatgacaatctgatgatacattccacacaaccatactaattatc

SEQ ID NO: 2552 - DNA, 33095 bp, Xanthophyllomyces dendrorhous
caaccatactaattatcccttaactcgtaaccaactatcgagcccgtagataacgatgcagacacatttggctgagctgaaggtatactaggcacaggcggaatcgacaagcagttgcctccgatcctcgacattcggttcttgagctttggtccggctgctgacggtctcttcagaggttgtggtcttgcttcttgggcttgtttctcaagcatcgccttgaactcaagctgctgtgctatgaactctcgaacggcggaaccaggtctgttcatgatgaacaatcattcgaagcgaagaagtacgttttcaatcagatgagcctgatataggagacgaggaagagaccaatgactttcgggaagagaagattgtcaaacgaagacctacctcatccgaagaattcgaaggataagatcagcatttccggttgactgcttctgagcttcagttttcttttctttcttcttcgatcgaattgttccaaggttcttttgatgataaacagacttcgcgcgtcgcatcgtaccagacgctcgaagacttgtctgtgaatcacggacacattgcttgatgatagaggtcaacagcttagcatcagcaagagaccaaagaaagaagccatgaggcgaccgatgcactcacttccatcaacgcatcgctgagaatttagaatcaaattagtatgtgttgaaagaacagccggaaagcagtgtgaggactcacgttgaccagtcgtaatgcattcgaatagacatcaaatcattatacttttggttatgcaaggtttcgagagagagccccttctcgtctccctgagcatggaagtaatcacgcagaaactgttcggaataaaatgaagaagcaaacggatgggatgagtgagacaagagcgattaacggcaatagcaaagacagaagcgaaacggacccctcgccatttcatcacaatgtcaacctcttggtcacctagaggtgtcatatctgtgggcgcggcactcagagacggaatgagtagactttcgagcgtcgataagagttctttccagagtttggtcatgaccgtctgaagagcagtcagactcagagaattactaagtgtagtctgattgatatcaaagtagtcgaacagagggttgatcgcagcctcgatttcaacatctgtaagtatcttgggacgaggtacaggagggagttcgtctttcggtagaggaatagcgggttcattggaggtaccgatggcggatttgagtcggccagtaagcttgttgatggcctcattatagtcgatcggagtggcggttgatttgattagcgtcttgatgacacctcgggtaagattctctcgaatcataggcgacatctgtcctcaaaattattgtcatcagttgcaaggaactcgggatataaataaccgcggatcaagaattgataggcgtactttgtctacgaatgttctaatcatatcactctctgctcttttgagtgttcggaacgctctaccaaagtaaaatccaatttcgtctttctctccttccatactgattcgaagtagaagtcgaccagttttctcctccaaatcgtaccatacctcatgagtgaggaagtcaccgtactttcgagggtccagacggacgtaagcacggccaatctcatcatgcttgccaatgagcgcacgatctcggacagttgccatgagccaaagatccttctcaacagaaatatcaaacgtttggttccctttttacagtacgcagttaaatgagttcagtacaagtatcaagctaacgagtaacaagcagcataagagacgagacttacatcttgggtctagagtttcgtacactgtacgcgtttttgccagacggaaaccatgctgatcactgagagtgacgaacgtgtccagtttgctattagaatcccgattgctaggagtaagcccttcagccagaacaatcttgacagtaaataagaacttgttggaaggttcctgggtgctgtgttgggaggatccttcttcttctatagtccgagtgacctggtcgacttgcatcttcttgtacatctcgtctaactcgtttcgagcagtctcgatgttgttcagtttgacgcaagactgtatgagagacacacatgcaagacgttttataagttgagtccaaaagcaaacaaagaccacataatatatggaaagatagtacgtacggctggaataaaattgaaaggctcaatctttttctcaccctgcagagtcatcttggctttcacaatccaggcgttttccttgggcactgaagggtcgatcgaaatccgaggaaacatctcttctaagaaaagctcttcgattgtattacaatactggtctacaactttgcttagggtctgcgcggttacagggaattcaatcgacatcagcttgtatgttcgtgatatcctgagcgaatactggaggaacacagaccttagataaacttgtcaggaaacgagcttcttggtattgatctggccagtcaagaccaaacaagaagtcaagtgcagaggaaaaggaaccaaaaagatcgacgatagacgagctatttccggctgttccttccggttcgaactgttttgatggacaaagaagatagtcaaaatcatgtttcataagttgatatcatcctggcacatgtacatatgaatacatgacatacattgtcaactcggatggcctgtagcgagtcatgagagaagacgtcaaaacagagacacgataatattttatgataagccgtgaatagctgggaaagatgcgaacctctgcaacccatttatgcgttaagccgtcgatcgtctgcaaccatttccgaacgaacggttcaaaatacgctccaaggtcgaacgagatccctgaactgcgtacaggacgaagtcatcacgtcattaacatctcttgagaaaacacgacacaactggcaagacagctagaacttactctgggcaatactcatcatgcatcgcagttatctgtgtagaccgacgataaagaccaaagacctggtctacatcgatgaccggttcttgttttgagcttccaagagcggcagtcagaagacgagggtgagcatcttccagatcttgaagaagcagaggaacctgttggccaagaactatcgggacgacatcgatggcactttacacaaagagaagtcagatcggttatccctttctcttatattttatagaacaacatataaaaacttactctagaatctttcccggaaaccgcttcttgaacaacttggcttgcttttctacccaatcgatgatcatcatcaaaggatccactgggttgtcttcttcttcagagaacagatcagaagtcttggctgagaacaagctgaaagccttctgtcgaatttgatcgacaatctgatcgagcttgaccaaatcagcattcgaatgcccaacgagaccagtgtctcgaagttcttctaacatgaggacgtaatcggaaatatcggcccatttgaccttggatatatcttcgaaattgaaatgaagtacgcgtaggaagtactcccacagaacgttcaagatttgaagtaaaaaaccactctgggagatagaggataagttaacatatgtcattcaaaatcgagtcgtgtggaaaagaacgatgaaaacacatttgatgggaaagacaggaaaacttacatcttgccacatccactgctctaatggtaacttcttcatctccgtgtccaccttagccaaagcctccggcaaacactccaaaggaatctcatccctctcatatcttaaccgcattacatccaaggtcgcagtagctcgataaggatgacctatcctccatcgcatcgcgcattcattgagcaggtctgtgtgagccgaggacaggatgctcaacgtcacctcctgatcctcaggaaggttggccatcatatcctgtacaaattgaattgtgataaaaacgattagaatcatatagacaagaaactcgaacacgaatgaaacttatggaagaaaatgacgcaccagatcaaaatctatacaaacttcaatcaatcgtttgtagaccaatcgggcactgccaggaataaacgtgaactctcctccggacgatatctcttcatcctctcctacgtgtttcatcacagcctccatgtcgaccgatctgatcgacgtgttcttcattgtggcaaactgactacatattgaatctggccggtcggtataaagcgaggccggccggtcagctttggtatctgtaggcgttgttgtcgaggaggatggtggtgccgtattctgcttggctagttctgggttgaactgaaccatgatcatcacgagctgagagaggtgagtcacttcggtttggcgccagttgttgaaggcttcggtcgaatcaaagtcctcacgtcggccaggaaaagggagacctgcattgagattcttcaagcatgtctgatggaggagaagcgagcacacgcgccacggaaaagagatagaataatcagcatacgatcgctgctcaagataattcccattgaaagaaaccaaccttcaggtcaaccatggcagcctggttcatatagaaacagtcagtcagaaagaaaaggttaataccagagattatacgggtagggagaaaacccgaaccttttcattgcatgcatccttgatcgccaatatatctgtcttcaaatccgccgaagtcttcccgaacaactctcctacaaccaagaccatcgacatatcctctggatttgttgtgttccctgcccctccagtcaattcagcttgcctatttgttccatcggtggtcttggtagacatatgcgagtgattggagataggcgtcgggcgaggtgttgatgttgctgccaatttacttgaatatgtatccaatttgttgagtaggtcaactgagactccgttgactccttttagagcatctctcagtatacgaacgatctggccgacctgaaggttgagctcgtacttccaatcgaaatctggctcgatgttcttatcctgaagtcgtttgacctctttgtggagctccttggttgcaaccgagacaaacataagaatgagctcttcgatctttctgttctccttgacacctttgaggtacgacggatcgtttgtattgctccaaaaggccgcgacggtttggcgtatacggtgatcttgaaagctgcgatgataagaagttgcacaagattcgattgtgttacaaggttaagagtgagcgatacacgctccatcctttctgtagaagaatacaactcactttaaatcctttcccataaagattgagcgtagcttgtcgtccagcgctttgaatgtcttctccgggaatttagatgatttagattcagacttggacgagctcccaccgcccatgaacatagacgtaaaatctggcattttggttgcactggccagagctccttgtatccgttctcggtgacctcgggtgggagctgagttgtcagtggcattggattcagatgattcttcaggtggaggcaagataaccggtttagggcgcattaaataggagaggtacctggggagtgaatgagaagtcttttgttcaacacgcctcttactactctttccctcttctatatcaaaggcgaagaaaacttacgctactcgaagtgcatatctgtttgataatggtatgagccaggaaaaaatatatcagacgtggttgttttagtataggaggatgaacagtcaaataagactcactgatacactgtagcatcgttgatagtcctgtagctagttccctttgttcttcctgtcccagccgatcgggtggagtgtaagctcatctacaaagacagcgacgatctcttcttgacaaaaacgctagctattaagacagacagccttcgatgagaagtctgaagtagaaagagtctaacagaagagttagttaggaggctggtggtaggttgtgaaagatgagtgtcttgtgtcgtcacctcatttggagaaggtgacaactgcgcgattccctcatggaagtagtagagtgatgagcaaagagcagaatctgatcatcatcatcatcatcatcatcacctatattattctttgttggcagtaatgccatcagaaaaatctcgtagcgaacaaagcgaggacatgtctcatcaggctacaaagaggaagaggtcatcgaaccgggatgatcaatgtgaggatatcgtcttgttacgaccatcattatcattctactctggctgatatgggatattctattgaactactacccagctgatacagagaagccagacaaagaagcagtatgggccaaaatagaatcgctgatgagtaaagggactgtaaggtctcgcctcatggcctccacggtatgtgttgcagtttcgacaaagcttaaattatacatggctaatcagccatcatctatcacgctccaaggtcaaaccacgacctttctttccggtttgtcctagggtcacttatcaggaatgcttggaagatcgacagtcaaagaagggggaaaaggagaagttatcactgagagagtgtagcaaggtctgtcttcactcatcatagctctgtatacagcgtgaatcatccagataagggttgacgtctcccagtggttcatgtgaggtgtagattcatcttcaacccctcatcagaggtcacacgcagccttccttaggtcattgtagtgtatgattatgcttttcgctaactttgttatatttcaaggctcgtgttattgatatgacaaggtcttatttcgtatatgaaattcatagtatctcaacacatgtacggcgctatttctctactcctattggcatttgttcacaagctaacatcaagctttctgtttcgtttcgttttcgttttgtgttttcgttctgaaatttggacactctgtaggctatggagaagtaggttctacatggttggaacaatctcattgtgcgcgaaactgaaaatccattctcttcacctcgttgcaagccctcttatgcggcttctccttctctaggcggcccaaataccaatcgatcacaaaaagactgtcggtgagccttgccacacatagcggttaggatatagcgccggcaactcattcttgcaagcctgcgggctacctactttctagctatcttcatttcgagattggcccgccacccgaatcgctctccccttcctcattcagaacgacatctgtctcatctatcaagagtagaggaccaaatcgagctgccactctgcatgggcctttaaagcctgctgtaccaaacttagccaagatagtgcgaggattggatgacgatgagagtgtgatcagatatccagcgagttggattagctgtgacgtgcgaaagtttgatttagaggtcttaggaaagtgagttcaatttctctcttacagcgcaagagcagtaggctaatgcacgatccgctcgttagattcgatgtcatcatggccgatccaccgtgggtgagtattccacatgaacgaaacttagattcgtccgttgtttttcttgatacatttcgtcatacattttctaaatcgaatatcgatggtctgtcaggacattcatatgtctctgccctatggaacgatgacggatgacgagatgcgttcgatgcctattcctcacctccaagacaacggtctttgctttctttgggtgactgccagagcgatggaacttggcagagatttactcacattttggggatatcgaagggtagatgaaattgtctgggcaaagacaaaccagataggtagattgatcagaacgggacgaacaggacactggttgaagtaagtgatatcctgatctagtgattcgtctgtatctgaggaccctgtgctgattgaacggtgtactgttcctgttcccttgtctcaatcgaaacagtcatacatgcgaggtttgtcttcttcaaaattgaaaaaatcatttccgaatcagactaattaaatcattatatatgtatccactgtagcatctactagtaaatctcgtctttttgcgtttcattctctattctaaaaggagaacagaatgagctgctcacaacaaccgtatttcttgaaatgtgtgatcaccgtcatcatttgtagatcggtattaaatcaccagccgatccatcgacgccgaatataccgaacacgacatggccagactggcttcaacgaggacttgatactgacgtcctcgtttctgaagtgagctcactcgaactttggtgccgagaattatactccaataaacgcatactgaaaatgaatttctggactgggctgggtgactcaaactttgaaggtgagagagacgagtaggaagccggatgaggtatacgatctgattgagagatgctgtagaggaggaagaaaacttggtcagtctagattttaacgaacatccggaagaaagaaaatattttctggttcgctgatcataaagaaggggctgttcagagatcttcggaagaaaacacaacactcgaccagggttcgttaacttaatctctatctctagcttttcttcaaatagatttttaaggagacgtatactgacaatctgctctgtgtgttttatttgatcgatcagatggttaacgatagggtctgttcgtttttctcatttcgagagatgtcgatttgaactaactttgaaacgccactgggtttcgcttgtttcttgtaacttgtcaaagtaatcaaagtatgttatctttatatctacatcgaaacttaaaccaagctacgggaacacagcgctcaaagatcttcatatatccttttcattctttagtcgggggggattgtgtctacgagccagctttggctgaacggttgaagcaacgatacccagaacggaagaacctcgctgtatgagatgttactatttttttcgcttgctctttcttcatttattctgtcacgtacttttggttccggtttgaacttgatgtaatcggttcatgatgagattcgtcaaaaggatatgtcgttcgataagagtctgttggagattgagagaaagagaaagatacaagaagtacaagatatatggtcttgaaggttggagatagatacgacaggtggggcgactggtcggttaatctaccaagtaaactaaaagaaagatcaagtagctctcagtcagcgcctaactttaaaagtcacgatcaaagaagtaagaaaaagatacaatggagttagaacctacttccagcgccacttccagggcttgtctctaaaactgcattgtcgaaagcctcgtcatttaagcctttgtaacccttataagtttgtcggagataagttttgaaagtttcaatcgacagattggctggaaggagcgagacagtacatcctccccaaccagcacctgtgagtctactccctatggcacctcccgcgaggcagatttgctgaagagcattgagttctgagcttgagcctgacaaagtgaacaaatgaaacgaagagaaacactttaacgctataggaacaagatcagacagataatggaaggaccgtacagtcaaagtcatccctgcaactattctgactctcattcatgatctccgccagcttttcgagtaccttttcttccttttcttcactatcagcaggatcagcgaatgcgttacaggttttcttgaacaggagaacacgaagcgattcggtaaggatgtgtctagttcgtttgtagagcgcaaaatgggttgcttcaactaaatccatgaatggtcatagagattcattagttcatatttgatacagccaaggaagacgtgaggaaacgaaagagacacgtaccttcgatccagttttcaccataaacacgctcaaattgttcttcgtccagcccgcatttgtcttttgcatgttccttaatctctttccatgtccacccaatttctgccttcccgtcgagacctaaggcctcatcaagatgttttagtatggttctgatagcttcttcgagagataagtccgcaccccgctcggtgatgtattgttgaacgagctgacgaagcgtcggcctgaacggttcggattgagccgatgcaggggacgagatagagagagagagatgtttggcaaagaaaagaccagcgatagaggatctgaggtgaagtgtgtgcagttaagataacaacgagagagtcagaagacatagtgtgttacacgttcgatgtaagcttcagccagaagacgcttactccactacccgaagattgtagtggatcttcccagagttgaacagattgtgggtctcgagcgtgttctgttaacgatttacacccacacgaacaatgaagtttgtaagagagattgttgatatcccaagatatgccgggctagatatgcgaactgaccgaaattacgaaacgagcagattgaggcatggggacttgagtggcctccagagcagggaagaacgagatgtatagtgctgagtcgacagagcccatcactgaggcggcttgctgaaacatattcaatggtgtttggctatattagctgaagtacaggagaggaagaggactcaatctttgagaactcacgtccatcccaccagagttgacacccacaacccgttcgtttctcatcgccatatcgactagttgaccctggttgcatctttcgtgtgcgtcattgaggaacaggaaagaaatcgtagaagcgacaaccatagctgccgaggactagttcaataaaaacacaaaggtgagtacagtcgatctatggaagggccagatatgatgggcgacgggtgtagactgacagagagtcctgctccgtcgggaacagatccagtaacgagcaaatcggcatgagctgccgaatcctcgatatgctgctctaacactccctattagaaagaaagaaagcagagtgagttgctatgtgaatttttgttgctgttatcatacggtaagagtatacatacacaaaatccagcctttgacggagatgcagggacagctcagtcagctttgatttattttctcatacagagaatagacagaaaagagaatagccataccttgacatagttaacccagcctccagtcactttgtcaactccaagctcccacgcgccttcctcagtcttgtagggcgtgaatttttgcatcttgtatctctcatccatgttctctgccacgatcatctcgtcttcaccgtcctcgcagactttcgatcgcgaggtccgtgtagcaagcgcgatgagaatatcgaattcgactgcagcaggtaggacaccgaacccagctagtgaattgaatcagaaggggaatgtattcaaagttaaaatccagaattttagtttgatgcgaaaagaacacacgagccaggtaagatgtcgattgacgaaccatagtctatatgttcgcctaaagaagaagagggagagtgtgaagaaacagaaaagaatgattcagtatcaaccggatgtagaatgaacagacaagtgaatgaaccaacgacgcaccgatcaaactagagcgccgaggaaacggatgaaacgttgtgatcacagtgaaaatcgtgtcaggtgccaatcttgtcagcagtcgggtctacttgacttgtcgcatggagactcacttgacccttccaggtgctctacatattgcagtgggcttgtgtccgtagatctgttcaaatttttcaatgagactgttccatcgtttgctgatgaggcgtatgggattattttcccatcaagtccagcaaagaaaacggatccgacggagaagtatgttggacgtctttagtaatacggacgaaagaaccaggaaagtgagaccgacatacgcctgggacagatgtgagttggggtaaatctcttgaagagtatgataaattgggatgggtctctgggaggaggacatggtggtcgtatgcagctttgtgtaagtgtgatcgacgaagagagatccaaagatgtccggaacagagatttaccggacgcatccgatgggaccaacggtccgagttcccgcggagttaacatacatgattatatatttgattgacttgtaacgaccaactagatcgccacgtgccgggaccactgctgcgcggatgacactgatgacgtcgcacgcgccaaaaagacggaacccaggcccaccagagttttctccgtgccctttttcgggtgataaaaaatcaatgtgcctgattggagaaaacggggtttccctaatagaaatctttcggacactctaatctttcatagtcaaaggaactacaggaagctttgctccttttttttttagacctgcatcctttgactagcaactcgccttgaacgatccccgagtaaaagcatcctctatccttccccaaacatacacacatccttacatccacatctgaaggacatctcgttcgattcttcttctacatcaatgcctagtactgccagacttatcgtcgcttcactttgtaagactcttatctttgtttcatctcagtctctcaaagtttccttcgaataatccggccacggctgatgcactctttctgcttccttcttttctccccccaacgcatctgttttggtcttcatctctttctctctctctcagtccttccatcaggagttcaatttgcaaatccagctccggcttctccctcattatcgacaactacggataatatcgaacccatttctgaagaaggtcaagaagtcgctcctccagcatctcctcctgcaccatcttatccagaggccttgggtgaacgtcccaaggatattccggctgtctcgttagatggcacaaatgagccttatcatccgaaaattggccttggtgttcttcccggaccctcagtgtttctgaaggagcgcagtcttagcggactcggtccgggtggtatcggcggtgtatctgggtcgaaatcttctggaattccctcgactcctggtctgggcggaggtttcaaatcatctcaaggattgagtatcatcgatgacctggtaagcgagtttgttgtctcctatctatcgatcctcgtatacggcacgcaagcaaccccagctttcgagatcacggcttgaactttgattcatgagccggctctcttgcaagtcgtccttcgtgatgtcatgtacagatggccatctgttgtgcacgttcgttgatgattactttcttatgtactgttatattgacccgcctgcccacccacgttatgatatatttcctagaccaaagcctctaaggcaccttctccttctcccactccaggggtcgccggaccggtcgagaatccgttctttcctacttcgactaccaacacttctactgcaaccccagaaggcaacaagtctcccatccgtccagctgctggcgactctgctggggtctctcttatcaacgcggccacccgagctctcaacaatggctcgtccaagcttgctagcgctgtgcaagacgctactcgaggtgtccgcagtgagatgtctttgccgggcaccccccgggcaacaccatccggctcggcctccgcgtcttctcaaaagcaaaagtcgagatctcccgtcatcagccagccctcacaggccttccacccgcctcctctcaattcgcctctaaccagagcgacgtctagatcgtcctccaggcgcagatcgtcttcctcccattcggtctttcctccccaccaccacgccttgcagctcattcgtaatcctcagggtaacatcgggcttcagaacgcgcttcatgcgatcgaaggagaaaccaagggcatggtctgggttggagcgctagcggacaagacggatgaactctcagagtcgaccagggtcgacgtcgaagccgctctgtgggaaggagacgatggaggagtcaaccgatccaagccggtttggatcaacgatagcgtattcgagggtttctgtgcgtgtcatcattcactctcttctctgtgttcccttcaaatgtttctcacaatcgatttcacttggtgaaatgtacagatgatgtcttctgcaagcaaattttgtggcctacgttccattattctaccgttcgcaaggacgaaacgaccaactgggaagattacgtccgagtcaatcagtcgtttgccgatagaattgtagagactgtaagccatcagtcagaaactcaagcgtatatgtgtatcgcagcgtacaatggtcataatgctgatctctacctctgaggatctttctgtaatagtacaaagacggagataccagtaagtcttctttcaaagccccttctggttgtgccacttccaaatttggtcagactgacatcccctatcgctctccttttgctccagtttttgtgaacgattaccatctcctacttgtgcctgctatggtccgagccaaacttcccaaaagtatcattggactattcgttcatatcgcgttcccgagttctgaaatcttccggtgcctggcttgtatgttcagcccgacaccttatgttctgctctgtggttgcgcgtttcctgactgatcaggcctgatcttctttttgtttttctcgatgcagtacgagaagagctgttatacggaatgcttggagcaaacctcattggattccaaacctacaacgtaagcataaacctctttcaagatcatcaaagaaaatctcttcaagttttctgtcagctaaataattctgccgcatatacacatcctctttccataatcagttctctcgacatttccgacaggtctgctctcgagttcttcaagatgtagaagccactcccaagggaattcaactcccttcctcgtttgtagatgtagaagtcttcggtatcggtatcgacgttgatactctcgaggctaagcgagaagaacaggaggttacagaatgggcaaacttgctaagagaacgttatggagataccaagcttatcgttgccagagataagttggatgaggtcaaaggattgaaacacaagttgttgagtttcgagaggttccttcagctctatccagagtggatcggcaaggtatgtgaagttcaatgaacataaaaaatttcatttgacaatatttaacccgcctcctgttgtctcttccggtcttggcaatttccaacaggtcgtcttgattcaggtcgctcttgctacgacagagacgaacgaagcccaagaaaacattcacgatcttgtcaccaggatcaattcaaagttttccaactcgatcacctaccagccgattgtcttcctccataccgagcctcccacattcagccagtaccttggtctgctgaccacggctgatgtgttcatcaacactagtttgagggaaggaatgaacttgactgctcacgagttcgtcaggtgccgtgagtatattctatattatttgttctctttgtctccaaagatcatgacagtatgctcaatcgctggctccatatccatataaacatcagaggagggatcgtacggacccatgatcttgagtgaatttaccggaagttacagctactcttccttccgatcttgtctccccgtcaaccctgtgggtttctcttcagccacatctttgagcacatagttctgcgctcatgattgatcttcgtttccgtaatgcccgacaacgatacagtatgattacagtcaggtggccagagctattaaccaggctttgacgatgggcgaagaagagaaaaagactcgatggacggtacggccttctctgtattataatgatcatagagactttcattactgactatgctatacttggacctttctcgatcaaaataggagctcaacgctcatgtcgtagaccatactgctcaggcttgggctcgaagtaagattcgaaccattcttttattaattcaaattaattggccaaacaagcgagacgtactgctgatttcgtctttctccgtattgctactttattctgatccacagagtacttgagccaccttgaacgagctcatgctggtcagcaaagtcgattgccaaacgagatccccaagttcgaagtcagcgccatccaagaggattacagacatgctggaacccggcttctgctagttgatttggaaggtgtcggtatgtgtcttattcaatcttttggttggcataacgaacaagttgttatagcttgatcttcactacttacctgacgtgtcattgtccatagtctggaacgaagatcctcgaaagactcacgcagagggtttcaaccctcctgcggaattgctcgatcagctcaagatgatgacggacgaccccaatactgtcgtctatttgctttccggtcgaggagtaacagacctgaaaaagatccaagcggctgttcctaaattgggtctcttgtaagtcctgtttcttcctcagattatatatgtatataaatgaatcgtaccaggtcagctgaccatctgcgttccgttgtgttctgggcacaaacagggctgaacatgggtgttacatcaagctggctggggatgatgctaatcaggattgggtgtgcacggtggaaaatcttgacttgagttggcgggcgccttgtatcgagatcctcaactacgtgagtacgctcactctcctctacgtctttggagtttttactgatcaaaatccatcatctggggcttggatcatgatagttctcggaaagaactcccggagcgtatatcgaggaccggggaacctccctcgtctggaggttctgcaacgaaaagtctggagaggctgaatccgcttgggctaagcgggcggcggcggaagccgcgaaccacgtgtcggacgttttggcgtacgtggtctggcgcactgatgttgcttttggttctctcactaacgtttttgagtgttcatctgtttttctgacatatgcagcgagcggtacaagcttcagatctatcctggaaaacaagcgttcctcgttgttccacgacaagtcacccgttctcacgcggtcgctctcctgctctcgaagtcttccaatctgaaggttctgccttctcattttaactcgagcttggtccctcagtacgatttcgtagccgcccttactacagatgaaaggtttgtcttgatataattcctctttctgctcatatgaatttgttggtcgattcaaccgtcgaacgtgtgtgtggttgactcaatccctttgtcatgtgttcttgtctcagattgatcgctgcgctcaactcactcaaacaatctcgatcgagaaacaacccgagagggtcagtcgtagttcacactgtctctgccggtactcgacaatcacaagccaaatgggcctgtaatactgtggacgctgcccaggtcttggttgatctcgtgaaagacgtctagttatttctcatcagtctacttttgctcctcttcttctctctgtcacctctttgtggccgtcggtttcctctctgctcctcattgctcccgctttctcaaaatttctctcagtttgaatttatggacacctttcatacgacttttctttattaccatcgagatttgggtctcacactgttatatctatttgtagttcaccagggtactacgatcttgctttcgacaatcattttgtcatcttcttatcagtgtatccatgcgttctatttcttgcatatcgcttgcagtccagatgttgggtgaaaaaagacaagaaatttccgcgacgattttttggcgttgatgaatttccgtgaatttcccttcgcctgctgcctttaccatcacccatcacccctttccacccgacgaaggtcaaccctccgaccctttcccctctctccttttcactctcagtcttccgtttggttggaaaatcatgtcgaacgaagaagatcaagtccagattcaatcacaggtgccggctattcaaagcttgttgaaacaatcggcggcgagatcgcgtgctttgtttctcaaccagttgaacggtccgatccctcaggatgatgtttcgttcgtctttcccaatcttgctccatctatttcttctcgtttcatattccttccttgttcttcttcatctagtctgagctgggttcttctcagagggacttcaacttgaagggaaggatccgagatgcaggacaggaagctcagaactcactcctaatcttgtcctatcttctctacttttttctcttgcctctctgaaaatgcatggacggaaacgaacgcaaatcacaggacccaagttggaatccgatccagagtccacgcagaatacaaagattctcaatcgttacctccttcgctggccgctatgcaggcaggaggagtcggtggtccgaagagacctaaggctgctagtggaacggctggacagttaatgattggaaatgggtttgttctctcttccctctctcccttttgtttctgggtactattgaagtttgtggctgtacggtttggaaaagtgaataatggatggacagaccgggttgtccagttgtgggacaagcgtgtgtagagtcagtgtatgatagggagcacatcggtaaaggtgtagacagtagtagagcggaaattggaagtgggataggtgtagaagaacggagacgagacccgtagaagagctgagcgaggttccagtcgagaactcaagctctgacacgtgttctctgttttttgaaccatctacagagatacccccacgaacggtagttcgtcaaaaccagaccccaacgcgccctcccagtctctcgtttcttacagacactcgataggactcgccggtcagggtggtcaacactcctcccttctctctcaacagttgatgaagaggaaggaggctcgagaggtccaacctgaataccacgctcaatgtccgttctttctcaacgttttcttttgcgcctctcacccatcatacttggtattgatctgacgtgtctttgacgtgatttttggacgcacttcgtgtaaatatagggaaactgaccagagtcatctccggtcatcttggttggatccgttcggtagcggtcgagcctggaaaccaatggtttgctactggagctggtgatagggtcatcaagatttgggatcttgcctcgggagagttgaagcttagtttgacaggtcatatcagcacggtcagaggtctggccgtcagtccaagacatccgtatctgttttcgtgtggagaagataaggtgtgtctcttgttcattcgggtgacttgccatgttcaaattggcaagttttcagaaggctgatcgatttctggaatgcgagcggagcgtagatggtaaaatgttgggatttggaagtcaacaaggttattcgaaaatatcacggtcatctttctggaatttacagtctggcgtatgtcggctctcatatcttattgtcatttgtttggaatttaactcgctgacgcgtaaaccccctcttgccaaataaatggacaaacagccttcaccctacattagatgtacttgtgacagctggtcgagatgcaaccgctcgagtttgggacatgaggactaaagctcaagtacacgcattgacaggtcatacgggtacgatcgcggatgtcaaatgccaggaaagtgatccccaggtgatcactggtagtatggatagcaccatcaggttcgtagtctgtcgtttttcttatcttcggcgctcagagttctaactcatagcgatgattgaaatctgacttccccttcgatttgttcgaattgaatcgatagactttgggatttggcagctggaaagacgatgacgacgttgactcatcacaaaaaaagtgttcgagcactcgcggtgtcacctgtggagtactccttcgcgtccggtagcgcaggtggaaacaacatcaaaaagtggaaatgtcccgaaggaacgttcgttcacaacttctcaggacacgatgcgatcatcaacaccatgtccgtcaacgacgaaggcgttctcttttccggagcagacgacggaacaatcactctgtgggactacgctaccggtaaaccatttcagcacatcaaagatatccctcaccctggttcactcgatgccgagagtggaatctttacgtctacgttcgacaagactggaacgaggctcatcactggtggtgccgacaaaacgatcaaaatttactctgagcaaacctagacgtggatcatcatctctgccatgggctaaccttacaaaatgccccggttggctgtacagagtcagagagcggagagtgaacaacgacgagctttcccttgagacttctcccatctcccttggtgttttcctcttcttgctactttacctcagagctgtatcatattattcgttttttcctccttgccttgctcagtgatcctacctagaaaggagtactcatctgagacatacacaaatagccattcgcatccttaacctgatcattataagaaacatatccgtaccgatatatgttcatcttaagctgcaaacccaacaggaaacaaaccccttagaacacgcctcaaatccgtcatctgatgctacagatatatatgagcagcttgcattgaaaaacagactcgaaacagtctaaggataagtcttgtcagacccgatttgatgacgttgtttccgtgtcgattgttcgttctttccacatcgtctgtttttttatataccaatcttcttgaaatttcagtcttttcaacaagagaagagctgataatgcagtctaagattgatttcataaacaaaagtcatacacgtttgactcttctctccttgacgtccttttactccattcttcttctttgatttttttaagaaacaaactttacttgtaggagacggaaaggtcaactaatcctggtcccaatcaccctgctgcttaggagctgcgataccagcctgcttggcgacaatgatcgaatctacacgaaggacagacacagctgcatctgtggctagcttgatggcgtatgctttaggagcgagaggatcgagaattgaggacgaaagagcatctgtcgttccgtttgattcacccttgatttggtcatttagacaacggacgaaagatgatagaaaaaaatgagtatcttcttccatagttggctcaaccaaagtttgttttcttctttccccagagcaaagagaagacgacgtacctcgatgtctactcccagactctgctgaccttctccgtgtcctttgtacagcgcgctgatgacttcagtagcgtccaacccagcgttctccgccagcgttctcggtactacctcgagcgcctcggcgaactttcgaattccatgctgagccagtccaggagtcttgtctccaaagtcacccactcgcttggcaagttcaatctcgattgctcctgctccagcgacgagtcttccatccttgaggagtgatctgacggtgttgacaccgtcatcaaccgaacgctcgagatcatcgagctgattggcagtagctcctctcaggacgatggtagccgtcttggttcgctcatcctcctcctgtcgaagcacggtcactcggtcacctccaatttcaaccgtctcaaagatatcaacctgaccagcctcttcaggcgtaggcgcgccaactcgagcaagaggagtcgctccgcatactcggcataatcgtcgaagatcgaatttggagagaaccttgaggacggcgataccctgtcgattgaggtaatgcaaggcaagatcaccaattccggaaccggcgatgatgagaccaacaccagaatcggcgatctcttggaaaatctaacaggcgaggatgaaacgacatccgaagtgggtttagagcgcaagttcaacaatgcaaacaaatgataagaccaactcacgttctccatttgtttctcctcgcccttggtgaaatccaacatctcctgagcgttgttgagcaaaactgttcccttggtctcagtctgcgagatatccaatccacaagtatacacagccaccttaagcttctttcccttcttgacaacacctgttcaagagacgatatatattggagaattcttgtcaactcttagtacagcaaaattgttgaatgacagcagaacgaaccatcggcctcccttccaaagaccattcctcgaatgactctgctctgacttaagcttcctcccaaaatcttgacgactcgaatggaatccacattgtaatccttcgggttccggggcataactgtgagcgaggcctcagcaacaagatcagacaagaaaacctcagatccaggttgcttgctacctatgctgggagcgatggccttagaaagcgccttgagggaaggaggaagcggaagatccatgacggagagggctgaaattgaagataagaattgagcatttatgacaaagcgaacctagtgagaaaagaaacctactttcgatctcttgccgagccttttcagaagcaagctcataaccgagaatgacctattcaatgacaagtagaagacaaggatgataagagagatgaaaaagaaaatcatggatgtatgcagaaaagaaacagccagtttacctcagtaggatgaaggcccatgaccaacaagttgaccgctcgtttgagaagctctccagccaagatcaacacaaagtttgttccatctccactctgaacagcatataatgaggtgttacaagatgtacatacaacgagaagatcagttgcacgtcttctacctcgaatatcctcgagtcaaagaaacgaacctcagcctcttgagcctgggaagctcctactaataactttgcagcgggatgaacgacctcgatctctctgatgatggtggcagcatcagaggtaacaaaaagtctggacagatggttgattataagcttgtttcgtcctgtgaaagggttatcaacagtgagctcagatcgttgcttgattgtcagtatcactaagaaatagaaaaaaacagatgaagctaaccgttgggtccaaaagacgttcgaacaatctcactaagctctccaacggcttcgatgtttcgaagaacagcttcttccagtccggagaggtgctgtagaggttgggaaaggagataacacagtagaagtagcaggaccagaaacgatgacataaaaacaaaagcacgaaaaaaagatgaagaaaggagaaagagcaatcagcactgaaatcaccaggtagcatcatttcgaatgtggctcaatagcacagagaacgcctgcaagacagaccttgtatccgtccttaaagagaccagtttggggtttgggaactttgagagacatctttgaggtcgtatagtctcgagtgcttgtttgatggtagaccttgagttcgctcaaagtgagtgctggatctttgagtgttaggtaagttggcttgtgtaaggattgagattacgtaaacattcatctatctggctcgtgtaacccggccgagatccgaactgaccgctgagcgatagcaagcgcacacaaactagagacaagactcgagaaagtgttctcggcagctctctctacgattgatcgtaggagtgcgtgtggttctccataaactcgaggctcagagacaacgacatatccagtcttgcttcaagtggaagctttgaaacatacaagtagtaggctttggtcgctggtaaccacttgtgtaaccagtgactaaccatcgcttctcggctatgtccgtttgttgatcttggctgaagaagatgttggaaaagcaaagtgaaaaagactctcaggcgaactccatctacgaccaagaattgttactcttgcttgctcgctcatatgtctgctttccctcaaaaatttacttctaccgtgtcccattggcaagcttccgttagtattgctattgtcccctttttccgagtcgatgagggagggagacaagctgacgatacgcaacctcgtacactttcatgatcgataatgacgattcctttgataacagaatagaggacctaacagtctatacctccatgggtctaaagatcctttgccaaaggaagaggtcgacttcttgatcataggagcaggcatcaccggttcgtcaaagtacctaaaccatgcttaatcgagaccagctgctcttttcagtctagacgacttgaattcaattgtttgacctgattacgtcgtgaactgagaaacaggtgcttcgttggcttatcaactcactcgcaggggtggagccggtgaaggaaagtcggtcgttctcgtcgaggccaaggatatcgcttctggtgctagtgagttcctcgccaagtaaatcatccattcaagaaagactgctcaattttttttgatgtcgattcatgacctcccggtctctgattgcctctttgaaatcatcgctacttctactcagccggtcgtaacggcggtcacttttctcctgcagtcgacaatgcattcatcacattgattacgcctctgtcagaaggaggtgctggagtttcagaaaaggaagctgtccaaattctccttaatgagaaggagaattataatattgccacggagatcatcaaaaaagaaagacttgatgttgatctttggcagggtgaaggagttgaaggtaagtctcgaatctgggaactcatactattaagaatcagatgttacgtctaaaagctaaattctgtaattctgttcttcatacctaaaacagtgctgaacgaagaaaggctggctgtaagagagcactcgtataaggcttggatgaaagctcggaaggaattagggatcgagggtgatggaggagtcgtctttataagagattcagccaaggctaaagaggtgcgtttctatttcagccttccttcatagctaactcatacttctcccctggtttcttgtttgattaaccaatcgcctacttgttctttgaacaaaaaaagatcactcgttgccacactgctgtcgccgctgtcctgaaaccggcaggctctgttcacccacacaaactatctactgagcttgtccgactcgctcttgaatcccctcactccaagttttcattcttctcttggacacctgtcaggaagtttgaggctcgatcgggccaagatgaggaaggttgggatgttgattgttgggaaaaaggagtgatccgggcgaagcaggtagttttgtgctcaaacgcccacactggccagttgtttgaccacggttcggatattgataatcagtaagttgaattgtcctagattcagaaagatgatgaccgacgaatgagctgacaagaagacgatggtttcatgaaagtatcactcctgttcgtggccactgctctctgatcacccctacgatcaactactcaggtcccaactcgcttgattatacatacggcttcggaggtccttacatggttactactcccactgaaggcatggttcttggcgtcggttggctcaaggctcagacactcacgaagggtggaaagaatgactttgtggccaaggtagacgatagtgttatcctgccagaagtagaaacctgtcagttttaacgttccctttccctttcaaacttacaacaatcataagagtggatcactctgacaagtacagctattcttatgttttggtagtcttgtctaattattgcaaagacgagtttaccaattggggtaaagaagctcatggagaaggattaactcgaatatggacaggtatcatgggatactctagagatgttctccctcttgttggtcagattcctggaaagaaaggactgtggacggccgttgctttccacggacacggtgcgcgctctgtccatctttttcttcttctcaatctccatcttgatactgatgtggattctcttcgcttggtcgaataaatattcgattctcaaaggcatgtctcggattataagttgtacccaatcactggctcaacagatcaaagatcaaggaacctgggatcccagattacctcgaagtttcgaaatcactcaagagaggttggatcgagcgaaagccgctccaaagatgtccgatctgaattggagggaagccgctgtacagagtgatggtgcggaggaaggtgcgacgcctgtcaagtcagaattgagcgcatgatgggtttgatgatatcctctttctcttggagttctctgtcatagatcagaccgttcaagttggaaggcttccactatagatgtcgtatatcgatttagattatcagattcgttttgttcgtcgtgctttattgtcatgagtacccttgcattttccgtcaaacgcgatcctaaaagatgattcacgatgtgtgatagttagcgaagttacatcatgatatctcgtcgtcgctcgaatcaagaatttcgataacctgattaggcaaacacgaagcagtcacacaatttgatagaccaacttctgactctccccacttcgagagttctgtctgattcgtcaactcaacccgtctatcaggcgacctgctagatctggcagactgaaaacctgcgccgtaatgatttttgacggcattctttcttattttcgtcctgtagctcaatccactttcaccgtcagattcatccgagtcacttatttcgatgacttcaggcgtggacatcgtgctcgagcataacaagggtttatctccagcaaatgattctgtattcaaaggctcaagcagtactgacgatgatgatgatgatacggatggtgaagcttgtgatggagataaggttgttgatggaagcgacgatagcagatccgaagcgagggtgtcaaacgatgtcgttgttgattttggtctagacaatttcattggaaaagccaaaggccccgatggaagtttcggtacaggtgtagcatttgatactgttttactattcgttttcggaagagatgatggaggagactcgatcggaatatagatggaggataatggtttcctaactttcgagttcgctcgaggtgtgtactgagagggttcgtctcgtgatacattcactgtctttgaaggagacaaagcaatcggcaaaggaatatatgaagggagatgctgtgttcttctaggcaacatatgcgacgtggacgaagatgaggagaaatggggtagagatggagatggtcgagaggggaaggataagttatgagaatgaccgtcaagcctagatattgacaaagaagaagccttagtcttggttggttcaggtagtttgttgttgaacttggagtttgtaatcgcagacgatctgatcggcgaagaaggctcttcgttctgatgaccattgttcgtcgatatgttttgagaaacgggacatgacccaatcaggtctgtggtgggcaatatcatccctgcctttctgccagcagctcgtttctctttttcgtgtttctccatgactttttgttcttcgcgctcgttgaagctttggacgaggcttgggtgggtatggcggatcagtttgtaaggcagccatacaaggaatggcgcgttgtggtctttagacgacgatgctgcttgagaagagggcacgttgtcttcgtcattttcatcggacgagttggcgaacgtggtcttctttttaggagatcttggcggtggttcaggaaggccccgtatcccaatcgttagttcctgaatacagaaaaaatcaaaatcatcgcgttcaatgaccaagcctttatcgcgcagatgaggaacatttcgtggaagtacgcacataggagaaccgagctggttccatcaagcacctgtactccagcaactcgtcggtggatccatgtttcctgtatgtcgtgatttttattattgtgggataatcgagtgcggcctccagacctctctggcatgaacttcgtggtccatatagctcggtcgtaggtgagactgaagcaaagattgcatttccttctgtttcattcaattctgcctccacctctatccaacgtcggacccatgtacctggccgtctcagctccatgagtaagacttctgccatccacttgtctgctagcacactcccgagtcgtttaattacatcctctttcccccagccaaacgccttacctgcgaaagctcctaactcaccaagtttcaatcccgtcgcctttccaaaagatttccacttgacttgaacactatctgaggcagaggtcaacgggttgacgtacgactccaagatgcgcagatcgggaaactgtggcgtgttctcaatttcttgagcaagcttcgtcattttacggcctagcaacccttgagggtctcttcggagatagtcacttagatccatccggaaggctgggaggaatgtcgagaggaaggtctcagttgacatgcttcgataggcatccacgagggcggagccgtaattctcacaagccagctgaaaggagatcttgggaccgcaaccagagagcccttccttattgacgagataagatgatacgcaacatagataaaacgaccatcagaactagaaaatacgtcccagtcgacaatttgagataaagcgagaaatgttgacgtacttggtcatagtctcctccactacaaaaatcaatgcaacggttcagcacacgtacaatacgttttcagctggcatagagcttacctcaacagcgctacaagtatcaatccatcagcatccacatttctatgctttctagcaatttccttcgatcgaaagacattatatctcctgttgtcggatttagagcttttttcgctgaaaatcgtcatacgtagattatgaggatgcggtcaacaaacatcgagaaaacaaaagaagaaacatacggtttgaccaagactgtttttgctttaaacaatagtgcgtccacatcttcggtgattatagcatccaaagcacctatgtcgttgagatatcctagctcggcctctgcctcccctggggcctatgcaaaaaagccgaaggcacatcaggaaagaatcggatcagtgtcaccttgaccgttaatattgatactgatttgagatggaagaaaccccacctcccatatctcaaatccaaataggtgaatcatcgtcttaaacgacttctctaagcctttgcctaatttggaggatgtgttgatcgttttgccccgcttgaatgctggccggccgggtccgtcgaacacaaatagaagctggactggtagtccaaccagatgacacagcttgaagaaaagtattaacactatgaggagttgatatattctgatcagacgtgagctgacatcaaagtatagaaagcaaaaactgagctgtccctacgggcatggttttgaacatcatgttgagctacgctagtggcttgaaagagccagatactgatagcaaatagaacgagatcattatataaggaatcagtatcatcagagtatcctgattgatttgatagttctggagagtggtggcactctcacctgacatcaatccccactttcattgttttcttgaaatccttagcggtaaagtaatggctccaagcgagacttgttaagcttttagactcttctgttcctctaagaatctcccaaagtcctgggacacccatggtcagaccaatccccacggacaaaccgagcgcaatggcacggactgcttttgagagataagttgaataatatctggatgcgctgatattccgtgaacgatgtttacacgattgtcatttcgtcagaggtgactaaccggcccgcaagatggacttctattccattcctatcttattaaagtcatctcaatatcaaccatcatgttccctgcttcatcgtcctcatcatctacaaggctagatcctcagacctacctacctcttttgaatacgtcgaatttgtatactcttgatgacgaggatgatggtgatatgcaaacaccaacagcaaccacaacacgcggagcaacgaatgggtcgacagctccgccttatacggatgaagcctacggcagtcgatacgacgacaaattggacagcaagaggtttcatgacacagaaggattttcacggactgggactttgagaagtacagtccagagtagagagactggtgagtttccttccctttccctcagtctttgcccagtattacctcatcggttagacagaaccccagctttgtcgatgctttgtctgaactaattgatatcttgttgccttttctacatagaattcgatttggatgatgattctgtctcttcagctggctctgattcaactattcttccatctcgcagcccactgttggtagggctactaggcaacagcagtcggtacagtcaagacttcgctttgcacagcaatgggagtataggaggaagaggaagtgctgatagggcatcggaagagggcggacaagtcggcgaggattggaaagaaagaggaggaaatatgctgagcggaatagccaacatgtgagtgatgatattggtcctatcggacaaactcttactttgcgaaagaggcatttatgctgattgattgacttgtcaatcttccagggccaattcaatattgggagctggtaaactgatcttgattttgatagcattctcgttgagaaagggttcttcttctgacgatttttcatgtcattttgtctgaactttggactgaaaaggaatcatcggtaatttcattagccctgacttgacaacacaagaaccaaacttgcttatcctgatcttttctcatccttttggtttcaggtcttccctatgcaatcagagaagccggcttcttaacaggtattttccttctcgtcacactatgtctcgtgacagattggacgatcagactgatagtgtacgtatattctgatgtgtcgctattcaagttatggataatagcatgctgatggcacctcgctcttctcttgaattgtttggccaatcccgaacatgccatcagtttgaatgcaaaactctctggtcgtaactcatatatcgagatcatgggccattgttttggaaaatatggtcgggcaggggtttctttctttcaacttgcctttgcatatggaggcatgtgcgcattcggcgtaatcattggtatgttgtttttgtcttgcgtccatttagatacaaattgttagtactgtgaattctttgctgataattctatttattctgcgtgattatcggtatgcaggcgatacaatcccaagggtgttggcgttcatcttcccttttttaaaaacaattcccgttctgtcacttctactcaatcgacaattcgtgatatttttagcaactgttggagtcagctttcctctgagtttacacagagatatctcaaaactatctaaggcctccgggattggtctgttcttcgtcctgctatcaacggtttcaccggtttcatcatggctgatgatcttcctttccttttaaaaattatcatctgaaatagcactggttgggatgttgatcatcgtatgctcagttttgatagagggatcaagagtagacgataagttaagaggatcagatgatgccagatgggtgagctcggtaacatcattatgtctcgatgttgccccttgcttaagaaataagacctttcgacgcttcgctactctacagactatcatcaaacccagagttttcgaggctataggagtcatcagttttgctttcgtcagtatacaagttgatctgacgacttgctgttgaggaaatatgcgcttatctgataccttgttcatacaggtatgtcatcataactctttgatgatcttcggcagccttcaagcgcctgtaagtagcttctgtctagtttgaatcattataatcatagtccgactacactatttgctgattcttcactgttgttgatcataatcagacattgggtgaggatagatcagtctctattattcatttcatatttattggtaaaattggctaacaagatttgtatcatttggacaaccttcggtgccaactgatctcttagatcgatttgctacagttacacatatctcgaccgcggcctctttaattgcgtgcctcgtcatgagcttatctggattcttagtgttcaccgataagactcaagtgagttgcgcacttttgtgttgactattttcctctctcttctatttgcttgctcatgcgcgaattaacatatggttttcttcttcgtttcacccgttcgatacacttttacggacaaactaggccaacattctaaacaactttccacacgacgacctattgattaatatcgctcggctttgctttggactaaatatgttcacgaccctcccattggaagcattcgtttgccgagaggtaagtccccttgttcattttccatcggtttgacacttccagtattagactgatctaaacggcttttttatatctttgtgattacaactttttgaatcggaactctgtgataggttatagaaggatactttttcgacgatgagtttaataaaaaacgacacatcattgtcaccaccgctatcgttttttcatccatggctatatccatgatgacctgtggtgagtgtccccttcatcactctttcttggtcaacatatctctcttgtttgtttggtggtcctgatctgtggttaattttctcatgtgaaatatgatgaagacctcggagtggttttagaattgacaggaggactctcagctaccgtgttggctttcgttgttcgtacatatctcctcgaaaatcattccgaaaaggctcggctcctctctgatcgctctttttttcctttcctaatctatcgcccttgttcaaaatcagtttccagcgatctgttttctcaaattgtcagatgcaccctcaatgtcacgtacaaaattccccgcctgggtatgtgccgcatttggcctactcgtcatggtcctctctgctggtctttccttatacagagcgttttggggtgaaccaaggacgggaggaacatgtgggttcgagtagagtgaagataaagacaagtgcaaagaaaggggaaaaaagacacttaaagaaagaggcgatggcgtgcaataatttccgcgcctccttcaagctgtagccatgtgaatttctcttattcatcatatcacaccagcagatctatctaccttagaaaagaaaagatatgtatgttt

SEQ ID NO: 2553 - DNA, 9323 bp, Xanthophyllomyces dendrorhous
gaaaagatatgtatgttttattccaaagcagccgatctgtgagggagagatgtgcatagaggatgcaaagagcagggatcagcttcgtgggatcgagaatttggcaagatgaaggatagagtcgaagacgaacctgtagaccaagatatatgcgctagagtcctctccaccaccatccaatgttgagaccttctccctcgtcacgctgctgactttgtcgtcatcgaatctaagatgatgttggatatgaacagcgcgttagttgtgaattcatatggtaaagcactcttttcgtgagatcaggagatggagataacgcacttgaaccattcttcatccgtgctgatctgagcagcagtgttgaccaaactgcttcccacggaagcaggttcagcttgctttttgactagattcgattcaaataaatgtatatatatatgtttcagttatggcgcctcattagagaccgatagatatcaagaattttgcagaaacaacagacgtaccaaacgccatgtaatgacccgaatccgccgaggcacccttgtgagtaacgattgcgcagagctcatacatacccgactggtttgctcctacgtcctccttgagtccaccatcgatcaaactcgaaagcaacgctttctcctccgcccgtttggcgtcttcttcctcagctgtgcctagatagacttgctcctcgccttctttcttcgagccggtgggctcgttaggagtcatagccacatccgaagtggttgaggttgaagttgatgcggtagcagcttcggcagcggtagaagctgactgagctttcacacgcttgcggatccgggcgcgctcttctcgattcttaatgaccgtcttgagagcagtgttaacgggaaggattttggcttttaattcatccgtgcacatgtccagcgcgtcgaactcgaatgggaatttaacctttcgcctataaaaaaattcaatcacacaaggacgtgttgagtttagacagatagcacactgatgaggaagaaggattaaactactgacatgatcttagccttggagttggtatctcttctccaatagaatcggacaagatggacggtcaagacgcccggtaatcggctcagccgactcttttgagtgtacaccgcggatctacctaagctaggcgaagccttctcgatcttctgatccagagactgatggaaagtgaaaataacaggatttgaaaagaatgggaaattagataaagtttatattcgatgtttgaattgtattcaagatctctttcgtcggtagagtgtaacgtacatccaagattccagtgtgcatataatttgtggtaatagagatgttgcagtccaattttgagatcctctctgtcaaagttgttgaaggctcctcgggtgcctcatcacaagtcaatctaaagcggtgggcccgatggaaaaattctagtcagaccaagagaccggcaacgcacatgatctagaattgactcacacttgctgcatctcacccatcatgtactggctgatgaagtttccgctagaggaattcacccctggtaaggcctgcaacgcgttggtcatcgtcgtccaacactcgtcagcatctgttacaaccaagaatcgacattcacgacagacgcgtcagcctgcgcgcttcaatagaagtatcatgaatcatcctaacaccactgaaacacataccttgctgtgcgtatcctccatgtcggctctgctctgcaaattgaggtgccaacgttctcaaagcctagcagtcattgattgaagtcagcttggttacctcaacagcttctccatattgaaacaatcaaaaggcggacatacctgcaagaagactaaaggaggaactccttctgtagttctttccatgctgttccaaaggtttttcattgcgtttgttaaaccgttgtcaccggtgccgaatgcgccgttcggtcttggtttgtattcggtcagtgcggttcgtaattctggaatagctcgaagagcttgaactgatgcattggcgtaactatggttggatacaagtttcataagcaacgggttggagctgagatatcgagtaagcttggaccttaccaggtatttcccaagttcacaagcccggtaggcgccttagtctaaagagttcatggtgagagccgtcggcaagacaaggaagatgagactaggacgtatattaaacaacatggagatgatggaatgttcactgacagccaaagcaagctcggaatcatccatgtcttctaagaaggtgatagcttgcttgggagctacaggtaagggtccagcgtttccaatgaccatgatagcggcattcttgattcaaaagtagagacgatccggatcactaagcctgggcaaccacaaaccaaacacaggagtcatgggtatcgacatacaggtttaatagcaagcttcgtgagatcggcatcatccttgagcattcctcctttgaccataactggaacgagggaatagaatgttcacagtgagcaggatgatcacaaacgattatatgaactcttggaaaagtcaacgaacccttcattctatggtgtcacataagaatcatcaccaacgacatgtccgtaggagaaagatgttcaaaccaaataagcaaggccttccagccaccagcaaccatatagaaacaatatatgcatacctgtcaacaggtacaccagtcacctggtagatcgcattcttaaactccaaggctggccctgcaaggttgacttccaagggataggcctttccagcgtgtttgatggtgactggaggatgagtacaagaatttaaggtcaattaagatctataaatccattctttcaatcgtgacgagactgactggcagtagtagacatggctgctttgggcatggatgttgttgggtgggaggaagaatcaaggctgaagaatgagaagtggagatgagaggtcgatgatgtgtgttggaagtcatttcatatgtaaccatatgattgtgtaaccattgcttgtagccatatcgtgcgttctctgaccatagaatcatatctataatgctattctatcgatttagaaagaacgtcgttgcccaagctgctgtcgaacgtacaggagttccaaaaggcatcgaatctagacgattatctacgcccatcccagccacgccacccgtcttgagccaagtatctgtcaagggaatcccgattgttatcagaacagaccaggtccatagtctaccccatcgtccacctaccaaccgaccagtcatctgctcgaatatatcttcggctgtgatgaacagcgcattcaaaaggaaaaagtagagcattcttggaagggaaagcacccacaggcgtttgttaggatcatcacagagacatctattctgacatgttcgacttaccttttggctagcattcgatcgagcggatcaggtgatatataaccaagcatatgaagcagtccagagaccaagctatagaagacacacacggacagacagaactgccagtcagacgaaaggcgcaaaattcatagaactacgattcaaacaaaacgccaagagcgacactcacaacgtgctgaacaccccaccgaatctaccgcctaatttgcgacccggcttgtaacccaaaaagaggaatgtactccgatacatatgcttcattcaaaacatgataccatgggagacgcaagaccatcaggtttctctaacaaacgtttctaaatgtgtgttgtaaacacttacgtgccacctattcccccagatctctttcagtgatgtcgcatcccaaaatctgtcaaatagcaagggataatgcagtgcggctatccttggtttccttgagagggccgcttgtacgacaccaagcaaagcggcagggaaagcttggacgatccaaacgcacacagccatatgaaaggccagtacggcagccgaaacaatcgcaggcaaacgcacgtcgaacttagaaccaagagggagacgcagaggagtatatatcgatccatatggcgcggtctcgacgaatcgaaaatacggatgatacatccagaggcccaacgcagcatccatcatcatataagttctgactagatagagattgggggtgagactaagattagtgaaaacaaggacgcaccatgcagactcgtaagcgatacgacggtaagggaagaatacaacgtgtgcactcacagacctcccaaagacaattcctgatgattttccacctttcttcagggatgttggctaaagagtggtggaatctggattttgatggtcccgttgaccagccgatagcccgatatgaatagcagtatcccaatgctttctttagcctagccactcgactctcctgttcaactgtctctcttgatgtcttctcactctcttcctctttaccctcccagcctatccatctcggtctctgctctctgaatcccagctctagagctttcatcgtccaatacactgcctgtatagccagccctttgtttctctccttcatctccaatccggcatatcgaaacatatgtccaccatacagcacgagaaaagcgaaaggtagagccaatgatttccgaatgaagcctgtcggcgcaggcgaaaacaacaagtaagccagaaatatcaccaatagatgaggcagagccacaagaaagaccgtctggtcagtgaccgtccatggatcttttggaagcagactgttgtatgtctcccacagcggctctagagagttggccatgataatcgagggaatgtcttcaatgtatggaactctgagccatctcctaccggccaacctgcgttgaatgttgattggactgttacctgtatgccgctagacatcaaccacttgagccttatgtgaggctgatattgacacgtcaggatatctcgcttgatcctgcgtcttactttttcgctggcagatcaaaagaaaaaacacttaaagacactaccatcacaactcaccgtccacttctctttagtttcattccttgttacatcatctatcaaggaccttcttgttttcttttgctctaaacctgtttacagcagaccacctgcatagaatagattagcatgctttcccctcgagcgctcttaccgctcctggcgcttctgcttcaattccattccgcatttgcttcaatcctagcgatcgactatggttcagaattcactaaaatctcgctcgtcaagcctggagttccaatcgacctagtgcttaacaaagattccaagaggaaagtcggtagtgtcgtcggctggaagaaggatgagcgactgttcggtggggaggcatcggctgtggtatgtcttttaaacagctttcacgtatctcttccccttacttgtcagccctcgggtgatagaggctttttgcttactgatttgtacatatgtcaacctgcgaactgtttcactttggtctaataccatcctatcaacagtctggtcgatttcctcatgactcgtttccttatttgaaaccccacctaggagctccctttgaatccaacactacaactctgttccctactgtgcttacccctcactcaagccgaccgactttatctttcagctcgcccacaacaaaagagatctggtcggtcgaggagcttattggaatgcagttctcctatgctcgtcagctggctgaagatcttgccggggaacgagtgacggatgcgattgtgaccgttcctggatggtttactcaatttcaccgggaggccgtaattgatgcgctcgagattggagggctcaaatcagtcggactcatcaacgacggaacagccgtcggtatgaattttgcgatgactcgacagttccctaccaaggagtaccatctcatctacgattctggatctctttcgacctcggttacactgctctcgttccacacttatccggtcgtccctcattcgtctctgttgacaaagtcgtccaagatcaaggtcaagccggtaaacacgacccatgttgaagttcatggacttggatacgacacggagctcggaggaactcatctggacttgttgatcaagaacattttagttgcccaggtggaggagaagatgttgggtggacagaagggagagggtaaagagtgggagcgagcgcttggaaagcttggaaaagaggcagccagagtaaagggcattttgagtgccaactcagacgccgctgttggggtaagtgttcaaatttatcggtgtatccttaattcggaaggagatgggcagaacgggatcgaaagaaagatgatttggatctgacccagagctactcacgcaaaacaactgcagattgagtctctctacgatgatcgagatttccgaactcggatttcgagagaagagctcgagcttgccgctcaggacctcatcactactaatcggttcggacagcctatcctggatgctcttgaaatggccaacatgactgccgtatgttcacaagcctttgactcttactttcgcgttgtgcttgcattggatagtaataattgttgtttgtattccttttttttctttttcttttttttctttaccactaaggccgatatcaattctttgatcttatttggaggcaactccagagttccaatggttcaggcggccatcaaggcagctatcggagagtgagttcgcaggatttgtttttatcgagttcaattagctgatttccatgattctgcaaaaacagagacaagattgcgcagaacgtcaacactgatgaaggagctgtgctaggttcgttgacttccactttcggtaaggtcactgagtgtcacaatagtactcaccctcaaccgttgttctgcaacgtgccgctcgcatgataggcgccgccttctacggcgccactcagagccgacagttcaagaccaaagactacaaggtgactgatatccaaccatatgatatccagctctcttacgtcgccgagtcgaacaaagaggagagtgagccacgaacagttcacatgtctctcttccgaagaggaagcaagacgaatgtcaagaaagttttcagcatggtgagaaagggggatttcgagctccagatcagttacaagaactctgaagaatccaccgtgtgagtgctttgttcttttgactttcaaaaactgcactctatatgctcaggcactgaagtccaccaaattaacctaattctaccgacttttctcctgtttcatctcagacttcttccgtctgagatctcgacagtgtcgatcactggcctgagtgatgcgatccaaaacttgacgaactcgactaccgacccgaatgccgacgcgattgccaatccactggtccgacttacggtcgagatttccgacgccggcctcgtccatgtcgtcgacgctacgggtgtgtttgctgttgattcggcaaaagaaggttccaagggatggctgaaaggtttgttcaagggaggaaaggatggaaaggatgagttggaggttggagagggggagaagactggggagacggaaggagagatcgttgaaaagttggtgcctttgaaggtcaaagttagcggaggagcaatccccaaatggactgcagagcaaaagaaggaagctcgatcgaggtacggtctccttctttttctcctctcgtttgttaacgtctattttgatgatgctcattttgccttcaacttgttctcgttctcaaggcttctctcaatcgatgcgcttgaaattgcccgccgacaacgagaggaggctttcaaccgattggagggatacatgtaccggctgcgcgatcttcttgcacctgagaaggagggctcgatctttttccaattctctactcccgaggagagagagctcctccgaaccggtcaaagtgacactctggaatggttgagcgaggatggatgggacgctcctacaaaagaattgatcgagcgcaggactcaattggagtacgtttctatcttttctcgttgttgtcaattatcaaacagaaacgctgacggctgatgatttgtcttgcttaaaacaggaatattgagcaccctgttcagttccgaaatactgaggccgtcaagcgagctaagtcgattgaagacttccgggctgctctctgggccggtcgagcttgtaagttagctctgtgtttgcataatcattgtcatcattgatcttagaacatccattggcacgtcttgacgttctgactgatcaacatcattactgactctctctacagtcctcgcagacgcgcagacgaacaacacggctgacgtgtctgccgatcgacctgcaaagtacagcgagagcgagctgaacgacgtgcgtgtccacctggccggtttggaggaatggttcggtgccaagttggacgagcaacacaaccggcctgctcatctcgacccggtcttattgacgaaggaggtcgactcgaagggaatagatttccaagacaaagtgatgaagatgatcaggaggaagccgccggtgaagaaaccggtggtcaaagccaagaaggaagaagggaagaatgagaccaagaatgagaccaagaaggaaacaggtgaggaaaagacggagaaggaggagccgactgaagcgaagtcggccgacgaggaggaaggatcgaactcgaagccatcggccggacacgatgagctctagggtattgaaggagactattcaagaattgcgattagatgagatttcataaaactgttcggataagtgtctgatcgggtgttaaaccgaagagtgtgctgtccagacggaggttcggatggagcaaagggaacatctcttaccatgtgtgttgatgttgaactcatcggcccaagtcggatcttgattatcagactacacaacgtttcgacgggcttgaatggaaccagcagagcaaaagaccgttggacattctggttactcggttactctaatttactgcgcatatatagtctaattgcttggtaagtacttgtgggatcccggggttatacccgttggccggagtgcaggaaatccaattctcatctcaatcgccgtttacctttcaatctctttcttccccatcggattggttctgttctctacttatcatccatctcggtctcacttcataaagctatactctgcttgtcaaacctccaatctaaccttcctttactcttacactcaaacatggtcaacgctgtcgttattggagctgccggtacgtctgtctttctgttgtgctcgttcgtgtcagatgaccagctccggttaaccatcaccgaggcaacgatgctgagagaaaaggcacagatgggatggcg

SEQ ID NO: 2554 - DNA, 4368 bp, Xanthophyllomyces dendrorhous
gatgggatggcgtgccagataaatgatcttgatgcagatggaacctatctctgctagagatggatggttccttgctttgggagtcctgttgattgatctgtctcagctcacaaaactgatctgttcattgttctcatcctttacggcgaaatgaaaccggccaaattttcatctgatcctcctgtctgtcgaaacaacgttcgtgcaactcatcgattcgtataggtggaatcggtcaacccttgtctttgcttctcaagtccaaccctgcggtgaccaagctctcgctctacgatgttgtcgctgctcctggtgtacgtttgacctgttctctctgtcactttccggaaacgcctttaattgaatgttatttatatatcttttggaccatcttcaaatttctttcatcaacggatgattgcacgcgttcttaggtcgctaccgatttgtcccacatcgatacccctgctcaagtccaaggattccttcctccgaatcttcctgctgctctcgagggagccgagctcattgttatccctgctggtaagccttacttccctttgttatctgaccctttcaccatctcaccaacatctcctgacccagcttcctctctttttgtttccgatcgtgaatcatccgatcaccaggtgtgccccgaaagcccggaatgacccgagatgatctcttcaagatcaacgctggaatctgcagagatcttgctaagggtatcgccgaaacgtgcccgaaggcatacgtgctcgtgatctcgaaccctgtcaactcgactgtgcccgtctttgccgaggtcttcaaggcaaagggcgtctacgatcccaagaggtacgttttcctttgtactatcggcgccctatgtttgtatgggcaaactcaccctgactacttatccgtcgtcttcccaatatagactgttcggagtgactaccctcgatgccgtccgagcctctaccttcgtcgcatccatcgctggagttgctaccaaggcccctgattgtgagtccgtttggtgtaatttacttacttgtcctggccttgtgctgacatttatcgatcgtatctagactacatccctgtggtcggaggtcactctggaatcaccatcgttcctttgctctcccagtccaacccggccttgcccaaagaggtcttggatgatgagtctaagctagctgctcttgtcaagaggattcagttcggtggagatggttagtctcaatcgagatcactctggtcaatgtatctgatcaacgtgctgtcagctgatgatacaatcgccttgtaataattccagagatcgtcgaggccaaggcaggaaccggatcggccacactatctatggcctatggttagtcgcctaacgactttcttcagttacgtcctcaaagttgatcactgacctccatgttcgaatctcttctctgatcttgtcacagctggtgccaagtttgcagagttggtcatccgatctgccttcaagggtgagactgggcttaccgccccgtcttacgtcccccttgctgccgatcctgagggtggcaaagccattgcaaaggagatcgagcaggagctcgagttctttagcgctcagatcgagcttggagtaagtagaacaggtcgttttcatcttcttttggcatcttgttggatcctgctcactctctcgtactctcacatctacagcctgagggaacctccaagatccttcctatcgggactatcagcgagtccgagaaggcgctcctcaaagctgctgtccccgagttgcagaccaacatcactaaagtcggttctttacaacttctgatcgatgatacgaatctattctgacttgtcgctccctcttctctgattgtttcaattcaccagggatcggctttcatcactgagggtgattccaagctctgagtgtctcagtagctctctcttcgctgcttctggttgtttatgccttaaacgatttgctgttttctgtagtatttccccttctgtagtatctgtgccaatctttctatcttttttgggctcgtgggttcctagggtcctttcgcgatgtcgtctttacaatggtttgaccatgaccttgattggtctgggttgtctgtaataaagtattgatacatgccctgatgatggtcacctttcgatcagatttgtttattacacggagaatacagccgagcgcctgagacacaaggaaaagagaacagagaacagagagacaatagaaaggagacaaaaagaaaggtccaagagaaggaggatcaaaaggaactttatctagggaagagctcttaaatccgatgaggtcaattcaaaccaaacagagtcaaagtcatcttcctcctctggttctcctctcttttccctatcctcaagatccggatcggaaggttgatcgtcgatggatataggatcatgaaccagtccgctttgttctagcctaggtgattttgctgatcgtctttcactttcgtttgtccctcgaattgtttccgactcggagttcaggtctgaacttgaacctatgtccacaatctcgttttcgtatgggtataaatttggcgtggtatatgttatcgttgttgttgtttttgttgttgttgctattgttgccattggtcttgatgtcgattctatcttactacatgggctccatgatccagctcggatataatcctgtttcggagcaggcggcggaggaaacaaaggggatgaaatcaaatgaatcgtttctcggtctttggtcacatctgatgcatggacttgaggatgagcttgatggttgtctgcttcaagatgtgatctagaggagcgctgaagggctagagggcgcgctggtcgagtaggagtttgagagaggtgaatcgttggattggatattgatcggtggaagccattacggtttcggtttggaattttatgccattctctccgagaagtgtgttgactagatggtgattccaggatagcctttgattgtatctgcgattgcgatgagtagaggggtacagatgattgtcgaataaaggagatctcgctcggatcagacccaatgtcgatactcgagtcgtcgatcaaagttggttcgatcgcttctctctcttttccttttcttttctctctactcttgacaccgcccacggtgttctcttccacttcgttcccagtctgacctctggccagaaaggcatccatgaaagcccgttgatctttctcccccagcttttcctttgtccatctttccacctttctcgccttgttcttctccttcatgcctgatcgttcgattttcaaatcttgagcggcttcgaacgattggacgagtgatcgatgagtgagactcaggatatggttcgggagccatacgaggaacggctggtatggatctgagagcggacgggatcgtctaggttgatgaaccgaggacgggcgttggtcgtcatcttcctcctcaccgctgctaccgccgggctcttcatcctcatccgtcaagctttcagcatcaatcccatccgaacgcttttttgttcgcttcctctccaataaagaacccgtgaaccttcctagcccggccattgtctccttaacaaaccgactcggatcgatcacacatcggtattccaatgcgttcgaccgggagggttgtcgtctagagagcgtgatcgatttgatgaacgggtactctgatttgaacgttagggacggtggcggaggcaggagcggatcagaagatggtatctctgtcggaccgcccggtggagaagacaacaacgatacagctgccgctgccgatgccggcgctagcttagagggccctcccgtcaaggtggtcttctcgtgaacgggccgttttcggacagagaaatggtctgtcattcttgattgaggacgctcgtctactctcggttgtgaggttcgaacaagtagagcgacttccagtcgatcacacgccatgttccatccacctggataggcgagctctgcgggaagaaccctagtggccgctcctttccatagacatcgtctgaacttttctagcagtaaatcatccttccagccggtgattcgctttgtcaatccagcaatctcacctaaccctaaaccttccctgccgtcagtttggaagccaggccacccaatcacaccctcggaagcggatgtcaacggacggacgtatcgattcaatgtctgtatgttggggaaatcagaaggaatcgcctctgctgctttacgttgtctgcgagcgaacgtcttgtccttgttctccctgagggtactagctagttcggcacggaagaagggaagaaaactatcggtaaactgatcgatcggccgacgcttgtatgc

SEQ ID NO: 2555 - DNA, 9898 bp, Xanthophyllomyces dendrorhous
cttgtatgctgtaacaaggagttcgccaaacggaatgttttggcatggtcttgcttgggctaagagaaaagcgtttcgatgacccagtcctttcacgccgatctagggaagataatagtaagttttgatacagtcggaacgcggcttgaagggggatgatgtgaaagcggaaacgaacctgatcatagtctcctcctgagagtaaggcgacgaagattaagccgctcgagtctagcttaaatttattgtaaatcttgtccatccgaaaaaccatatagctgtctgttgctaattctttctcgcctttcctaatgtacataaagagcatttagagtatgatatcagtgaataagatgctatgagactgagaagatcggatcgtgtacagacctgggttgcttggccaacacgatgggcgctcgaaagaggagcgcgtcgatatcttctgtgatgactgcatcaagctgacctatcgagcaaagatatgccagttcagcctctgcttctccaggagcctattccaatgagcgctgtgtcagcaaaccatgacgaaactgaagagagaacaggcaacagacaacagaatcaatagatgcttacatcccaagtttcgaacccaaaggaatccaacatatctttgaacatatcctcgttgacaatctgcttgtctctatcaatgtccttccctctcttgacgctcggtcggtcctttccgtcaaacacaaatagcggctgaacaggggccgaataaatttgaaacagcttgtaaagtaagatccgggaggcttcagctgcttcaaatctttggtcgatggatgaagtactgatgagccaaatcctggtagtttcctcgatcggaccaaatgtgatcgaagtaagcaacgggaagaaaaacggatgatcgaaaaggggacgacttgaacgaacgagacatcgattcctactctcatcagcctatcgccatatgcctctttgagccaatagtcccaagcgagctcatgtagggaacgttcttctgcgatttcttccaaaatcgaccgaagaccgcctacaccctgtttcgtttatatcgacgagtttgtcccagtaaagagtgctaaagtgtttaacatccagtcccataatgcgagacaagcgactgtacaaacggacagaccatgtttactcagaagcggtcctgttgacttccaagtagtaccgatagacagagcgttgatcagcctgtctgagctcgatttgaacagtcgaccagaagaaggtgaggaagtaaatgagcgactgacgcgcgcatgagacgcgtcgatcgtaaccctaacacgcgtcatgattacgaccatggttacgcatgtaaacccaaggcttagaccaaggtttccgctacttcttgcttctgatcaagcagttccagcaacaactttatgatctcgcgtttctgtctatctttaacgcttctcttgagagcagcctggcaatcgacgtcgcctgacggctttgggtgttctaagtcagactcataccggacaaatggtcttccagatattggcggttgagagctgagtcaatgcgatcattcttgactaggacgatatgataaccgaggaaagaacaccagtataaagaagtcaagataaatatcgacttgatacaaggagagagatacaaacgccattcaagaacatctgcttacgtgcttaggatacctctctctttctgactgttctatcgtaaagcctcagaacatggatcacactggctttgtgtatgatactatcaacttgaaatgccaccacttcagtagtcttctctgcgcttctaatcccgtcaatactgtaaatcacagtcgctcatgccatcagcctttgatcgattcgttgcgtattcagaccgctatggctgatgatctttgccttttgactttatcccgtcctgctgtccgtaccgtatggtctgccccatccaccagtacgacacgaatgcatgtatgcattgctatgagattgcgcatgttcgccttccgttttgccacagcctctctcttattcttttgaacagtatttcttcgttcttcacgagtggatgcgtttcatatatatgcaacctcgatatcgctgatgagattctggtcatgctgacgtcagcgacacatactgaagaccaattggatacaacacaaagagtccgtccatccatcagaaatgaacatcactctcagacttctcttgattaaagctctctgtctcgtactaaccctgatcggataaccgtcgttagacggggagaggctcaaggtagaaagcggcggtgtgaaccaatctgatgtgttcttgccttaacccagacacctcggccggatttggccgaagattacgtaggaggttcaccttatacacgcaaacagctccactccatcatcaccaccatcgtcagcataatgaatctcggggtcggtttcggtttcggcgtgatgaccccatcgttccgtttagcttatcaaatgcgttgtcatttaatatctcctttgcgcttcgtgcgctcgttgaaatgaagacgaattcttgtcctccctggtctggtgatactctcgaagagatcaggtattctctaagttctgtctgactctgtggcatgatagatttttcgagtgtgatcttcagactgccgagaaattgatcgccagcccggttgcatcatcaggatgatcaattatccatcctcagtatccatagaagtggattagccacacgagagtttaatgcttaaataggcaatccttttaccaaagggacaaaaaaactccctcttctcgatccacctccacttgttgtttagtttgctgaaccaaaaaccaaaaccaaaaccaaaactcaagaccgtcaacgtcaaggaagagaaatcgaagaaggcagagagagagcaatgtcctccctaacagaacatcaaacagtacttccaccgtcccaaccttctcagcctacgtcaaacgatcacacagacgaccaatcacacagtaggcttacgccatactcaaacgaagaaccagcagatacaagtagagaaattgatagagaggaccatcatgtggaacaattcaagatgggtttccgaggaaaagttatctgtacgtttcgttttgtcgtcttttcccaatctccaggacgatcaaaatttatttcactcattctctcgtgtgcatggttgtggatgcgtgtcttcatctgccatgtcaactctatggaacactatggaacaaccatcagctgcgttaaacatggtgatccatcctaaaaattctgatgaataaatttactacgagttttacgcccaactacaaagctgctgaatggtgctcgcctggttctgtacagctccgccttgctttttgccttaagcttgcatcacttcgttgttcatactgtcttcaataccgattcgttttataacacactactgtatcctttcttcctcccctttgcctgcgcttcctatgcgatcattacacataccagattgccatgtatattgaaactttaatttctcgtgctttgtctatttcttcggccttccctggagcacgacacatcctactctctctcgccgtcgctttcttctccttcgtcatcctccataaaaccctctctgacggaccagagagcttccaagagctctcttccctcatctctaccccaatctcctccaccggatcccccgagtgaggcgcctcctccaaaagcgagacgcatgtctcctctgacagaaaggaaggagccgatagattgagtgaacgagtttaataagtgacgagagttcgtcgagcttgatagtgtcgaccagattgggatcgacttcggactggtctggttcgatgaagaaggttcgggtgagaaaatcgtcgaggggaaaggagaggctaagggcaatcgttcaggagcggtccgggtcgtgaacaacgggcctttcaatccagtcttttgttgaagactatcaaacaatccggatgcgtcctgctctgggatcccccgaaggacagattgggagaagaacggggtcgttgtctttgcgtccagcaagatcgagcgtttgagagcgagaccaaagttcggtaagaacgcacaaatgtcgatcaaagagaacatgaaggaaaactcacagaaccggcgaggccgccaactgaactaaagtcaatcccgcattgctttttggcaagttcaacatcccacaaagccgcccgaccactcaattcacaaagcctagtgtctcctctccagttcagaccttgcctcaagctcgccatgcccaacctatccgtcttgagacggaggggcatcaaaactgataccaagtgacttgctacgagcgcggaggattgaaacagatttggaggggaggacaacgcgggaagccattcgggggagggaggctggacaggaagcagagtagtatctgcctgtaggaggctcacgagtgtctgagcctcggtaaagatgcgctgaaagaggaaagacacaagcgatttcgagtcagagagctgcttccgattgcctcaatgtgccggtagaaatactcgtcataaatgaacaaactgtaatcgagttgctctcctcaagcccttccagagagcccatcaggccggtgacgaagacgtctcctttagggtattcttcctttatgaattcttcgactacacctgcaccgattgggccgaatccggtggacatatctacacagagttgaacaccctgaaggagatcagcctcttctgcgaatagtctaaaatcgtcctccatatgggagtcggtcttgacggctgaccaggcaagcgaacccgtctcccacgaggtaaaccccgagacagaggccgacacagcagaggagccgagaaattgtggaggcaagggatgtaatgtccgtggatggtaatatactctgttaaaatctgaccagaacctagtttcggtcaaccgaggcggttggggtaatttgtcatcgttgtcattgtcggcttcatcatcgttgtcagtttcataagttggatctggctgatcagattcgagaaacgtttggtaagctgagggagggatcggaggagccgtctgaagtctctgtagtctagaggtatggtcaacggaatacgagcctgaccaaggatcagaataagcgagcaagaaataaagggcctacctacttttcagctgggccatcagtcaaaccatcttcgtcctcatctccatctgtagtgccgtagagggcgttgatgttgggaagcgctccaaaattctctttttgtttgtacgttttgtttacagtcgtcagtgatatcgatcagccaggtgttcaaaaagcaaaataatacaagaagaacaaacctttaaggtcgcatgcgatcaaccgaggcatatatgtttcctcattctaagttcacgccgtgggacgatcagaaggaaagccatcagtatattggtttcacagatccagacgttctatgcaaacacacctgtctgcccaagccttgtctccagtcgacgtcgtgagcgactccgtgatcgacatcctgatcagtataggcaaagagtgattctctgatgttccagctgtgtgtcccgacgtggtttgatctcgggccgagctggaagtgaaggatctcgtgcatgccttagattcttctgacctggtataccggtctgagtagaagcaaggacaaggtgaacgaaacctggaaggtgggatggatcaagacgaaaactgaaggatggagaacggcgcgtgaaataatacatctcgaattgaacccttgtgttctctgtacgtcatcaaccatcttgggctgacattgacgctagagaagccgttcttcatctgtctgtatatccttcactttcgtcttctctggatctttgagaagtctgtctatcttcagtctctcagagttcatctctgtagtttacttcttggctcgttgctctcattcctagcctgtgagttgtgcccgtaaacccaatcccgattccgatcgtcttgggttcttttcagattaaggaaaaaacagaaacaatgcctaggccatccgcttctccatcacgatctccttcagcttctcgtaggtcacccgttctaacgacaaatcgcgaggacgtcatcgagctggacgatccaactgtaccttcggcccatcgactgtcaatctcgttttctcaacacccggtcattcacgatcttgtcgctccggcggatgttcttctcttgggcacacggtcgtcgcggttcgaactgccggccgaccaaaaatcaatggcagcagaccaggaaacactcgaagaagagatgataagcaggaaggagcgcgcgtttgcgttgctggtcgcatgtatgctcagcatcggctctcactatggatcctatttgcttgggcctctaagtgagtatcaatctgtgtatgtgtgaaagagacagctatctgtgtgagcaccttgccgatcattctcattcattgggatatcctttactctctcttcagaatcaaggctctctagagagatgggcacgtcgaacactcaattctcattgctgctcgccgcgttgtcgtgagtccttcttatactgcaaggtccaaacccggaatgaaaccatatacctcatcgaccatccttcatcttttagcttcaacaacacatggactcctctcgttggtggtatcctaacgaccagattcggaacccctcttgcctctatcattgcaacctccattgtcttccttggccagttcattgtcatgctttccaccggctcgggtggctccggaagtataaaaggcatggcctgcggactgtgagtaggctcctaacaagtctacaacataggaacaactcttctgacatatccatgtgggctcaaacataaaaaaaattagattcatctttggaatgggtgtctccccattagccgtcgtccaagagactatcatcgtccgatatttttcgaaccatggtctgggggtctctcttgcgcttggcctagttgccggtaaaggcgcgagcttcctctcatctatcacaagctacccgctctccgactattttgggatgcgagggccattcgttgtgagcacactgctcgcagggtgagtcaatcctgtatttttattcttttcttcttgcattctatatcgagaactgatagccatcaatcgctctctcgtttctctatgaacgtcttcaggatgagcttcgcggtcaacattgtctacctcatctttcatgcgcgtgttcatccggcttcatcgagtaaatcgcaagaagaagcagctcgaaaagttgtccaaaaacgatcagtcaagttgcttaatttggcccgattaggaggtccgtcataatcctttttttatatttttgcattttcttattgagacttccctactaaccaagtcaagttccggctttcgtgaccgcaaccgtgccaatttccgatcagatccattctggatctatctcttactcaacgtgttctgcggagcgatctggagtccctttctgcatctgtcgtcgtaagcttcttttcgtctttatatctcacattcagaacaacctgtctcaaccccttcataccctacagcaacctcatccagagacgatatcaaatggccgacgcccggtccgcttcttatgcctcacttcttcttatgggttcaatctttctatatccactcgccggttatatccacgatctatcccatcggatgcatcacaacaaattcaaggctgctcgctctccttcctcctcctcttcctcatctgaacggcccggctcgtcatcccacgtggtgtacaaactcctcacggcggcatccgttcttactctgacatgtttcatctggctcgtccttccacccagttggacgaggacacccatcccggccatgctgagctttgggcttggtcacggctttgctacccttctcttggtcctggtagttcctggattagttggacccgaatgggtgtctactgctctaggggcccataagagtgtaagtagaacgctcgttttccacaagctgctgactgtttgacttcttctctccaacctggccatgacttcactactgatcaagcggatatatctaatattgcaattcatcactcttgaccagatggaagcggccgcgactacgttctctcagacactttctggtcttctcctcgacacaaaaatcagaaaaccatcagcccttcctcctgtctcctcaaacatcacagacacaccctcctctttgttccattcggtcgtccgtcgagcgccttcaaatgatgagcccccaaaagtcatccctcccaacacgcctgccgttacggttcttcttttcacattcttgatgataaatatctgtcagttggtcaccgtcatagcactttggaggtcggtaagaagaattagaagaatgtcgagcgagatgtatcgacctgtcggagatcgttttgaaagagaagatcatcttgaggaagaatattttgaagatgttcctgatgaagacggcgacgatgatgatgatcacaacaacatcaacaacaagttgttatcaccgtcggcccagccttccccttccaaatatacgcaaaaatcaagacattcaagatcgttctcaagctcttcaaaaagacctttactctggtccgatcctatcggttcatccaacaccatccactctcactcttctgattcaggcgatgaagctgaagaagggacggatagcactcatcaggaaaacgggtcgaggtcccgagcaggatcatccagaatgtatcatcagcgcgacgaggaagaagaagaggaacgggatagagagttgaagcgaggaaaaatattcttcgcgttgagttttggtttcttgatcatcgtttgggcaactttcggaactgttatccttgtaagactcggtaagacccggggctgaacactggttcattgacttgatctcgacgatgctgtaattgtatatccaattgaatgtcatttcataacaatgagaaaggacgattgattcttgaccgacgaaagatgctctttgaatatgaaaaaaaaaactagactaaaaatcacatgtgtacacaaggagcctcaaccaatcatgaatcggaagacatactcttgagaaatatagccccaaagaaccaaagatatgatcacaatcgaatccagccatgctctcatcgccgaccttgtttcttccttcggtttcaatcccggtccctcctccccgtttttgttattctctgatgacccgatctttaccctttcgatcgacttatcaccaaaatcaatgctaatgtctctgggcgaatctacaagtataggcctcaataggacgctcaacccaaaaccagctcctaaaccaccaaggaccgtccgaatcacatactccctatcgatcgtctcaaatccctctgttagactctgtacaagatgcccggacgagactgggaaagaacggatgatctgatagacgagtggcgaaaatgagtgtgtggtgtatgatttgaatacttgactcaggtggtgcatagggaaaggaggcgatgaggtcggcatgattattgatgagctcgatgtggccagctcgggtctccaaattgagacgaggaggagaaggacaagtttgggacatgaggaaagttgaattgataacggtgtaagtttcgtactagcatagagacgcagataaaagaagttacaaagaaaccatgttaggagttcccaattgacaatgagagagcgagagaatggagggagagactcatacagcaaaaaaatcgacccaagacgagaacctcggcgtgaatttgaaccacgggtgaacattctccaaaaagcgagaactaatattattgccaaggtgatgcttccctga

SEQ ID NO: 2556 - DNA, 9267 bp, Xanthophyllomyces dendrorhous
tccctgaaacgccaacgaatccatgaaggatacaaccaagcatctcccgaaagacgtagaatgtcctatcatcctgtttgtatcgtctgccgaagtcgaacagcgcatcgttcgccaacggaatatggaacagtctcgatcaacccaaaacgcctagacagagagagcctaagtaatcaagcaagcttactatttgaccagaccgttgcccatctcaaatctttccgtttaccatacagcacatgattgtgaagacacgacatgaggcatgttttcagctgtcaggcctgtgtgacgattcagaagaaagataacatgccctacaggattcggaaaacactgtgacgatagtcaagtgcataagaatctggtttatgaccttgtttgtcgtatccggaagaaaacgaacagaagcttagagaaaaggatgctagacacggagagaacgaagagaccaatttcaagtacctcttttctctcatccgacacgatatcttttggacccttctctttcgacgtctcatcgcctgactctccgaattcagactggccgaccttcattggaggcgtccccctgttgaacagtagatgtctatacacctctgcgttcataagtacgaggtcgagtgcaaggacgagtaagggttgttcgacatatgggtcggcgaattgatgacatgttggctgaggtagaggatggtcagtgagtatgttggcagagatcgataactgctatatttataggagattggaagtaaggcatacgtacacaaagagacaaccggacgttcgttgcctaaatatacatatgtcgttgtttaaacgcgaagaaaatcgtcaatgcagcgaggaccaagagtcgaaaggaaaggttagtggtatatcatatcactcgactgtacaactcgacgacaatcttgtctaggatcggaattcaccgaagaatataccgtccatagggacgggatgtatgttgtacaatgtacgcatatcgccatgggtcagaatatttatcaactgtatgtttcagagaaagatggaaatgatcgatgagacatctggtggaagtagtgtaacaatctcggcgaacccaatttgctctcgctcataatttacagactccatctttggctcagaatacgctaaagataggaaacaacacttcattcgatcgcatcgaagacatatacataatagacacagtaacagagtacaagatacaatagtggtaaacaaccagtagaaccctgtcatgcagaaagttcatatgtgatcaaactgtctggtcggcttctcctagtgatctctctggatccgggttaaatagcctacccgcagggatcaacgaggcctttgggttgagaatcaatccaaacccaggctcgtccgagacgttgattcttccacctgatattaaatacaaattcagtcttgcaaacttcgacgagctcatagtgcgcacagaaactcaccaataggtataggctcgttcaagaacaaatcaccaaatacaggcaagattgactttccatcgggagagttggcgatgtactcacagaatggagtatgcggttgagagatgatgaagtgataggagtatgggcccgatccatgagggaccacgggaatgtctgatggacatttaaatgtaaagtcagtgatcgaacaacagtttaagctgagtgtatagagttgggcctgaacataccataggctgcagccatagcgctgactttaagaagctcggtaagtcctccaagccacattacatcaggttgcagaatgtcaattgatcgatcctcgatgagctttctaaagccatactttgaatactcatgctctccagtggtccacttgacagtaggcatagcttttttcaagagccgatgtccgtcaaagtcatctgggtgaagacactcctcgaaccagttgatgtctaatttttgatctatgcatttttgagcaagctcgatagcataagggaccttttgggatggagaataattcagtgactaagctctctaggttgtctgagttcaatgacaaatatatggacaccacgtacgttcaaagacatgtagcaatctaccatgattgggaagctgcagaaaatacacgcaaagcacaatcaattttactgaagtgagattgagaacccttggacgagcgcacaacactcactctggtccgacgctctcccgatgttttcggagaaagtcaatgttcttcttcattccgatgtgtccttcagcaggacagtacggaagaggcactttggctccccagaatcccatttctttgacggcaggagggtttggcccagtacagtagaaaggaatttcctctcggcaacgaccaccgatcattttatagacaggctcttttcgaagtttacccaaaagatcccagactgattgaagaagcacaacactcgataaatcaggcttggttcattatgagggtgcgcatgtcagaatggactcacttgcgagatcaacgacagagatggttgcgagagtgatgccctttcgaccgtagaacattctgtcaaacaccgagccgcgcgcaggttaatctttgttacaagagggatccaaatgaaaacgaagcgattcacttacgaagctttaaacaattgatcccaaatcaagttgttgtctcttggatctttacctacaatgaatcgcatgaaatggttctcgatcaaccaacaagagggaggaccaccgaaccctaaatccaattcgaaacgacattgacttcagcgatacaaatcagatctgttcaaacctggcaaagagaaatctcacctgtggcatatccaactgtcccatcagaagcggttaccttaacaaaaagacttccgagcacgccaattccccatgatgttcgggacgccctgtattgttcgtaagacgacataggattcgagatggatgtgtccacgatccagtgaccttgggattggttgtgatagtctcctcccgatcctaagaatcccaatttgaagtcagctagaagtctttctggttttggaatgctaagaaggagaaatgagaaatctggaatcacctttagctgatggaacgaaagactcgaccatctcaattgtaggaaacgtgttcgcagaaccattagtagtggccatgttgactatgaggaatatatatgttctggtgagcgcaagttatagggatgaacagggtgaacaggatgagtgaaaagaaaacgaccgaaggatgtaattcattccttcgccttttgagaagccgagaaagtacgatctctcactcggcctattgttcggaccgaccggcagaacgaaattcggtcaaacattcgtccgacagagtcacgtgatattcctcaagagctcggctgttcctctgtccttctataatcgatgaactatcgtacgacaaacttccacgtacacagtctgtgggtgatgatggtgacgataaagatatgaaacagaagagaaaaaaagatagaggaagacacctctttgagaagctatatgtttgagacatgcctcggatggtcctgcccttttccgtttcattaacgccttgaacaaattgctcagaagatcatgaactcgttacctcgcagtcggatacgattcaaacttggaatagcaattggtgtttgtgtggttgtacttgcctatgcggttctaaaagtgtacctgcaaacaggatatgactcaggtaagtgtaggtatgttctgagttgaggtttcacatcgggtgattgaagtcgtgtcgttgaacttacccatttactgattaatattcgagatagacatagtaccatccgctcgtccgggaacccaaggattccatggtatcaaattcaagccaggtcgcgtagaaatcatattagacatccaaagagataggattcctatgggtgaggtatgtagaaagacgatcttaagcgatagcttgcgcagtgaaccatctagcttattgaccgatttgatgattttcaaagatttggccacgataggcatatgccttggaagcatgtataatcaattcatgaaatgtactcttcgacgagcttgtatgtgatttgccatcatttacattcacaaccatcaatctagtgatgacagaccgccagcataccgtttggcttagggcttgaccaatggtgacgagtgactcaccgaggacacagcctcgatgctgagtacagcgttctgggcaaactgcgaccgcgtcccggacagctccgccgggagaagtcgcagtggaacaccataagagctgcatcgcctatatcggtctgcgaggatcgaagagacttgaggaagactaagaatactgacttataggaaaagacttaattggatcctcttctgctttttatcctcaaacgcaaaccaacgccaacaaactcaagcgattcgaaagatgtacacgacatatcgacaatcctccttctcgtcttctcccttccgagtagccctctcgctcatactccacctggccctcgtcattcttctcatcttccccacattttctgcaccctttttgaagagcttctacttcatccggacagcttcatcatcgagcgcaacggtctacggagcgttcggatcctgtacagaaggaaccggaggaaagtgcacttcgttcaaagtgggttgggatggtggagatatctttgcgccacaatggttgatttctgtaagcacttttctctgtcttctgtctagtcttatgtatgaatcttgtctaagttccctctgttcttcgaccctcgttcaatcaggctatggtcacctggcttcctgcctttggtctttcaatcatcactttgctcgtcactctccccgctttgttcaggcgccctatcgttctcggtcagtctatactattctctttgctctcggactcatgacgtatcagtctgttcaaagttcatgctcatatcattccttaacccaacccatcaaacctaaaaggtctttggagaatcttggatttcttcacttcgttagcaacaagtctctcttttggtttcactctgtccttgatgatgtaggtatctgtccatcatctcataactgtttctgagatcgctcaaattttactaatggctctcctcggctttgaccaccgatccatcacagccgtgcaaaggctgagttgaaggctgccggttacacgtaaatacttcctttccctctttcactttatttaccgagcattctcagactcttctgaccaccgattcttctttctctcgatttctcctcagcacatcatcatatggctctgcgctctggataggcgctgcagcactaggtgtctcaatccttatctcatttgtcggtccacccatcatcgtccgtgcggtcttcgaatctctacctaccggccccggagtcaacgacataggatatgtagatcattcccaaccacgagggttcgtaggttacgaaggatctccggctccaattgactcgcaaagacatattggcgaatatcaggagcaggagcaagagccggtggcgggcagaggaggatggttcgcgagattcgacagaaagaaaagagcgcaggagaaagagttggagagagaggagcaggagaaatcagacagagatcgaagggagggtagaatcgccgaggcaatcgtttaatacctttgacagtttctttctcgtaatatgtttttcccactgtaattctttatcaatttatccggactttgcactgcaattcgtgtagatcatttttgatcgatgtaatagaacatagtttatctcttgcacttttctgttcatctactcttgctgtatttttattgctcaacagacgatgtggaccttatctctccttaacgatttcgatgttcctgtacgctccgatgagcttctggtttttttatccaacagaattgaaccgaaataaaaccagtatacaattccgacagaacgatgatttacatcatcaaatatttcaacagactgatgaataaataagacacagaaaaacggcgcaagatatgcgcaaggcaacaacgaaactatcatattcgcttcgacaggtgatgatcaacacatcctaaaatccttcatcggtcttgatgtcatcgaacagcaaaatcaactctacatgccgagaaagaccgatcgtacatcaatgaaaattgcaaccaaaacagatcagcgccatatacatattccaacatctggtgatatgtactagataaattgacgcaccatggtaccaggccaagccttcgagatgtgttttaaacaagattttttcatcaaccgtgtgagccgcaaaggatgtgccaatctaaccggatgataaacaacgtgttggacagtgatcagtgaatgaagtcatgaaaaccttcgaatcgaggacaagacacgcactcgtcgggggacgaatcggtaaatatttttggtcaagtcccagtaccacttggtgtctctgtatagcccggaaaacattttgtttccatcgaacgtcatcagcgataagaaagagagcagagaacaaagagcagacgtacgtgtttccagtagcagccgagggtgagacgataacctcatcctctccatctttctcaaagactcgtctagacgcccatccaaacagatcccaagcctgtccgtgaacaggggtcaaaggagccggtgcgagcggatcatctccttggatatcaattcggatcgtaccatctgaaccctcgtgcaagacggttttgttgaaagagatcaacgtaaagttgtaagcctcagcggtaggaagaatggagtcagtgtagatgtcgagaacagtctcagctacaagaagaggagatagatatcaaaattctggtcagtcaagattgaaacaaaaagatagtaatagttctgtcttacgagactgagagaagtcgattcgagagttgaagacagctctggcagattcaggcaatgcgttctgtgagatgagattaatccccaaggactggtcaacaacgtcgctcaaaatacaaaatccaatgaatctctgatgcctactaatttgtgacctgacacaacatattgtcaaggaacaagataagaatcagcgttgttggaatattgtagaaccagaatactgatcaagtgcttacctccagaaatcaaagtcaccgccttactggtcctgaccaaaaactctcctgccattctacctctgacttcagcgtaggcagcagccagcttgtccagagccttctgggtttgctttccctgcaaacccttcttgagccctgtggaaacaattcagattgagaattagtattcaatcagatcagtgtgcgattttgaggatgaacaaaacgatgcgaacaggagggaacgagcgaggggacaccatgagtggcaacgcagttcatgtaaccgtaaacaggcgaagaagtgtgcaaggtgggcgggaagaggttggcgtctctgcaaacaatacgcattgaacaccagtttgtcagtttcagatgattctcgattaaattagctcatcaagagagagagagagagcgcactcgacagaagcgacaatcctactaaggataccaataccggtatgcacggaaggcgttgaactgatccgaggacatgaacgagttagtcgagcaaagacgtagcgctccagcacacaaggaatacatacctgtgtccaccttcagtctcgaccagaattgccgggctcacgtttcctttctctgctgttccaggcaaaatccagagcttcccgtacttctcttcaactccggatccaccttcatctactagcatcgcaacaccgtttgggccgtaggtatccaggagatgctttccaatagcagatgcaccttgaggcccaccaatctcctcacttggattattcgaaaccaaaatctgatgattagctcgatcttctctgcgaaaatatcatttcgatgacaaagacttactcaaacccgaaggcaaggactaataatgaccggaaaatgacgacgtggaaaaaatcaggatgatgacattcagaaggagacacacgatggaattgactgaccgagcgttcgcctattcttccagccttgctcgagcctatgttctaaagcagtcatgatggcaatcaaagagtttttgcagtcactggatcctcggctacatttggcgagatcatcaatgataagagataggaaaatgagatgacgctcgatttcgacaataatcgattagaacgaatcacttacccccaaatatattcgccgctggaagtttcgaattcaattcatgtttcgtgtgagcttatcatccattgttagatgtacagatacacacgggactgactcgaaaactcccttgaacggtggataagtccatctatcgagggttgaatccggcgcaggaacaacatcttggtgggcagctgtgagaatgatagatcgttggatctaattagcttatttgtctcgccaacaaatgaaaagaacatggagaacaagcggagagccatactgagaaccagaggttttagcttgggctccgatcctcggagggtgtaaaccaggttgaatcggtgctaatcatccatacaagatgaaggaatatgttcagaatagagcacgaaagtagaggcccaggagtgcttgaaatcagaagctcaccgggttggctagcgtcgtcttttcatagctgtagatgtagaggaagattggtgacgaatgagaagagttagtttacagttcacgaccagatctcgaacgtgtctctcatgaacgtgaccaactcacatcaacggataagtttcttccagataggcatgcagctttttgaatccatcgaatctcacatcataaccttctccttcttcgaactttgcgttagtcatatcatcgtagctctgggttggaattctgatagctcctaggaaacgctcaacctccttagccttgaacgtgtcattctcaaagatgaaatcgcttcgagcagtgtcggagatgtatggaacggcgggagcctgcacacaagcattggataccgcaggaccagagagagcgatcgatggagtgttgtctgtaaagttagaaaaggtgtgatgggcaacagggagcaaaaggagagttccagtgatgaggagggctcgtctaaggggagtataggtcgtcggggttggccgagaagacgtaggcagaggaataggagccgctgccttctcggagatgggttctatagatgacattatcgattgtaaacggatctgacaagacaaagaagtagaa

SEQ ID NO: 2557 - DNA, 2544 bp, Xanthophyllomyces dendrorhous
agaaggtgatggatagaaagagaaaggaaaactggaggaagaagaaaccgaacgaaagaagaaagaccattctttatttatacaacgttctatcctggctcaacggtcaaatccgatcggccttgtccgttctgtttcctcagtttgtctcactcctcatccttgcttttctccttatcgggcctgctgaaaaacattgccatcagacaatcccaaaactagccggtatagagctcggtaagatcatgtcgtcttgactcgctccttcttcccagctcccaccgctcccgtccctttgctcttcgggccgtgatgagtgttgtattgatgattgtcttgatgatgaagacgatggagatagatcctgtccctgggaagtccttgatggatgctgaggtggaggaggaaacgagttagtcgagaacatatttagaggtcgtgaaggttcaggtcgacgtggattcaatatgggaaggatcaagcggtggctgtttcatttcaccatcgatcatttttgtcgcaacggccaggaagcttgtcagtcgatgcacatctcggagcactcgtaagtacatatatagaaagtgatcacgcacgcatctttgccctataaacccggccgagccagcatgagttgaaaagtatcatcttagtattcgttcaaaacgggacgatcatctgaatagagaggaagttgtgcattcaacttacattcagatagaacctgaacaatcgtttttccttcataaaacccatacttgaatataatgctaatgctcccaggttgtcaaattcggtttccaacgcgatctgttaatatcgagagcgatataatcatgctcgtttgaacgtcagaccaacaggttctttgtgtacgtgatgaaaacagacgtaagttggaaagcatacctcttccgaaccattagcagtcattacctctatcgctatctctactagccgactagcgatctttcgttttcgatactgtttatccacactaagcatagcgatgtatcctcgctcgcgcttcatccggtgcatctcttgtttgcatacgacgataccgatagggagagcggggttcagagaagaatatgcctgccgaagacaaatagagtcagcgattgaacataacaagggagctttggagaacgcctcgagttctcacgaagtacgccaagttgggcctgtaacagaatgaaaagcgatttatcatttcgaacgttcagcgattgaccggcttcggtaccagcataagccctatggacatcatcaaggtcgttgctcaccactggtgtaggaaatatctgagatcacgattgagttgtgaaaccaagttgtgaaagaggtcagtcgtctgtttcaagacgtgatagacgtatcgtgcgacaatcagaggcaaacctatatgtatagacctgttcaagttcaatgcagagaagggctaagtacaattgaaggctcttgggcaaaggcgacaagcaaagacgtactgtgtatggctcgcttaattcggtctcaactagcctcatcacatgctcaatctcgtgttctcctccatatggtcgatacatgatctcttctgttcgatcctcctcagtattcatatggttgtttgatggtacttccaaggaagcatttgaacgaggcattagttgatgttcagacagatctaaacttgaagacggactagcaggggaagaaaaagcgtcaaggtcaggagaatacaagctaagagacgatggcaatgaagattccatcacgactgtatgtggatggcgatgatggaaggatgcaagaacacagtcgagaagaaacctcaactttcaatcgtcaaccttccatcataaccatcattctccttcctctcgatcattccgatacatcgtcgcgtcgtccgtatcgggtctgatctcttgtactatcttacatgtctgttcctcagtcagtttccaagaagaatccggaagctgcagctcgtgctcgagcacatcgtgctcagaaagaggcagccgttcagcaggtcaacaacgcatccgctcctctggcttctcaacctcgaccacctccttctcccggtccttcttactacactcctggcaacgacagttatagaaccggtaattcttttgtagggggatcggttcaacagtatgagtattccaaccgttcttcaaacccagctcatcaatatcaacaacctcctcagccatatctctcttcccaagcacctcggcctcacccgggatcaacactccaagaacagtcgcagagaagctcataccatcagcctcagcctcaggttttctccgggggtcacactgggggagctgagagaccaatctctattgtcggtccgccaaaggcggcgatgatgcggccgcccaccatctctgcctcatcttcgtctagctctcttcctctctcggcagcttacaatcttgaacgagatacaaccagacctatagatcagccctcttctgctcctgctcctgctcctgctcttgtttcttcaagacttggttcttcaggccatcctaattc

SEQ ID NO: 2558 - DNA, 4768 bp, Xanthophyllomyces dendrorhous
gtatcacaatctcaaccgcagtaccatcaacaggggtatgctttacagcctgtagaaacaaacagttcgaacgcgcactacttggcgtctgaaggaacaggttccattatgggatcggctggcggatcaagcattagatctggagcaagttcttcatatatcgggtcgatcaagcgacatacggatcgactgttaagtacgttctttcacaaacctatccagttgaatgcgattacgccaagattaattatgattcatactcttcgatctatattgcgccgtttagatctttcgagaagtaagtaccataatcgccctgtcatggagatcgctgaggttggtgattgcctacagggattcatcatgttcacgcactgtttgtgatccataggcttgagaaacatgctcctgcgaaggactcacgttggtaagtctccattcaactccctaactgtgtctcgttttgcttttgctgatagcgacttgtctcagatcaacatttaggtcatgttgttcatgctattgaaatcttttcgagcaatttgaacggacacgtgagtgattcttgtttgaacattcatatcagacttactgaatgacaaatctcactttctgcaaaccagatcggccgtctagaggctagagaactggacctcacaggacaagagagtcgcgcattgggtatgttgtactgaaagttttgtaatctagaagaagatacatgtgaggcttgcagctaagactagggatcgctcttttggaactcagcgtctgttgcgcgagatttcgagaaagccgcggtgagtgattgttttcccttcagtgtttttgagaaaatgatacgtctgggtcctgagaaattcgtgttgtctgattacttttaaataaattctcttgctggatgatgtggcctgactccaaagatttggatggaggagaatcagcagtatgtgaacttagtagcactcagatccttctctgtttgcaaactacatattgattgctcgatctgtgttaggaacatcacctataactggcctcctgccaagacggccaaggttctaaaagagctggatgacgggctcacaaagtgtcagtccatttgattgacacaagtcatacgaatattagtatatatgaaatgcggcctaacctgaacaatatatacttatccttttggatcttgtagccttcacggcaaaattaggggttgccatctttgagtctctccaagtaagtggctctttgtcggtctcgtcatcaaacatgcaatcaagatgccgatcttcttacttgattgcttcgatgtttcaggatactcgacatatctccatgcatatcacccgtcagatcgagggtttagaggccgatttaccaggaatgatcaaacgtatcgttgcacaggccaattcggagacgatcgagaagacaattcaaagattgaggatagaggaggatgcgctgaagcctttgcaaggatcctatggaggcaatggaagacctgggggaggcagcgagttcagatcaggctatggaggaggagaaggttcgttgatcattttcagcaaagttacagtgttcatttatatcggactaaacgtttgggaaacaccctttctgcagctgagaaaagtgagttagctcagcaacccggtcgttatatactctgttactctagctaataacttttatatctttctcttccaaagccatacagagtctgatcgacgcgctcgagacccaacggcaagctcaaatcgagaaggaagaacgacaggcagccaacgaccgaatcagctcatctcatggcgctcaacaatcgacaggatatcctggtcagcttcaacagccttctaatctaccgatagcaggaccaaccggaggaccgttttcccaccagccgcctcaagctgttcttcgagacgacgcttctcttagatcaacaagaagcgactcgacgacgacgctaggtgcatctggagggttgaacatttcggggatagttctgccaggctcgatgggtgaaaaagctgtcaccagttcagagaagcatggcgcctggggggaggatgcgaaaaacgagggaggaggaatctcatttcaccctagtttgtctatttgtctatctgcttcattctcgaccacaactgatcagggatgttcttttttcacccgaaaaacaacagtcgaccccataagcaagatggaattggttgatcctgtgctggctagcgatgggtatgtgcggttgttctactttgtccttaacatgaagacgtctaacaagctccattatcctcaaaagcttcatccatgatcggttcactttactcacacacaaaccaaaccatccaaccaagccaaacgaaccgctccggatactaggtgacattggtcaacttcgaaccgccatcttcgttcggtacccagagcggaaggacgaatgtttttctcgccgagctcaattcacagaggaggccgtgagacattcgtctgatttcttctttgcagaagttggagatgtcttggaaaaattatctgctgtattgagttggaaggctggcgaagaggttcgtttagtttttttatctgtttataaaaaatctaacacttggcagagaaataaactaaaaacacgacttaaacgaagtataggacgcaggcttgctggtgagacgagggattatcagatggcgtattcggcatctgactggtgcattgtccgacttccagaccgctctcctgctgtcccctacgcttccgatctatcggctgcttgctctcgttcatctcgaactccatgcttacccggatgcgttagacgctgtagagcatgcgctgaggactgatggatctgactccatagcgctcgccgtcagagcggtcatatatgctgaccaaggcaagttgactgaagccagacgagtgcttgacgtcgcttcttcttcggcaaacaaagagggcaaagaatggtcccaggagtcaaggacgtcgaaggcagtttattcaccaaagccaaataggacgccggatacggctttgcctttgttgtgggatgtatcccatctcatggtggtcagcctgcttctcttttctctttccatttgttcataatgatgaagtactgtgcttatttgttcctaatttggctgatagggtttcgcattcctagcacttggagagtctgtcaagtaagttctctggcaaagaggtctcaacctgcgatggtcgacgtacatgcgttaatttgttctctctcctgtcatgcaaagagcggctgctcacctagcaaaagcagtggaaaaggcacctggaggagattgtttctctcgggcactatggggtgagactacgttctttttcaaatcctcatttctatgaatataaaaacactgacagatgtgaaattttcgatggaacaggctacacactcgtggagtcagtagaaaatccatgttttttcccgccaacactcaaatcttttctaaactctgtcttgtcaatattcactcgaacccatcagaagtgcagatggcgatacgaaagaagaaggttggcgagaattagaagccagtttgaaactcgccggtgatatcggttctcgagtgttcataggtgaagaatccgaaggactcggtccaacccacaaaccgcttcaatgtgtgttggcctatatctatttctttcttgttcttccattcgctgacccagatgatatcgatctgtctcaaactcaagctgcggtgggagttctcttggcccaagtgacagcgatcgatgataaagaatccgcaaagacgattttgatcgagtccctctcgttagcccatccaggaaaacgtcagacgtcaaacgaacaaggctttctcgctcggatgtatgccgagacgggggatttcgagatggcgagagccgggtatgatatggcggttgcgatcgcttcacaagctggtagatcagagtaagtctcatcttcttgtttccccactcctcttctcattccttttctgtccatcttctttccttgttatcgaataggagaacggagtgcatctgtcgaaactgacggagctgactgattattaaaacagggaacgagcggcgttgatgggcgagcgagcgatgtacggcgttgcataagaccttccaccttctgccaatagatgggcgattctgttggtttgaccttcaggaacagattgtgaaagagagtgcctgtgtatgatttatatagaatataggctcctcgaggcacggtcaaagcacaacaagtaaagacactgtccgttcaaacagtgaacattctcaatatcggatgtagcagaaacggtggtaggagtcaagaacaaaaaggtaactaagggtatcacgaagaagatctctcgtcgagtatcgagtcaagataaagaagatatggatgagaagaaagtgtaagaggagtatgatgatatgctctatgaacaaaaagggtgacacgatgcagatgtatgagacaacatattttaaaaacaagggagatgatagcatggacagctgaatggacgagatcaaaaacagaagatgatcggacggccatgattcttctagaaaggaagatgcatacgaggcggactgtgcgatgaccaacgaccacgattgacgacaacatagatccgaaagcgagtgaggacaagaacaaagataagaaaaagatttacagaagagacttggcagacaggaaggaagtaagcgaacaacaaaggttagaaagaacgaagcaaccttcaac

SEQ ID NO: 2559 - DNA, 3157 bp, Xanthophyllomyces dendrorhous
gttgaaaggatttaagtggttagtagcccatggagatgcatttgtcccaatactgtgaatatggaacatgcaatatgaattcgccgagaccgtcaatcttcatgtgttagacgaaaaatccgacagatagacatgatgaagaccaacctggtcaaccatcttttgagctatctctttctcgtcttcagccaactcttcgacctgctccttgcgtgctctggcttgtttccgaccctgtagactgcacaaccgtttgatcagtccgccaaatgaccgcttgggcgcaaacagtctttggtgtatatctattgagaattacaaaggaagttagcaagcgcactccagagagagatgattctcatacagaaggtaaagaaccgttcagaagttaaagaagacgtacgagagctggaactgtcagggctataagagggaatcgaaagtgcggtagcgctgtaagaaggaaggtcgtaaaattgatcactctcccggaacgatggggaggacaccctggtctttaccgaaagagacattgtgtatcaagcagcagatgtatagccaggggaggcgcgagtaccaatagagtctaaaggggacaggataagaggttacttgccgaaagaaaggcagagagggaaaaggatttgcagaaagaactgaaggtgttcttgtaccaatcatacatgagtgaggtatatcaattttttatttcctgtatttgaatgctgacggaaatgttgagtgatcgatccatccaaagcttcggtacatgtgaagacgatgtgaaagcgagagagaaaaaaaggaaagaacgaggagaagtagtgtagaactggtagttctgcctataagagctgtgatgataagccctttgatctggttagttcttgatacctcttcctactctccttccgttgattcttcgttccgttgtgtatacaccgaagaaatacacgacgcagctcctcgtacaggacatagagagcacgacagacacaacagagaattatagaaaacacgagttgaaacttcgcggagttgaacagtatcaattgtgaagagagcagatacatcaaagggggagagcgatcgcatagagatcaaaggagacgacgttcggaaacattttcttttctcacttcttacgaggataaaatctccagggtgaataagcatatggcttttctagaatcatgcgctgtattccgaatgtcacgtaaacataatgatgccaacgatcgatcaaggttgtatgaaagattgaaggagaagaatggagagattgatgttgtgggagaaagcgaaatcctgctcttccgactctatgctcaatgtgctgatatgatcgactctctctttctccctcacacacttgcacacactctcttcttaggtctgtcggtatccagcttacatgtttcctcatccactgtgcgcgcttgacatgctccagttgcccgacattgacgaacaacttagacagtctggggtcccaatttctagaatgttcggggttagccgatgaaacgtccggccgggaaagaaaagaaattcgggtcgttcattttctttgtgagtttacagcactcttcacaactctagacaatacttcagacaatgcccaacgcagacaaagagctatcgtccccaaaaaagagtcctctagcgcttcccgctccgtcagatgtaccggcatatcagttagacgtcaatggcggtggttccgtcaagttggatgatctcggaccaatgatcgtcaacaccaatggggtcagtcttccgtcggatctctaagtttcgcttcgatctatcgaggcgttccgcaactgaatacatctgatactgacacatgcatatatgtataatcaaacatggtgatcaatagacgctttcgagaatcaccaattggaaggagctctcggaaccagaaagagaacgaacgatcagactgttggtcaagaagcgaaacgtgtaggtaatctgtgcatgtattgtaaaccctggacgtcctggctgaccgctccatgactcttggtgaacacgcatttatcatcctgcttcccagactacgtcttcaaaaccaacctcaacctccagctgactcaacaacttcatcaaacgacttgttggccattgttgctgagcctcctgccgatgataaaaacaataaagatgtatcaaacaattcatgaactgtatcacttcttgcctgtctttccctctttcccctttcttgttccaatctccttcctgttctcaatctcccttctggtccccattcttctctctgatcccatcctatcgccacctttaaggataaagagcaattgtcccatgtcgttgagcatacggccagaatcaatgagacagaatgtaaccatatatgcgcgtaatcatcgtaaccaaagattccctcaagcacacactatccttatcccttcaatcctccaacccgacggccatctcgtttctcgttctccttctttgaccatcatcaccaattcttttgctatccgcttagcttcaagtccttcaatccaccgttttagatcgttcctccttcttttgtgcactttcgctcctgttttctcacccttccctcatgtcgtcctcccaggctccagcgagggagcagaaaccggtgaggatcggtcagtatcacatgcttcagacgcttggcactgggagttttggtaaagtcaaacgtacgtgtcttctcttttcctttttattcctcctttcaaggcagttgaatcaggcgagttcatactcgtggggtaagggttgtcgcgtcaactgttccgattttcagtcggaacttgcccgtctctcatcgtgtggggtcatcttttctcctgagtcggaccagaggtcttcggtcggatcgattagaaagatcattgtcattgccttccgagctggtcgtccgatgaagatcatctgaaagagtcgtctcctcaaggaagatctggttttgaaacttacgggacgctattatcagacggcaacgaacccgactggtctatacttcagctctagagaatcgctatctgtcgatccccgactttttgaataccctttactctcaccttcattatctcttttgtcggttgatccccacacacaaccacacacaaccacacacaaccacacacac

SEQ ID NO: 2560 - DNA, 3682 bp, Xanthophyllomyces dendrorhous
cacacacacacacacacacacacacacacacacacacacacacaccccttcgatattctttcttttcaccttcctactacatcttttctcctcttttctttttctttctatatggaccgactctataagctataagagtaccctcaactgacggttctttcggctttctctacctgcttactcatgtcaacacccttctcgatgacactgctctctgcaccattcttttcatagtcgctgttcatacggtcaccggccataaggtcgccatgaagatcatcaatcggaagaagatcattaatatggaaatgacgccccgcgttcggagagaaatccagtacttgaagctgctcagacatcctcatatcatcaagctgtacgcgtgtctcttcttcctgctctttctggttctttttggctttacatatatatgtatatgtcaatgtatatacatatatatatatatgtccaattgagacgtcagcatttggtcaatcgttaatgtgtgctcattctcgtatcgatttttgtttctccctcaccaacaccctaccaggtacgaagtgattactacaccaacggacatcattatggtgatcgaatatgcaggaaacgaacttttcaactatatcgtcgacgttagtgataccccacttcaagtcttgatactcacgttgaggaaggctgaattttcattctgtgttttcctctgaaattatagaagggcaaggtttgtgatatgttcaaccgtttaagcacagaacaacctagaaactgatcctgctttgagaggttctttaataatttacagatgccagaggacgaagctcgtcgattcttccagcaaatcatctgcgcgatcgaatactgccatcgacataagatcgttcatcgggatcttaagccagaaaagtatgtagctacttgttgttttcactcctgcgcgaggtctcagacgagcaactaattatatatttcatctagtctgttattggatgactcgttgaatgtcaagattggagattttggtctgtcaaatatcatgcaggatggagatttcctcaaaacgagttgtggaagtcctaactatgccgcacccgaggtgatatctggaaagtacgtaccctgtggttttttcttttgtaaaaaaagggccatctttgttcattgtaattttatgaatatctcattcaaattttcagattatatgccggaccggaaattgatatctggagttgtggtgtaatcctctacgtcatgctttgtggaaggttaccatttgatgacgagtatatccccactttgttcaaaaagatcaatggtctgtctttcttcctctcttccctatttctctcatctctttcactctaccgtttgctaatccttccatattccaaacaccacggacgccatttaggtggaatcttccaccttccctcctacctgtcggtcgaggcaaaacatttactgtcgcagatgctcattgtagacccaatgaaacggataacaattagcgaaattcgtcaactcccatggttccagatcaaccttccacgatacctccaatacctccctccgacgccctctcatgaactctcgcaggacgaagcgaaccgaccattgataggcgcgcttacctcgctcatcagggaagatccagtcagaagtagacggggttcagaatcgagtgaaatcccctgtttgatcgacccagcacaggaggcggataaacggggattggtttatacatatgatttaggaattatcgatccgaaaactgtcgaggctctcaaggagaagatgacgggctgggagatggaggatctttgggaagctttgaaaagaccgggggacaaccagatcaagattgcctttcaactagtcagagatcatcagcgtttactcaaaggaggttagttcatacacttcgttccttgtttcttgtcactttccacttgaactcactctctgaaacccgcatcgatctgtcttggctgtgcgtgtgtacatatagccggccagctggatgaggaagatagcgctatggaagggtttttaccggtctcgcctccagcctgggatccagatggcgcggtcgagggagctatggatgatgacgactttgacgaggatgatgaggatgaggatgagatccctgtagagtctgggtttgccctgttggactctagtctacctggttataacgaaggtttgtctttttgtcttttattgcccaaagcttatcgaatttcatgtcaatatcttttctgaacatgtctttctccttctaatttcaatttgatttgaaattacgagcaggggatgatccatcaatcaacttatcatcctacgccgccgcccaaactgctgctcgcaccgtagtctctccacctactccagccaaaagaagtcataaaccccgttggcatttcgggattcgttctcgatcgccaccaatggaggtcatgctcgagatctaccggacactcaagtcattaggcatggagtggcgaaagaaaccaccggcaccggatagcttgagtccgaacaacggagaatcaccagctggagtcggtgcacatggaagagcaaagaaggattatgcggcagaggagaaatatctacagggtctgttcttcgttgagacccgatgtagagtcagagatgtcgtggtgcgtacttctttgtgtgttcaaccatttcccttttggtcttagctgacgcaagaaccctcgcgaatttgaatctgttcacggaaaaaataggttcggatggatctacagttgtacaaagtcgactctcaaaattacctcgttgacttccgaaatgttggatactaccgaactccggctgatcagcctggtttctctcaaatgcccccttctgattctacgtcctcccgtcgctcgtccgccgaggacggatcggatccgtatactcacgggtatccatatcagaccacagccagcacatcacccacaagctctcctcccacacggacgaatcaactaccgagtctttcggcctcgaccaggaattcactcgatcagacaaaccatccggtaggaagtgaggaggctttggcggcggctgctacctcgcgaagggcttgcgatagagctcaatcgcaggcggcacaacaaggtggtatccaggaggtcaccagtccattcttgtttttggattgtgcttgtaggttgatcgtcgagcttgccggtggttgatggaagggtttcgttcttgggcatatgtttaattctttcttcgtctgtttccacacgtctgaattgtatactcttgtttttctttcacttttcttcttttctctttctttgttcctcttttcttatgtcggtcgtcgtacctgttattacctatagagctagatgggttcccaattctgtttttctttgcctttttttgtttattgttttgtatccaactcgacgttctcccgtacataagctctatgtcttgcacagtttcctctttttcccttggtttcttctctctttgagaatttcgtgctgtgggtctgggtgtgagtccggcggggggaggggtggtggtggtgatggtaaaatgatcgaccagtttgcatctctccctttttttttcttctctttttatctctttcttatgcgacgtataggccgacctggtcaatctcactattttatac

SEQ ID NO: 2561 - DNA, 1321 bp, Xanthophyllomyces dendrorhous
attttatacatgccccattccttgcgttggcctggttcaatcgtatgattttttttctttttggtggatgtgcaccaggtaataggtagaggaagataatcaggaagccgacgcaatatatctacaacagaacatgatcgatactcgacaagcaccaacagatgaaaaagactagagaatcgaaagagagagatataggaacagggttgtaggtgatcgaggctcaaagttttgcctctcgattcctggcgttcatccatttccgaccaaccctccaacaggctagccagagtcccaaaggaggaaagatccaacacaatctccaactaggaaacttgcccgatttttctagcaacgttacgacgagcgcatcgactgatgtggatagagatgagggtgtggttgaattgtcgaggatgtggtctgctttggagatcttctcctttaagggcagcttttgataaagggttgtacaatcgaagaatgatgaggacgaggacgaaaggaacgataggcaagacaagaagggaagctctcacttgggattggattctgtctttagcttgttctaacgtgagcggtttgttaggagggataggttctctcttcatcaacctctccaactgaacatcctcatctacatataccaccaccacctcacctacgaaccggtccagctttgcttcgattagtaacgggacatccaacacgaccatccgtttccccttcaaccagtatttgatcagctgacgaagcatctcccgacggacagccggatgggtcaccgagttgagaaacgcccggtcggttggcgatttgaagatgagggatcccagggccgttcggtctatccggtcggaagaaggaagaagaatagacgatccgaaatgagcgaccacagctttgtgacaggatgttccccttatgtgtggtggcaacaattttgttagaagaaacatagaaagtacaagacatgctgagcattgcgcgacaaacgaggagaagatgaagagagaactaacggttcgaggacctctcgagcgatcacatcggcatcgattataggaatatgatgtttggtcttcaacaacccagaaacggttgatttcccagaggctatccctcctgtgaggccgacgactgagctaagtagtgtacagtgagaagaatgtgagagacgggcactgcatagtgacgaccaaaaacgatgttcttaccgagcatgatttggctgatggttatgagaaagaataagaaaaaaagaaattaattttaattcttttctttttctttcaccttcaaacgacgacgacgacaacgg

SEQ ID NO: 2562 - DNA, 5937 bp, Xanthophyllomyces dendrorhous
gatttatagtggataatattatttatatcaacgcttcttcccgccgttagaggataagatggagaaaaacgcttcttgaggaagctcaatatttccctgcaagatcggaaaaaagaaaaagaaagaatgagtattgccctcatcacgaactgatcgtttattaagtggaaaatcagacgaacggcgtatttcttcaaacgcttctttccttctttttgtttgttcaaatgtttcaactgtaaacacgtcaaataaccgcagataactcctcgtcattcaatactcgtacgcatgatgtgaaggagtcgatgataaaggaacgacgacaaaaacacaaacttttcgttcaaaatgacctccataaagaccagcggtgacatcctttctcatagccgttactctgcacgtcaaatgtataacaaaccaatatgatcaattgaaaaactcttaacttaacccgaatgaaaattcataaagacgatgaaagacgaaatcatacttttcagaagaaataatctttgtcccgatcactgattgaatagacatatcgtactgttgtcgaggtaacacgctgttcatatcagagatgaagagaagaatgagtttttccgttcttgtgtacactcgaaatgaagaaagtatgaggagaacacgacaggagcgtacgttcgtagtttagacgtccattcacgtccaatcgaaattgctgaccctcgatgaatgatcacttttcacacagatgaacaaacaaactatcagcatttgtaccagcacaagaggcagcatgcgattgtgaagatgaaagaatcaaagaaggcttactggataaagcatcgataggttttccgttgatgtgcaaattcatcttgcaaacatcgctcggctcccagcctgcgtcttcgtaatccagactcgcaaatccagagctcagtctatatcattccccaaattgaaaacatacttagtcaacatcaaccaagattcaagcacaagctatgctcagtaacaaaagagagagagaagtacgcacgacttcagttcatcaaagaagccctgaaccatctctgccatcggaattttatacttcaaaatcgcccttgacccagaaaccgattttccaggagcaggtgcactagctgcagcttgagcttgtaatacttgctcattggttagagtggatgaagacgacgacgaagaagagattgatggggcgtctaagtatgagtactgagtctggactcctcgatgtgaaacgcaaagttccatctaaaatcaagtaattattacattttgagtttatggtctttttttgataaatatatgtctgcttgtcttaccatgggtccaatgtagtctgaattatagagaacagcggatgtctagtcagcttaagatatcaacatatactagtgatgataagtctgaccttcggggaccaagatagtcgcattgatcataggttcagcaacttcctgaatcttcgatgagtgattcaccacatctggaaagtcgttgggattactgataatcacagtctttccatcaacgtaggtgactacatcaaagaaaattgaagcataagaacaagaattattacaaatcgattgagttctcgtaaaagtgacgaaattgaacgcactcttgtacggcacggaaggcgcggtgatgataacatccgaattatattcatcctccaacctttgtctgtttcggtcaagaacttagtctttgtcagttcccttcaatcgttcatcacaaacagcgatcaacctcatcagccaggacaaattgaagaaaccaacctaaagacatccatatgtaacgttcctaggcatcctaatctaagtccaacacccagcgcctgagaactttctctttcgatagtgacagatcgatcacttagcatcaacttttcgcgagaagacaatatgatggattagaactcgaaactggttgagaagcacgagaccatataaggatgaggttgaatacaaactctatgaacagattcttcaagcttgtagaaatcgtttgagtctatcggatagattcctgcaaacacctgttgaatcatcaattgtttgttatgaatctcaacagtaaacacagatttaagattaaaggaaagaacgacaagagttgtcgtacgaaccatcgcttttgtaggtttgaaaccgggtaaggcctcgacactctcaccagcgatgtggaaagtatctcctacagttgcctccgatgcagccttcatattgcaaactgagcaagtggggtgtcgtgcaaaaacgcgagtgaagtatatataagcaaatacaagatagctgatcaacgagagaagcataggaccaacttacctatataaccaacttgacctgccgttaaaaaattggttcgttcctcctcaggatgcaagataccgatatctagcacctcgtacttcttcccagaatgtgcgctttcgattttgtctcctatatgatgagacccacaaaataattttataaaagaaccattaatgactcgtctcgtgagcacctattacctcactggaaaagagaggccgaaaaaactttcagtaccttttttgatagttccttctttgacggccaccaaactgacaactcctctaaacctatcgtattctgaatcgatcactaaacctctgaactttgactcttcgacttttcccacaggtggtggaatccgttctatgatagccgtcaagacgtcttgaacgccttttcccgttttggcagagataggaaggacggaacttggttcaagaccgaagagagagtgaatttggttgattgtttcagtgggagatgcatgggctagatcaacctagatggcgcagagaaagggtactaaaagtcaacagagcgtagtcaaaatctaaacatgagatgtcataccttatttataacaggaatcatttctaggtcattgtcaaacgcaataccatgaacagatattgttctgtaaagccaagcagggacgatgagccttggtccactgtactaagattcactatatgatatcttcatcactctcaacataaccgtcaaactcactgggcttgtactccctctaaagaaacaatccgtgtcatagatcattgaatgaacaaactttgtcagtctgcagtgaaattgttgatgaggaagtcacagtcgagagtcggagcctttaataactgacgggtgcaatcaaccagcaaaagcgcgccttcacaagcagccaatgatcgcgacacttcataagaaaaatcgacatggcctctatcaagtatagacgagagtatcacatgtcaacattctaaacaataagaaaaacacaaagtctagcaagatatgttgcacatacggcgtgtcaatcaagttgagaaggtattttttccctttatattcatggatcatagacaccgtttgagctagatttggcatagagatgaacagtcatatgaaaatctgagtgatgtttctcgaagtgtgatacgaagagagcaaaaggaaagaagatataaatcaccttttacggtgattcctctttccctttccaccttgagctattgaggacgatgacaagttcatccgaggaaaagagcgcacgaaactttgtcagtttcaagactttcgaacccatttcactgacgagatacctgtagactaaccttgtcgagaactggataagaatacatcatcattgaaatcatgccttgagatattagttatgcgcgcttttctcaaaccgcattccaccttctgttctcgaatcaaaataatccaagccgaccttgttggtttccccctggctcgccgactttgatcgtccctgtcagctcaagcagccggtccgagagggtgcttttgccgtgatcctattgtgagtttatttcaaaagtcagtttacggaccaagatagctcattcaattgaaaaccaattgtgcgaaccacaaggaagagtgaaagaaacgaagacgaacgatatgagcgataactgagaagtttcgaatcatctctggaggaaagcctgccatgtcaattgcaaccgaagtctttggaggatatgacctggtcgatgagctagtaagagacctctttccgcttaagtagatggagcatgtcgatgagcctactagaagtcttctcgatgaatagatggttgatggcgattgagccaagaacggccgtgctagaagagaggtatggaaggaagatgattgtgttctaataccaagggattttgtgacgcgtatcgattgaacggatataggaaaccccttcgaccgaagcatgtttgggatcatagcctgagaggaagccatccgagtatggatgatcgaggtcaaagaatgacattcatagggagagaatgttggtggtttccgttagggttagtcacctcttcaaatcttgagacgcattgataaagctcagtcgttcatcataaacgcataccctgacctggaaaccatcaatcatggcaagcacatcagctattcaaaacacgtactgtcgatattgcggaaaggggagtcgagaagaaggccgaaacttccaaaagtaggtcgcacggttcatggtgtatggtatcaaacgcgtaatatgagctcatcatccacgctttggacggttggattgtcttgtttcctaattaggtgtggagtctgttatgtgccagtatactgtggaaaggtaggcagactactctttgtctctctcgaacgaggtttggttgattgcaaaattttgactgattgtactttcgcgtcattttgctagaaatgccaagttgaccactggaagaatggtgaggcttgagcaccaagcctattcttttttcacattactctcagtcagcgctcactcttgttctccctatctcgataatctcctactccaggacacaaagccgaatgtgagaaagccaagaagatgagggaatccgagagcttagggagcaaccaagcctcggatgaagttccgctggaaggtttgtctctgtttctccatgcattctgaaactataagcgtcaacaggatttgtatatttcttgactgagttttcctctgcggataaacctgcacattaggtcttcacgattgggaagacgagaattctaacaagctctggattgctggactccatgcacttgggttgtacgacaagtctaactggagtcgaatggtatgaagcgcctcgtactctttcgctatgaagtcgtccacgctcatattctgataacgaactcgattcttatcgtcatgcgtgggtatatcaggataacgaggcgatcctcgtttcagtcagctacgatgcttctcgtcctaagaagttccaatacgagtccctcatcaccgtcgcaccagataaggtctgttttatctcgctctgcgtcgtgatcaccaactctattgttttgttctttccaatctgaaacagctctctgtcttgtcctctcaaaccgtctactagatgcaagccttgatgcctgtagaggctgatctcgatttctacaagcaaagggatgatgctaagaaacagttggcaaagacacagggcgcaggtgacggagctgccatcatggttgtcgtctgcgggtaggtccacctcacttgtcttctgccttatctagctctgcttgtctctctgttcgtctcctctcgactatttgctaacatctgcttattttcgtttgtacttcacagatcacacgcgttgatcgccgcgaggatctattctcaagacgtaatcaattctaaaaaggacccgaactgggaacgaaacttgaaacgattgttcgatcgagattagaatggggatagaagtttaaaccgaatacctaaacaaatgatcaccagtgtcggaaataaaaaaagagagacagcaatcatcggatatgtcatcgtggtatcattagaggaaaaggaaaagag

SEQ ID NO: 2563 - DNA, 7621 bp, Xanthophyllomyces dendrorhous
aagagacacatctctatccacatcgaacacagggagtgagacgaaaacaaagaagaagaaaacaaaaacaaagaagaactgatgaacggaaatcagaattaccatccaaggattctatcagagtcttttcaaccctcttttcgcgccggccttggtcccaccggcctttcccgctccactaccaacaatcttcacacctgatcctgccagctgtgttgactcgggtgcaacgacaggaacggtcgatcgttcgacattgactgctatcccagattgaaccggaaggagaggggtacctaaaggagcttgcgagctctgcgaggtgatcgttgtcgattttgttggttgcgcaaattctgtaggtgggttctggaattatatatacagtcgaaaatgttgagtaaagtgaagttaaagaggaaatattgagaatgtggagacacactttaggtgtcgcatggatggaggtgaacaaccgagcatgcttgcagcttcgaaattgaaatacaagataggtaagtaaacatcaccagtgcacccttcgagaacggagatatacttactagtcttcgtatgcctcgagaaggagtttgcctgcttcttcatcaagcgcggattctggattaggatagatgagaagacatcgtatgaccttaaggatcaagatggaaagcgatgcttgtttgtaagttattctctgaccgacgtggtgatagtacaagcatcacccgttgatagggtacatacacttagaatatgactttataggtagagtgacaggatttaaggagaagagatcaacgttttcgttagtatatgcaagtatacaaataggccaagactatcctatacgaacctgattccaaactccggcttccatcctctcttcagagtgtctacacagatttcaccctgtttcgatacgttcggatggaatattctggtgacaaaggtacctatcaggagtaaccaacatcaaactcagtttagatccgtttttctatgccataactggtacatattctgaatgaggtcacaaagtctcacatttaggaggctgactaggatatgtcgatccgaattcgaatttgactcgaaagtaacctcctgtgtacggggttccgtctttgtattgaacgaaacgcttaaggtcagaacaaacggattaagttaaatcatcaagcaaagagacacactcaccaggcccttgaacccaagcggtgaacatggtgatatcctcttcatcaaccacaaccctgactccctccggaggttcttttctgagttgaccgagctccttagctatacggcgaacggaggatgctggaatggagtctgtctgtaaagtttaacaccagtcacatcgtaaaagacacatcagaaccttgaatgcaggaggtagagagctatctggatacagagtacaacacactgaccattttgtaaggtatgtttagcagaacgtagaagaattgggagaagcgcctagacatgaatggaatgttgagcgaacaaaccgagatatttgattgatatcaaataaacgcgtcgtccgagacaacataatatattatctcgcgtctagggtcgagattgtgattcctcgtacgcgcgttatcttatcatcgatgggaagaaggtaggctcaacatcttgaccaagacttcacgggtatagtgagcgaggtattgaggtcgatagcctcatgatactctgctatgaattgtctttctcgtctttgagaggaaaatcagacaaagattcatgttctccgtcgccgaaagaaagtattcatttcgaccaggttatccctttccctaatcccggcctccaccggcctccactttcctccactttctccactatgtttcaaccaaatcgtcctagatgcacctttaggtatctggaagatcgtcgggttgatattagaggtagacaaatcaatcgcggcgtcggacatcgggcatcgggcatcggtgacgtttatccatggtcaatccttggggaagtgtcgagcctaacccagagatgctttgaacaacataaaagaaagcactctgccaccatctcattgttcatatcgtttgcttatacttcttataactcatacacttattcaaaaacccaaatccaaacttaaacctcaacaaactaaactagatcactcagttcaccaaactaccaatatacaatcatgaaggtcttcattactggcgcatccggccggatgggtactcacatcatccctcatctcattactcgtggacacaccgtcaccggcctcgttcggtccccagagtctgccaaaaagatcgaggcacttggagcaactgctgtaatgggaactctgtccgacaaggatcttcttgtaaaggaggccaagaattccgatggagtcatccactgcgcgatgaaccacaagacgaacgacatgatggcatcttatcaagaggaaaaagagatcttggatctcttcgccgattcactcgaagggacaaacaagccgataattatgagctctgcaactggattcttggatcttggatcggacgagacctcagtagccagcaatgaacttactcctagagcggcgaccgagaccagttttttgggatacaaaacacgcggcatcaggccaatcgccgttcgactcgcgataaacacccacagtccagacgaaatccatctgtttgaggccatgctcattggtaccggcagaaagaccggatcaatcccctatattcgagatatcagatggtcaacttgtaacgcggaagacgccggtcttctttacgtccttgcgttggaaaaggccgagccaggcactgctgtccatgctcttcaagacaccgtcgaggtcaaggttatcgccgaggcgttagcaaagagattaggcctcaagacaaaggaggtcaccaaagatcaggttaatgagatgaatcttggatggttgggcagtcttctacagatggatcaagatgtcagcaccatttggacaagaaagactttcggatgggaaccaaagggtcagcgtttgcttgacgagttggactcaagcgatgacgcttatttcggaatagcttaagatgtttatcagtcgtgctgttgacttgctgtatgaattatctatctacaagatacgaatgtcgctttatcttccttacgaagactgagacaatttgaaagattgatttggccgtagttgttagagattactttggataaaagataatgtttgttcgtgatctgatcaatccctcacaaccctgatatcaacctccactctctcacggcatgagcacctctcagcatggttacttcaagtacacagatctcatattcaagttagttcagtccagatcataattccatcgatgttgacgttgtatcctgacccggttcttctttctcatctgatagctactctcccaacgctggcgaacatgttcggtcttttcccgtccataattgcacctcatctggttctgactacattagctcacttgatctggtacttacatggatacaggccgaagtactcaaggcattcttcttccatgaaagcttgactgacccaggttgccccttaaggaaagcagaccaggatggaatagagcttttcctcggtacatcataatcaccatttcttcgtgtatggctgctagagtctaatgccgcttgagttgaaaaatatcttggtctcgttaggcgaatggacacctccaggaaagtccgagtcgttcacagagaagcacttgctatttagtactgatcagctcggtatgtttgactgtcttcttttcactgtttggtgatagtgtataaggagaccgatctgatatattgtcttcgttcttgtagaatatatccgatattatcttctcaaagtcggctacactcacacacctgtttctctaccgcctgtggagatgttccttcacgatgattcattcaaatccatagttcgtctctcaatatgttttattggtttgaccatgctgcagctcctctacattgctcaccaaattttgtagacccctacgatcatctgtacgactcaagactttagaaaaattcggaagtctaacgaaaaacataataaagccgcacgaaaaggtagaacccctggatcccctggggagacactagggaagcagtttcctttgagagagctgcaggcggctagagattcatgggcttgggccgagaaaggcgtcggtgcatttctaagtattgactttgaggtgggtttccaatgcatttgtcatatgaaaccatagacgagttcttctgactctgttcacgaatatgatggaagcttagagttatgaatttgatcacagcgtgagttcatgtaagaaaattcttcatagaagcgttaattgttgctgatcattgatcctccactcactacagaaagtcactgaatggggctgggcaggctcaaggttcatacctcgaacagatgaaaccagcagtttcgcagaaaagattgagtcgtgagtgtgcttgccgtacctttgcgcgatgaaagtgaatctagactgaaagcgtactctctttgcgtccatttgatagtggtcatttgatgtaagtcagtatcgccggagcgtttgaaagtgaataacatagactatatgccagcattcaagcttctgacaccggtttattactgttcatcatcaagtgcgggagaacatctacatctgcaaaacaaggtctacgtagccgggaacagagacgtaagtgatgagcattgcgatcattaatccgaaagcagttttgtctgatatcctcttcctctatgtcttcaaagcattttctgtttggagaatcagagatcattcctacatcagcagagcttcaaagtagattgaaagaccttatcgagaaatgggaggattttgctaaagcgtcagggggacctttacaccttgtttgtcttgttttcatctctcatatgtctcctccgactcttggcttcgatactcaacattggcatcccaatttctttcgaaggtatttcacgatgcttccgccgatctcgcttacttccagacttgcggcatcaacaccgatcggattgcgaaacagcttgcgttgtatttgagtagagaatcagcgactgggttgtctccccgggaaattttgacggccgacacgaaagtgatgtacgatggttgtgtgatggaggtatgcttcgtcatcttctcgagtactgtctttgccctgaaacgctcagatctgatgcttcagatcatatcggctttcttgtttatggatacatcaggcgaaaagcacgacgaagcagaggaacctcaaggttatgtgtgaagtccggccctttccttttgatatccgtctttcaactctttgttctgagtacatactttctgacaatcttttcaattgtttctccttcgtttgataggatcttggaatccaacctgatcggttgcataacgctggaaacgacgcttatgtgagtccaatctgctcctctctctttctctttttgtttgattaactacaaagctaaaaacaatgtgtccaatcacaaacgcaattttttaattcagtttactctcgaaggattcaaagcaatggccaaatccacaaatcctgtccagttggtgagtcccagaaatcctgcttttctgacgatttcttttcttttctttcctttcatcatattgttctaataaagtgtcttggttctgggctaccaattgatgtaattcagatgtacaaagaaccctcgaaggctaaagtggaagatttcgaactcatgtaagaataaaagcaaccgtcaactacctccgacaaggtctctacttcattctcgaacaacagtcgcttctaagggagaagctatttttcgtgggccgtgatggtagtcacgtgaaagaagatgaatgcatatatagaattcgaatctctcgggtgagtcagccaggagatgcctccaagtaggaacagaagatcgaaaagctggctgtcaaagaacataaatgcaaggggagtatgaaaaaggaagggggaactatgtcttcaggtagagaaacgacctctactggacggttcgtcgccatttgatgtatgccgtcaagttctcgaaagcctcatccgctcttgctcggagttcgggggtctttcgcttgtcaattcctctcgtctgtttcccagaaacagacagaaatgttaggctcaaaaaacctgattgaggcaaaagagagacgcgataacgaaagaagcagagattaaggaggaagaggaaagtaaaaaaagatcacttacgatccctctgaccctgcttacactcaacctcaatttctccaagaatccaccttgcctgaagacagcgttatcccaaggagcgttttcatccgcatatacgtcgaaaatagcgttgagaatgacgaccgaagattcaggggatggaggagtcgaagaagtaagttgatcgattaggaatgttcctatcgtctgtgtagcaaaatgaaagttaagtgtcgattagaagatagaaatcaattctatggactcatgatagtgaaaggagccgaggaaaaaaagtacgaactcgattgatctcgatcgtctcgtcagagacatcaacatctctcaaagcaatccagcccagtaaacccatcaacctacacctcaacccttccttcgtcttgcctgtctgtcctgcagcacttatcatgagtgtcaccttctccttcccgacgcttaacccgcctcgagtgacctgggcgaggcccatcaaacaaccagtacaggcctccagaagctccgctcggatctcttgtcctttgatttcgaccacatccgatccgtttgacgtcgatggggcgatcgccaaaagaagctgaaagaggtcgtcgaagatcggctggaaggcccgcctggtctctaaaaggaacgactgccattcgggactcgcatataacggggatgtggggagagggacgaagaaggagatggacaaaaacaggttgttgagcgcttcaagtgcacgaagatgaatcgtagagagaagagcggttgttggtggatggggagatggggaggatgtaccagtcgaagagttgatcggtaggaatgatagcaccgtcggtttggccaacgttagtaaccggtgaggaaggttgagagggccgaggaagttgagaagcaggggaggaagagggttggtgaagtccgagccaacatcagcatcgactgtaagagcttgttgatctctgccctgctcgatcaattgttccacgtccattcctccagcgccagtagcatctccatcctcatcggccatcatctccatatcttccggcaactcgtcatcatcatcctcagcggtcacttcttcttcttcctcatcatcatccgaagccccaggaattttggagcagattcccgtccagatttccaagccaatttggagagtcatcaatcgaccctcgataacctccaatccaatctcctccgccgtcttgtggtccgtcttaggatcttttagctgagcagcgacagtcgctgcgtccggctgtttgttttgtaaagaaaatatgaacaagatatcagatttgaatatcatgatatcgctattgacgggtta

SEQ ID NO: 2564 - DNA, 12831 bp, Xanthophyllomyces dendrorhous
ctattgacgggttaatgcactaaatgaagactcacaagtttagaagctagctccaaagcttgatccgagacgtcggacaggttcaggttcagaacttcgttcaagaggggcacgaaaagagtcttgtccaaatcctgagcagcgataggcagaagaggaggaagaggagaaatgtgtcggatggtacctgcaacccgtccaaaacagatacaatatggttgagcatggattgtgtttcaagggttaaatttgggtattctacttaagaaaaaaagagaaaccagagactgaccggcagccaataccttcaacaacaactctccttccttaggcccttcactaacaccatccatatcagtcttgccctttccttttcgtgattcatcttcggccttccatccatccttgacgacatcaaccaaggtgttgatccacgatccatccgagcgcaggtgcgtcgccgccggagggttatcgtcagtcaacacatacaagcattgtgctaagaaaggtcgaatagacgtgtcagacttcaggcggtggataataaagaatacacatatgacctaccggccgaagtcaccaagctcaggggaagcgaagcccgggagatgaggaaagatagaaggaagggagtgagggtcaagttgttaacagcagttagggctttgttggatgtctcgctatacttgtcaaacgtccagacatcaagaagaataagaaacgaattttctcaagtcaagggattcaagtgtaggttctgcctgaccttaagcaccacagaatggtgatcacgttctcagccaaatcgaacactaattttcgtttcgtgatcttttcaaggtccttctttgcgtccaaaggctctgaagagaagattgcattgagcgtttgagtgatctaagagtaaacaagtaaagcgcgcggaagagtttgtcagttgtcagttatcagttgtaatagctgatgacatagggatcatatataagtcgacttgcctgttggatgaggttagtcaagggagagaggacgcccttattgtaaacctcagcgcaaagatcgtaacctccgtcgatacacaaattcctacatgtatagagtatacatgagcgtcagcaaatacatgtcgacatatttgacacagagaagacaatccgcaagcattgttctttagttgtagataaagtacgtacctaagagctccagcagcttcaacgacaacatcctcaaccgagtctgtgagtcgggtgattaactctccaaccacgttcttaccctggaacagtcgcctggttcccggatcattctggattagattcgtcactgccgcacatgcccagactcgatcagaggcctctggtgcggaaagctgcaggtatcagaattcaacaaataaatcacaccatgtgttcattaattgagtaacaacgtctctccacatgatcagtatcagatcgagcacaatgtacaaattgttaggcaagtagaacgagcgaaacaaaccttggcgaggataggaagcacctgctcctgcttgtctttgctagctcctgaagcgagtccatgttggagatgcgagtctggtactcggacagggttatgtctagccttgcttgtctttttcttttgctgatgcttgcccattcttgatccaaaagttgatttggtggagggaatcagtggaaagatttcaagtgattgaatgaggaacttcagtaaatctttgagagcttatgtaagcagaaactctttaagtgtctagataagatttcatctactggctggttgctataacccagcaaactagcgcgcagagacaatatgtactcttgcgctcaagaatgtcattattctcctggaatggtcaagtctgttcagggagtgtgatatcggtttgtgaaaccccagtcttaatacacaatggttggcaggatgatctacgagagatcgattgtcagtgacgtccgaaatgtacagacgctcagaaagttagacagttgactacaaaattgattacaagatctctcaaactgattacagaaagtactacgaacgagttacacaaagagcacactcagctgcatcatctctgttaacatcgtctatccatctgtgctgatcagcatacacctcgagcagacttcatcgcatataccttatcaaaatcatggcatcctcaaaaacggcatcctcttcgacagatattccttcgaaccctcggggaattccggcagctcctttcgtggtatgttctgaaacgctcgcccgggtcgtcagaaattcgtcatgacacactcatcctgatcttttcatccaatttggacgtgtctccgctatcaataggccaatgtggaggagtacattggcggtccggatggtgactgtgaatcagctcttcgaaagttccaggaaatggtgtcgtatgtcccgtttcctagatatacaatcgattggcagctttcaagattttgtgaactgatccaaacgaactttcaatacatcttttatcgcttttcgtttcgttgtgatagaaaatatcgatacatggagatcaatctaaaccaacgaagaaaaggcctcgaagaaaagatccccgacatccgtaagactctctctgtggtagaacatctgatcagtcgacgagaagctgttagttttttcttcataatttataacaattcctaagcccaagccggatctgatatgattagactggccaccatctttgaaacttagccctcaacggatgacgacgagttaaactctgaggagggatctgaatcggcagcaaacaagccattagaagcgttgttcgagctgaacgatactctctactcgagtgcacagatcgaggagactggggatgtctatctatggctgggtgtatgtacttttctgcttgtgactaaaccctagatgcttgttcaacattggcctatctcctttcttctgtccgcatctataggcaaacacgatgctctcttaccctttggccgaagctcactccctactatctgccaagctagcggcggctgaagagaacctccaggggtttgtggaggatgttgagtttatccgggaacaagcaaccgtaatggacgtgaatgtggctagggtatacaacttcgatgtgaaacggtcagtcttcttcattattcagcaatgacctcaacggaatcctgacgattactcgctcatgacacaacagacgaagggaaaagaaagaggcgctcgctcttacaggtcagaccgaagaagcggaggaggaggacaaaaattaaaagattgttatctgtgtggcatcaagttatgcaagaggacaacatagaagtatacacgtattgaaaagttgaggtcacatagatgcaagatgattatgagtgacaacgatctggcgactagggagagcggaggtaccatcagaagttgcacctccttgctctgggcagcctgttcgggctgacatccatatgcccgggtataactcgatacgttgaagtcttaactgagtacgagtaattgctgattgcaaactataaccgaacactcctcttgtgtctccggaccattagggaatatttgtacattgcctgcaaaggtatcatctcttttgcccgcctgccttctcgcttatttttcttccttccttccttatttctcccagccttcattgttgctggtttgttttgactaccttgaatttgcctctcgctgtctgtctggagataggtgaggcgccgtcttccgaaggaggaatatagatacggaaacgaggttggttcagcagtctgaggcgtctttctgttgagaagactatttcattccatatttatcaaccattcagtcccgataagactaagagaattttgaagattaagacgataaaaagataaagagcttcaaaggagaaaagaataaagatcagaagacgaaagaagggaaggtggtattaatataaagaaaggaagagcaaaaaggagaatgtgggaaaaggagagtagggagaactacatatagtaacatgccctgcttcacatgagaaacccaaggttaaccagccgtttctatgagggaaagagaaaagaaagaatacagctacatcttgagacagacagataaacagagtagagagagcagaagacaaacataggatgtagaaggatgaaagagacagagagaacgaaggtgaaaggtcgcgacgacagggaccagagaatatgttcgtgtaggaacaaagtaattttgagagaagaagatagagctacaagatacgatcatatgatgaccagaggagagtcaaaaacgaaatgtggaatcaaaaggaagagaacaactatatcgatgcagaacacacgacaaaggaggctatggcgtggtgaaagaaacgcagaagatagtaataatatagtgaagaaactctcgaggatcaggtctatgaagtcgtatatggcattggtgaacaccaaaaacagacgatgctctgaattgatgtggcaggatgatgctgtacaatatttagatcacgatatcaaagacgggtcgttctcggaagtagaagacacaaataccggatcaatcccttcgacctccgtcacctccaccctaagcatcggacaacatagattggacaaaaaattagcctttgacctcaaatgatctgtgtaaagccaaagataggaatgactcacagcaccccaaatgaatcctctggcctccatcgacggactaggtgtatttctcacatcgctaattcttccctcaactccgattccgattcccatgtggtgatgatgtccagctccagcaaatgggctcatcatcccacctcccgagagaccaaacggagaaagtggtggtggtcgggacatggtgaatcttggtgaggtggcgaaagttgagaagttgaatgaaggcgttaggagtgccagatttgttgatgaattcggagtaaagaacgggagcgaggggagtgataaatgaggtgactgtatgcatgatggaatgtcagatgttacatgatggaacctttgttgacaaggaatagaaaacttacaatatttgtactgctcccgcctccgtcactttttgattcttcacccgatccatcaaaagtggtttctctttggagcccactaggctgtcttctgatctgaattggtcgagtcttcttcccgcctttcgacatatttatggtcgacatcgtcggtaaacggggtgaggacgaggcaggttcgatcgaagattctgtagagattgctggtcgtttaagattctgattgaaagctgtggatccctcggttggcaacgcctccggacgggaagaaccagagccggtgaacttcaaaggtgaagttggtgccggactagttttgagccgctttgaaagttgttcagtattgggtgatgtcggtcgagtgttatcgagggctgattgattagatgcatcggggtcggttgaattttgaaggcttatgtataatggtggaggagacgctgtagatccaggaaagttctccctagcaaacgatccgttcccaccgccgaccgtatgctgttttcgatcctcgttgtccagccgttcatcagagtcgcgttcttctctgtcttcgtcgtctttgttttcttgatcaccagatccattgtcctccttggcagacctggcttctttctcgtccatcatgacggccaataagcggagtccaccctcattttgcatcggagcggcagctgagtcttgaaatgcaccctccgacgctggcccgtctccaaagtaaccccccgtgtctgttctaggaggaaatgcaggcggtttcagatgactggatgaaggatttgaagcagctgagtgacccggttgagtgacagtcgttgagcctagattctgcgacgattgatcgagaaaagacgggggtggaaaattcgacggaagctgatgagcggcgtatatgtttggctggaagtatccatcggtataaggctggtagggcatggaagggtgctgagacggaggagggtagaatcccggtggatacacagatgatgtagacgaggtggatgaagagggatggatagcagggtttgcgaccaaggttgatgtggccaacccagctcgagcggctatggagttcaactcgtccaacgtttctcttagcttgtcgatctcgcccctcaatccagtgttcacctcttcgagttcagatacttttgtctcgagcacctcgagtttttccttctttctcgatcggaaggccgaagctgccaacctgtttcgctctcgccgtcgggcttttgggtcgaccgtgcctctgttgaaagaggaatcttgattatcaaatgacttggcggatgatttgttgtgttttgcgggagaagaatctggactagatgaaccggatgtgttgttggcccggctagtattagatttaggtggcattgcggctgttgtttggagttcggataagatacgttgtccgtcttgttgggttgggcagagcttaaagtgatattatagcgtttttctctgttcttttttccgacaatgaggagagggagaaaaaaacgcgtgcagagaagagttaatgtttcaggaggatatgtcatcagcagagaaatcagttgaagaagggagaaggaggaccatgaagacaacagcaaagcgggaatcagcataaaacacatctctcatatgattgcatcatcgattgatcgcgacggaacgagagtatagtttccacggacagggcgaacgggacgtaccagatgatgtaaaaaaagcaagcttgatcggttttgcaggtcatccgagatcgtttatgtcttgcttttggatgatcaagatcaggacagggaagaactaggaaaagctattcttcgagaaggtcaagagtcaataggatcaaggggattttcggctggatgggtcgaatgaggtgacagagtgaagggacagcgaagagagactacgaaggtgaaaaggtacgtcatcttgctgtaataattgtaaccgtgtgactttgtaaccagatcggcagatgatccaacagcatcaccacaaacgcattctgctagcgatcaataagacatcagacatctagatctaacgaggctgtacaaattatatagtgatatcagtaatataagaaaggtagttataaaaacgaggaagaaaagaaaactcgaaacatcaagatgatcaaaatgctcagagaggcccagaaatggcagccgcttctcctttggcgataaccttctgctccaactccgctggcacgccgtcttctgctttatagcctccagagagactaacgccgatttctttgattgagaaccaagctggtatcgttgagagtccccacacggcgacatcgataccaagcgggacgctgtggggtaaagtctttcgagcggtgatgccgtatccgacggccgaaccggccgattcgagtgctcgaagaatggaagacagtcgaccaatgtcagattgatcggcggatgaaatggcaccgatatagaaatagagcacgttctgtgtcacactgaacaaaacatcgataatatccaagaggaaaaggccaaagtttagattgatacttgggatgacatatgtaaagtagagttacatacctcgtgttgagagcatagagaagatagaggcagtacgctctggcaaaatcggggcttccgaagtcaagagaaggagctttggctctcttactgaactgaatctgaatgactagtccccaaacccaggaggcaagcatcatggctgtgacgatgaggaaagagaccctcgcccgagtggcaagggtaaacctctattaacgagaggcaagagcaaggagtgagtgaatgagaaacatctcgactttgcgcttgagacaaaaagagagcgaaacgtaccctagagtcaaggaaaataccgagcataaagttgacagagacaccgagaattgcgctgaggagtgaggcaagagctctgaagtggaaaataataacaaaacagtgcttagttccctggatgtcgagaagaccacgcaataaatcagacttacctggttcggacagtgaagtagagagacaggaaagtggactggtaaggacccatgagggacgagtagaatgcaaaggcagatctgtatgttttgcacacaatcagtatatatcgtcctaacacggccatgaatcgaaatcagaagccaaaaggttcactcacagcaaaaggacttcctttcgaaggaacgtcttccccaccagcctcatttcttttttgaagccttccttgttcgttccaacgacgacgggagtaccatcctcccgttgaactttgtgtggctcagatagaagtaaagctacaaacggcgaaaggcactccagcgcgatgaacaccaagtatgttttggaggagaccgagccggcaactttagtcctgatgttgagtgcggtgttgataattcctccgagaagttgacctccagacttgaaggccaaccagacagccaaatagattcctcgctttcgggcctcggggtagccaagaataattgctccctcaacagaccagaagattccagcggagataccacaagttgtagctccaaaaagaactagccaaacggttccatggattttattgacatagagaccagcggcatctgaaacccaatcgaatcacacggcacagatgaatatagataccacgtgagaaaattagaagaagagcatgaacatacagggcgcgtaaccaatgcagccaatggccaaactccacttgagaccaatcttgttcgacaatgaagctgattagtgaatagagcgattgacatggatcagcgcgtgagccattggagtaattgaaacaagaatcgccacgactcacttcccatagagcagaagaacaccatgagaccgaacaccaaggcattggctgcattcacaaggtagggtgattgcgctcctcccgcaccagtcgcggacatagcgttccatgttcctggcgacaagaaagaacaaagaccgacgatgactgcctaggatagttgtcagcatgtctgatggtaacgactagaagaacgagggcaaaagattgaaactcacttggaaaatggtccctctgaaccaccaagtcttgaccggcgcggcccctgcgccctcaaccaaggatgcttcgttagaagtaggaccagactcaagttgctttttctcatccgccagctcatccgacgatcgagtaggagttgggctagacatggctcaagaaagaaataaacgggagtttattgaattgtaagaaagaaaccatccggaagaaacagagcttctgaatgtcatttaagcaatttcaccatggattttttggaagacagaaacggtacataagatgattagcacgccatataaaagtctttgaagatcattcggatgataccgataatttgtgtgctgccaatcgatggcaaacgacggcacccatccatataggcataccggcaaatctattgcgctagttcgggggaggtccgtcaacattccaaagatctacggcggagtggatgaatacaaagacagtaacaagaagaaaacctgaaaggcgtgcgaaggagcgatattacttcttatttttcctcctttccctcgcggacgataaccggtttgagggttgactcttttggccgatccgaaattcggcgaatttctacttcaaaatttcaaatgccaagtcgccgtttgttagggttacatttgaatagcacgtgcatgacatgattagcatagctatttcatcgtaagttgttacacatgttacaatacgatcgcgctggcggtctcgttgggatctcttctttctttccttgttcgttctagagatactttcaagcaacaccatcaagtagaaagaatctaaagaatcgcccctgatgtgagtgtctcatacgaacttttcaacttcggttgaagcatcggataaattactcacttgagggcgcatgttttcacgaacagggcggaagtaaagtaggtctttatcatttggtttgttttgtcaataggttaaacggccatccaccagacaattgattgtctatcgctctttttctatctctctacctatgtgttgtagtgttcaatcgccagagatagaggctctgaagttacacaaccctcttccttggtacctgcgcctatattccgttccatttttatctctttaccctgtgttggcatacgcgtactacgtcaaggtcagctctcaattctttttcaacgaaaggtttgggctgactccttccgatcccaacattagtatgattcctggcttcaatccgaagaatggactttccttgcttgtctcactctaggagctggacatgttcttagtttcttgttgacccaatggagcattgccatgaaagctcgacttacctgtgtccctgtaagcctagatcgtcttgatttgtctggcaaaccattgtcctctttcgtctttgacctgatcattcatcgatcttctgcctgatgtgtatcggtgtggcacttagtcaagcgatcttagaactgcccggcttattcaagttgtcccaaagaaacatcgcggaaagggagaaattataccgctccatcacaaaatcacgtcgatgtcttccgaacctgtccatacattctcctactcgcgagacacatacaactacaaccctgccacccagacgtttactcctttgccttacccggccgatgcaaaccctccactgtcactttacaaagacacccagggtctcaccgccgctcctggtccgacgaatgactcggtacccacagctctcgagaactatggaaagaacttgtgcgagattccgatccctaagttcaccgagctcttcgccgagcatgccgttgccccattctttgtcttccagatgttctgtgtcgctctgtggtgcttggatgaatactggtactactcgatcttcactgggttcatgttgatcgtttttgagtgtacagtagtgttccaggcaagatcactctcgttttcatgcacattttcggccggctcaactgataagatcgcttgtgctcttcgttcccacacagcgagtccgaactttgaccgagttccgaaccatgagcgttcctccataccctgttcaagccttccgagacggcgagtggagtgaagtcaactctgaccagcttgttcctggagacgtcatcagcatcggtcagtcaaatcctccagtctttgctctcatttgattgtctagctcatgttgcttctgataacacagttcgaaccaagcccgattccgcgctcccctgtgatcttcttgttctctctggaacggccattgttaatgaggccatgctttccggagagtctacccctctcctcaaagagagcattgagctccgagaaggatcggataggctagacatgaacggttcagataggaacaacgttctcttctctggaaccaaggctttgcaagtccatgagggagatggaatcaatggaaagaaagctcctgatgcagggtgcacagcggttgtccttcgaactgggtttggtaccgcgcaaggtcagcttgtcaggacgatgctcttctccacggaggctgtcaccgctggaaacttggagtcgttcatcttcatcggattcttgttgatctttgccattgctgctagtgcctacgtctggattcatggtgtggagaagggtatgaagaagtccaagcttcttttggattgtgtattgatcatcacgtcggttgttcctcctgagctgcctatggagctctctatggccgtcaatgcatctcttgctgctctttccaagtacgccatcttctgtaccgagcctttccgaatttcgtttgctggtcgagtggatgtttgctgcttcgacaagaccggtaccataaccggagaagatctcgttgttgagggtgtcgctggtcttgacaaatccgacctcaagaaattgctgcccatcactgagaccggccgagagacgactttgaccctcgcttcatctcacgcactcgtccagctcgaggatggtacgattgtcggtgaccccatggagaagaccactttggaagcactgggatggcaggtcggaaaaggcaacacgatcactcctaagcctgactatgagaccgagcacaaggttcagatctcgatcaaacgtcgattccaattttcatctgctctcaagcggatgtctactatctctgtcattcctgaagctaaaggcggaaagaagaatctcgtgtctgtcaagggtgcgccagagaccctcaagactatgtacgctcagctcccggagaactatgatgagacttacaagtggttcaccagaaggggaagcagagtgctcgctttgggttggaagaacttggagggtgtctcgacagatcaggtaggtgttatcattggttttatctgtataccattaagagaacactatattcatgcgatgatttttatcctttctgatagatcaatcatattcctcgagagaagatcgagggcggcctgacatttgccggtttcctcgtattccactgcccattgaagcctgacgctgtcgaatcgctcaagatgttgtctgattcttctcaccgagtatgtcctcgctttgctatcaagcttccaacgcatgttgctcactctctgattttccatttgtctgtctagtgcatcatgatcactggagacaatcctttgactgccgttcatgtcgctcgggaggtcgaaattgttgatcgagatgtattgattttggatatcaaggagggagctacctcagagaagggttcgttttgattttctatc

SEQ ID NO: 2565 - DNA, 7296 bp, Xanthophyllomyces dendrorhous
gtcttgggaaagagcgtgttctcatctttttctttttctttcctctttgattccttttcgtgtatctttcagaactcatctggcgatctgtagacgagtcaatcatgatcccagtcgatccgtccgctcccttcgacaagcagctctttgctgattatgacatctgcatcaccggaatcgcgcttaagcaatatgagcatcttccatcttggcacgatttgatcctccacacctgggtctacgcccgagtctctccggcccagaaagaattcatcttgtcgacgttcaagaacatgggatacacaaccttgatggctggagatggaacgaacgatgttggtgcgctcaaacaggctcatatcggagtcgccttgttggatggttcggcagaagatttgaagaagattgctgagcaccagaagaatgagcggctcaagaaggtttacgagcagcagtgttcgctctcagctaggttcaaccagcccccgccgccggtaccggctgctatcagagatgtttacccagagctcgtcaaggcacagcaactagctcacgcaaaccagcaaatcgctaggaagaagaaccctatggaaaaggtttgccactctgctgattcagacctgcaagtcacctaaagaatcagagctgatttgtcaatgaccttttacttacttttgcggcaatgggttggtcagttcgatctggcctctatcaccaataagctggccgatatggatgatgagaatgagcctccgaaaatcaaactaggagatgcatcttgtgctgccccgttcacctccaagctctccaacgttgctgctagtatgttgccacttggtctctactttggcttttgtcgatactgtcctcttacatctctattcgccttttcttctagtcacgcatatcattcgacagggacgatgcaccttggttgctaccgttcagatgtacaaaattcttgcgttgaactgtctgatcaccgcctactccttgtcggttcagtacctagacggcatcaagttcggtgactaccaggtcggtgtttctttcctcgagtgtggcgaagacgaacttgatactgatctgtcgacttttgatcataacagatgtcgatcactggaatgttgatgagcgtgtgttttatgtgtatctctcgagccaaggtctgtttagctaaaatcaaatttcatatgttgaaacttttaatactgacgattgatgagagtaattttcacatcaatacagcccattgacaagctttctcgagagcggcctttgggcaatatcttgaacatctatgttttactttcgatcctcctgcaattcgctatccacattgttgctctgttgtacatgaccaacctgtccaagtctctcgaagagtaagttattgcggagtttcttcacagtatgtgctgtaaagattagctgacttctgcattggtttgaatttgatgttcattagtcgaggacctattgatcttgacgccaagtacgagcctagtctgttgaacacggcgatctacctgcttggtctttctcaacaagtctccacattcgccatcaacttccaggtgggtattcacttagctttgttcaacggcttacagagtaacaggttctgactacatatctactctttgattgcttgtcatcagggtcgaccattccgagagggtatttctgagaaccgaccgttgttgtggggattgatgggtgctgtcggtgtcgcctactctggttcgaccgactttttcccggagttgaacaagtggcttcaactggtggacatgtcgcccaaggttcgtcaaggtgttctcatttttggcgtttgaaacagagtgcaagtgactgatagtctgaatttggatcatctctgacgcacatagtttaaattcatcttgacgaccgttatgttggccgactttggaggatgctacgtggtcgagaagggttgcaagtacttgttcgccgatctcgagccaaaggagctcatcactcggggtcgggaacgacgagagaagcggagggcggcagaggagctagcgcttgaagccaagaaggatctgtagagagaggaggattttgttttttttttaattaaaaagaacagagagaaagagagttgtttctgatgtctatacgttgttaaagacgatttgtatcctcattcctctgatgtgttatacagagcatagagcttgctctctccatctttgcccctaccttatatgagttatttgtcccttttattttcagaaacggcatatcgttcctcaggcttttgacacaggcgcaacttaacttcactaatatttgttaatccgtggagaaagaaacggagaaaacactcatggatctccctcctgcactgagggtgtgggcgaaggcgaccctcttgggttgaatgatctcgaccaaatctcatccttcgggtcaaccctttccgacaagagtccgagattcctcttccaattgtagtcaatctcgctgtggaccgtctgtcggatctgtttgcctgtcgaacggacatatcgattgaatgtgatggattcgcagtgaaggaagaggctatcgggcggtaggacaaagaatgctttgcgattgaaaatgggatggacgttgttggtgttggagaggtcgttaaattgataacggccatcaccaaccacgggtgcagagaggtagtgggaagcgaatacacggagttgatgcttgtggcctgtgataggaaacattcggatcaaggaaacgttcaagtcgacctatggatgtggaagttgtgcgcgcgaaacatgaaagatgttactacggccaatacttggaatggaaggaggaagccagaagagaaaagaaacctgggaaatattcacgaacattacctcccaaccactcccagcgtgtctcgacctctgccgcattctcctcaccagatctcgctattgatacccgaccattatccgttcgaagccatgatttatgatttttgggaacgacaattctttcgtccggatacatgtacctggacacaagcgcaacatacgctgtcgaaagagagacagaaaccaatcgaaagactatcatcagggtccctggccaataggaaggaaagaatcgaaacattgccgagacatacatttctctactgtctttgctttgaattggttggcgaggtccttggccttggcctgattcaaagccaggatgagtggtcctgttgtttgcttgtctagtcgatgcaccgttcggatctggtgatcctcggaaaggtccaatctagttcgaagatcctcaaagtgatcttccatggttgtctctttatgctacgtacgtttcgtgcggtacgacagaaagaaggttgtacaccctatgggttagaaaaactcgatgacctcacaagtcggcttctcggcaaaaattcaaggagaaatcaggaccaacacctcacccactgtttttcggccagggcttcttgggcagccacatccacaccagcctgtgcgaccagaccagccggcttatcgaccacgcataggccctgttggtgatgttcagcaaagtggtgtctctgatcagcccttgaaaggtgtcgaatgttgaacgtcaccgaaaagcacataccttgtcgctgaataagatcttgagtggttccttcgctaaactaggccatctgagtaaattccttgtgatggacattatgtggaagcagcagctacaacgacgaagggttgtaaggccgagagaacgatgggagaaataaggaaggaaggaagaaaaataagcgagaaggcaggcgggcaaaagagatgatacctttgcaggtaatgtacaaatattccctaatggtccggagacacaagaggagtgttcggttatagtttgcaatcagcaattactcgtactcagttaagacttcaacgtatcgagttatacccgggcatatggatgtcagcccgaacaggcagcccagagcaaggaggtgcaacttctgatcgcactttgtttcctaatgagtttgtagtgcgtattggatgacttcattacagtgtttttgcagtatcgcctattacacaatcacagtcaactttacccagattcgtagttgtattcggtcgactgtgtgatctttatcgctcaccttctctaatctataatctcattgaaacactccaactcaaatcacacactctcccttctatcacttctctacagctttcgttctcgtcttctctatcccggactgatctctcaagatggccgatctgttaccatcaccacctcatccatcgttacaatactcttcgctctcggtcgatcagttagaagcccttcggtcatcaacctccttggcgcttgttcacttggaggaaatgttaaacatgttacattggggtggagagagtgcagttgctggatggtgagcgtttcttccacttgaacagctataaccttaatgtcctttttcttttccttcatcatctcaagtagaaccaggtcttgaaagctgactgccattatatgttcctgtatggatttggatcacgcacgatcactatttctcaacaggccaaccttcctatcatcataccaaaagatgcaacgactccttgcccagctaaatcatcatttgtctgttggtcagcacgcatcagatcatcatgatggcctgcttggctcatcgataccgtcatcatccacatcaagagggagtcttttgaatagacatgtggttcatccttacatacctgccgatgcagctgctgaaccttggttacaaactctcctaatgaatgaggtgagcacttgtatcctctacttttcaaactaagacgtccactcaatcggtacacatcgttcggctttgtatcttcggccactcttgctccttcttacacatcgtcgtcaatcagccttcaacagcagcaacatcgtcttcgacagaacatttgccagccacaggtacgatcgaggaacatgaagcccgaaggcaacgcgcgactcggatctgtggtcttctcgtcgagcaacacgactggcgcggtcgggtcggagcagtaaaagatgaggatgaggacaatgaagatgccgaggacggcgagggtgatgaggacgaggatgaggatgaggacggggatgaagacggagacgggaaagcaactaacgctacggaaagggaagtaacagcgagtcaagaaacacagctacttgggaacaagaccaaaccgggtgacacgacagagcttgctgtcgctggcaacggagaagcagatgcggaaggggaagaggagggcgatcccgagtcggataccgtcagaaaggatgaggacagcaaaccgagcgaaaacgtcgtatcggtggatgcagagatggttgatgtcagacaagaggatgagaacgttgacgaagatgatgaggacgacgaggatgaggacatatttggagacaaggatgatgatatgtcaaacatatagtataggtttgatcatcgattcgagtattctcatgctccacaataagcgcaagagcatctttcacgtccaactgagcctcaacctaaaaagcatcgcgaagacttgtaaagaaccaaagctatgaaacgcgcgaaatctttgccaagttcaaagtttctgatgggacattcatctgacgcgtccgacaatccacaaaactgttttcatcaatccaacaaccatcatatcctttctcggttttatctcattccataccctccatcgttgattctcaagatgaattcactcagcccggtcaacggttactccacctcgtctggtcagatcatcattctcagtttccctccaagctacctctccatctgatcttgtccttttctcactttctaactcacagacggtctagaatcctcactgtccaccctcaagtcgatcgcgtcgactggatatgtcgatatcgaatggtctattcttaaacaagcaatcaagtcaaaacttcaccagaatgtgcagctatatctcgctcccagtactcagatcagcgctcagcttgagccttcgccatttccaaaatcttcccctgtcgttccgttttcagaggaagaagaagacagagaaaggtcgagcagaagcccggccgatgtgacaacaaattcaacaaacctgtcagtaagaatgggcgaatctgcgggagtagcagcagataacggaacggctgaaaagggatcgaatgatgtgtcgttaagcgaacgactaggaccgatagacgtcattggtggacgaacgttacctggaaaggtcaactcggaagaagcagagtttatggaatccagggtgtcgaggttgttagatgaattcgagtcgtatgtttatcattcttctgtcttgacaattcgttcgagagtcgaggttgcggtctccgtctcttgtcaactcggctaaaattccatcctaaatcgtggtgatgattcaatctagtgacccgccgttcacgatccagcgcctgtgcgaaattctggtagaccctcaatcgattcattctaacctaggaaaacacatccgagcgatcgagcgcaccctgctcgtcacatctacctttcaacctccttctccatctaacaacaattcgatttccacctttttaacaaaaacaaatccatcaaacgtccccggtcatcctatctctccgagaaactcgtcagctccattgttctcaccaatcccgtttttggcgcttcaaatgcctcccccacaatcagtcgatcccgtctcgtcttccacagggtcgaacgaaccgaacgagatggttgttactcgaccaatgagcccactcagtctagaacctagatctgatcaagagatgaccgatatgaaagaatcagcagttcagccgtcagttgaaaccgttcggccgtctatgccgttgggcttggcgtcacgttcgacctccacaacaccatcggggttgatcgaacccgacgaactcaaagtggacgagttggacgcgggtgtcattcctgattctcttcctcttgtttccccctctctatctccatctccatcgaaaccgtctttgacatcgacatcgatatctgaactaccaccatcaccaacaacaacaacaacaacaacaacaacaacaacgacgacgatgtctgcatcatcgacgatatcagaaccatcatgcaacgttacttccgacgaacgggccgagcaagagaccacgataggagaccatcaaccagcaggctcaaataccaatcaccgtcatttcttggcaaacaggcccgtcgcgctaacctcgacgacatctattcctgat

SEQ ID NO: 2566 - DNA, 23981 bp, Xanthophyllomyces dendrorhous
ctattcctgatggcccgctcttggctggagccgcctctggtgcggtcttaggtgccgttttaaaggaagactctgtcaggcagaggtcactcggagacgatgacgaagataatgatggacaagcggaagacgcaaagaaggtaaaactcgatgaggaacctggaacggagagagcggatggaaatgcgaaggaggaggaggaggaggagaaattaactagagaagaagaaagatttgagagaagcgcgtcgcctgctatcgatccgttgcgaatcaagtcgacggaaggcgaggaagttaaacgggtctgagaagacagagacgagcagagatggatcggcgttcccttatcttccctcgcctatatcactcttgcgttcttgaaactcttgctcaaatcattctgtattcattttgatgtactgtgtggactttatcgatgtaaaaaaagagaaatcccaccaaggccgatcaaggcgctgaaacgttcggggtattcgttggctcattcgtatcttttacgaattttctttaacataacatgggtttgattcattgagtacaaaacaagaaacgccagtagataaaagataagatattcgaaaatctctgctcgagcccaatagagaacgacaaggttgtaaagagagggagagaagaagcaaaagataggtgaagagacgaggagaggcataggcaagaaagagatattagaagaaaacccaaaaccattgtaccaaatagagaagaagaaagagagataagagacacatggaagaagaaaaaaaagacctgacaagatgaaagacactagacttttgttacaatcgtagaatatagaagacccggaaaaaagagtatatgtttgggaagaatgccggatgtaggataacaaggagatcaacgaagggccaagatgacgatgtcgatgaacgacgcgaaacgaatgatgaatggtgttggcgttatcagaatcaccaagacctgtgccggacaggtcacacccgatccaattgaatgtgaatgatattcaactcgatctgaagtggtaagaccaaactataaaaatatatgcaagaacgaaggaggtcggcaaaaatatttaaactctgaaggagaacgtaagcggcaacggcgtccttagaacagaatggatttggcactcccaaagaggaaatgtgaactgtttacattcttttgaccgatctatttggtcaagattgtcgacgggcataaaagaagagaagtgagttgacgtgcgctataatgaatgagcacaaagaaagacacatacgtaaactccatgcaactggacctttgtgcccactcgagggatctcaaccttgttaagcgcgttctcatgcagatagatcttgactttgagcggtgcagctgtcaacatgtcttgcaaccagaatagaatcaactgctttgcatctatagtgaagcacgcatagagcaagataggagatgatgatggagcagaaggacacgtatatcagtcaagttgtgcagacaaagcagaactcaagaacatgtagttttattgagaacttacggccgtcttggacatcaatatatttgtttacgttgccgaccaccatgccgaatgtcgatattggtgttagtcgtgagatcttcagatttgccacatctcgaagatcgacattgaggaacgcgctcccaattccagccttgattgggtaaaaacacatagcaagaaaaactgatataggcgatacctcgaactaagctcgcgatagagagtgacaagaaacccaccttatagttctctcgatcaccatccaacgcactaccaagcatctgtaggaaccactgctcggactcgtccatttcttcgggcgtgagcaagcctacggcagctttcaatttatcttccaataatgcaggtccccagcattctaaataattccacacgattatcctgtcgcgctgagagagttgcggcctgagtcgggatacgtagtgatctattcttgaacgtagagagatgctcacagccggaaaggtcccttgaagtgaaggttgaaagatcggcatatttcgaaactgagttctgtaaatcttaggatcagtctgtgcagatttggatagagccacaaggtcggacatggttaaaagagaagcaggtggcgtggaagagatcaatgttgacgaggaagatgaagaagtcgcttggttgatagaagaagaagagggtagggatagtaattctgatgaatcaggagagagaaaagttgacggattgactgtacgtgtgctcaggtcggacattgaccgtgtagatggttttggtctgacgagtgatgaatccatcaaggaggccggatggaatatcgacgccgtattggcatactgaacggaggtctgatcgtgtgagcctgtcttggcatcagtcctcgactgatgactactagactgctcaaagtagtcaagatctgtggtttctgatgaagaagttaatggccgggtggatacatggggtttcttcagtttggtaggaagtccgtacgcgctggtagccatggaaggaagcttttgaagattttgttttgcccaaaggacgtatccggtcatataacccaccgtgggatggactccttgagaccaataaccagtgtttgccttgggataatctgcaatgtatcgaagtgatcgaacattgaggttccgcatgatgtgaatataaccacctttacataactctatcaagtcatgctttgtccgtggcttcaatggagccaactgacgggccagatggattggattcatgtcgtaccgcagagggaccgattgaatcgtattgcttctacagctgatcgactgagctgtccgacggacttgtttctggacggacatctctctgatctgcttgtgctgtgggtgttgagtgcaaatcaggaagcgtagcttggaaagtctcaacgccgctagtctaggcgacctcttggtcgagtcgcgtaacaaagcaggttacgcgtcgagatagttggttacggctgaccaatcgtcgagcttccgcaaccagtataacctctctacagtttgctcgtccacatccttgaaagtcatcgctgtaattgagagtgttggaaagtcaccacaatctgcgcactcatcgttgccgtggtcattgcgctgaaagcaatcttccaagaatctctatgacatgtctccacgcgctataagtctcgtgagaatatcatattcataaagagttttcaacaggatttcctttctcttttgattctcattcatcgtcctccatctcgatctctccttcctcttcgtcttcatcctccaaatcgaattccccttcatcatcacttccttcgtcgtcctgtccatccgaatcatcttcttcaggtcctcgctcttcacgggcggcctagtgtatagatcatattcgatggtcagattttatcttcacaaaaattcaatggcaacaaaacaaaattcaacagaactaaccttctcaatctctctcctcttagcatctctgaccttcttctgcaacttccagaactgtcctagtggagtactgtccaccttgacgccctccaagaatccatcgacctctgatctgtcgttgggtgcaaactctaccgactttctcttttcttctacccatttggcgttcatgtcgatcttttccagcaacaccttgaacaagccagaagcctttgcgttcttggttcccttcttgacaaacctctttagggagctaacaataggaatagcaagttcagggaaagcaatcgaggtggaaagctgagcctggtgttccaagagaatgaatgcaatctcctcggctagtccatcctggtagatttttgttcgtgggtaagctgtaggagcacggatgacatattcgaaatcgagaggcgaaagtgtagacggttttggtttacttgtgaactcggccgaagacaacggctcaagaagggaaggagtcaagggaatgtaggtgtttgtgtgagcggagaggcgaagaagggatcgaaccacgtggaatcggagcgggaagtaccgagacgttgggatcagtctgacgtggcgttgattaaggtggcgaaagcagacatcagttcaatcatcgacataaatgacacaaactgcgcatacgtaccgaatgacaccaagagtgatctgaacgagcgggtagatcaagggctgaagttcgctctcctgcccacctcgggctagtcgagcgtccctgctgcaagcagtcgacatgaccaaacaccagaagtcgatacagtgaacaaattgccagttgtacacagccttgtaggcatcctaatcggagaaacaaagtaaggccagattcatcagcttcggaggacatatagaaagaacaagtggaaggacagagagaaaaacaaacaaaccttagactgtactttgatcgagttcctcaagtggacagcaagctgtcggatgtatccgaaagcatgttggtaagcggtcgccggatcgagattgtagatctccgaggcagagttcttcatcaggttgatagcagggagcgtgtggacggttgtctgcttgcacgatcgaaggaaagtcaagtacagaccctgtagagtgtaatttccgatgatcaagttgataagtcaatatttgaacagccatgagtctttgagaaattggaacgacagaccttgaaggtgatctcacgaacaccctcgtccccgttctggacaagctttcgaatagccaagaaggatgcgattcggacactatctgaagcggaggaccattgctccaaaagcatctacaccaatcccaacaaacattcaaatcggatgagtaccgtgtgttgtgcatccatgcaaaaagacgagtcacagagacagacaaatacaaaccttcaagaggttcttgacgatttttcggccaccgacgatccaaggaaccattgcctctgcacccttcaagcaaacctttagcaatccacctccttctttgtcgtctgggagctgctgaacgaggtgcatcaaattactcatgtaactcatgatcatcttcatcaaagccggcgggggctgcttggtgagcttgaacttgcccgtttgagcggacaacttcaaagggagatggtgcgagagaagctgaggggtgtagtggagtgtggttaggataattttgttgaagactgtttcatgacaacaacggccgtcagcttggaaccaacacaactgataaaagtgagacgtggcacagagaaaagaggctaaccagaagcgtcttcaatctcgtaggcaaacgattgcgatgccttgtccgaagcatcagagttggagtaggcggccgctcggaaagccaggtgtaacctcctcaaactcttgagacttcgtgtctatggcgatggattatcgagcgcgttagcaactgaagtccaggcgtgttttagtaggaaagaggacaaaacgacaacaaggtctgcttacctcaagcatgttcttctgccatcccttaagcatatccaaagtcacgacctccatttcaccttgttccttcttggccttcttgccattgagttggcccaagatctcttcttcttcatcctcatccgaatcacctccctcaaactcttcatattcatcttgccctaaaggcgcttcctcctccttcgcctttcctttagaggcagccttcttctcggcttccagcttagcggccctcttcgaggcctttttcgatggtggagggggggtgccagagttggaagaagtcgaggcgccaaactcgaggagctccttatcgttctcctgtaggtacttgaagaattcgggatccgttttggagagctgagaaagagcgttgacgtgagacttctccatgtctgaaaaaacaagaggtagtaaagatcggtttcatgttacatcgtagcgcaatagtataaacagactggaacagcttaccatcgagatcatcaactccagcgaaatcatcatcggtatcgttcaaatcctcttcgtcgtcatcatcagagtcagccttgttgggagctccttcgtcctggatcatgaaggtaagatgttcataacgtcaactcaaaagatctgactgctttgtctaagcttcaacgctgaaacggatgagagtcacttacgccagagtcctccatgaaagcagctcccatgatgtcgtctacgctctttgggttcctcttcttgtcatcttcctcagcctcactctcctcctcaggctcgtccacgtcatcaactcccttcttggctccaaactctctggcctttccggccgcccgtttttctctgccctctatgagctttcgagatttttggaaagatcttcgggaagatatgacctctttgagtttgcccgttccggcgaactgtttcaaaaagcaagtgatcaaggtttagagaatcagtcatgaattcttgacacgaaggatgaggctgaaggatcaacctttttgaaagatttctgttgacattaagcgcgacggcaagcacaacggaagggaaaagtaaccaagaggcgccaaaataaaggagtggggtcagaatcaattgcacctagattgtgtacctatgtctttctaataggaactactgaccttggccatgatgactctatctagatacagaagcgttcgtaggttgtggaatcaagcagggaagaaaatgttgtggcccagatgaagttttgaggtcaaatatcgatgtggcgaggcgaaagctgtgcaacggatttccccggcctgtatgccttgtgccttgccttcttccgtctgatctgtatcctctctccatctctcatctctcttgctttccaccgcccatatccataccttcttcaacgattgatagcatggatactttctccgctcaaggagggtatcctcaggtcccttatgggtttggccgtgagtgacggctgtccaaataccgactgtagagcctgtgctgatcatcctcaatcgaatctctcctgtcttcgatcgatctatagaagttcgttcccttttgtttgtccacattcaaatgcgtagtgtttgttaactaacactgcagaatttctttcgttgtagcaaacacatctgaggggaatcacaactggccgattctcaaacttcctagggggtcactactcctctcacaacctgtcctcggtcctatatcttgattcgaccgatgctatcacggctgtcaagatggaggtctacactcctcctgccggaacaaaacctacttttgaggaagcctcaaaatctaagtataaaccggtcaagaagggcgagtcgttcggccctagctggagcaaccattggttcaaaatcgccgtcaaagtcccaaaagagtgggcaaaatacaaacgagttcaatgtaggctgaaactttgaccatatacaatctcgatcggagggagaactaatgaaacacacacacttgggctcaatcatctcgttcagtcgaatttgatcccggatgtgaaggattaatctatactcgtaagcttgtcaacatcaatcctgacttgatcgccaatgctctaaatgccgcgctatactttccatacaaaatcagcccaaggtcttcctgtccatgccatcgtaggaggctacagcgggcttcggcgcgtcgagtatgtcttggacgaacactccagacaaagcactcaccatttctacattgaagtacgtctgcctacctatctgatttttgatccttgtcccgaccgtcttcgttgctaaatttaattttgggaacagatcagttgcaatggaatgttcggagttccccaaggagggaatgagattgagccgcccgatgtgagttctcagtacataaatctctatctctgcagcatatggtttttctgaacatttctttctttcagcctaaccgaacattcagtctagacaaagccgacttgattgctcccaacttggaagcctggtgcgtttcctcagatcaagattatcataattcataatctgtcttggaagactgtaaatcactttgcttacaggaagaatttctacaattgcataactcagggcgttgatgtacgatttcaaccttctctcacaaattgctacgtcctctccctcgactccaatctgcgatcgtgcgctcaacgccgccaatgagatcatgtctaccttccgtgccggagatgacaaaactattggcgcttgtagaaagatagctgagagaatcctaggagatggctgggagaaggatggggctcaggtctgggagaaaggtcaggaaaagggagcaggactcatgtggggtttaggtcattgtcatattgacactttctggtaagattcaattgacgaaggtcatctggtgtacagaaaatatactgaagttggtccttgatcaggttatggccagcgagctctactaagcagaaggtggcccgatcctggtcttcccaggtgagctatatcccaatttctggatcatagcctcccgctaacgacctcatttccaatagatttacctgatgtccatctaccctgagcaccatttctcagctacatccgcccagcatttccaatggcttgagaggctttatcccaagctttttgatgctgtcaaagaaaacatcacaaagaaaggccagttcggtgtagttggtggtacctggggtaagttttgttgattatgctattccaagctttcagagagtatcaggatcgcagttcacgcgacttgtttaatactttaatgtgttcgtataattgtcagttgaaatggacaccaacatcccttctggagaggcgctgtgtagacaattcttatatgggcagaactttttcaaaagtcggttcggagatacttgcgatacgtgagttcactttcatatttctacacttctttcctgattgtgtttatggccgttgatatacagtccaaacctgctcccagttttgttcttccagatacgtttggatattccagccagctcccacaaattggtatttctgttttgatctaattaagcttgtagtctctgtctgatccaagaaacaaacctcgttttgaatattgatgtagcacggctgtctggagccaagttcttcttcacacagaaactatcttggaatgtatgttcaatttgtcgacatgcccctcgatagattaatgctgattcgatattggattattcttcctcaagaacatgtatgtacagcagcaacatgtatactatcgaagaaaatacaagcctttacgataacgctgaatgtgcaacatgcaatctttctgcgggggtttagtaacaaatttccacatacttccttcaactgggcaggaatgttagtaattttatatcattgtcgtgtcttgaccccacactgacatatcctttcatcctactatatcgttttcagtgatggctctcagatcctgacccacatgacaccgttcgtgatcaaaccgttaagcagacttgctgatagatgcgcacatcactaatagcatctttccaaacagagtcgacacctacaacgctcaggctgactatggagagatcatgaaaggtgcaacggctaataagaatcttgaagtgtatgtacatcgtcctgggtatgtatcgttgatcgagtctcaactgaattcattacttcatcttactttcaagaactggagatgcattgtatcttttcggaaacggagacggtggcggttcgtcttgatctacattgtccttctcgtttttctcgtcacatcagaaacattaatcagatgcaacgtggacgcgtttatgttcatagggggaccgaccgctcccatgcttgaaaaggtttgtgaagctcgtccatatcaacgcttatctcgagaagtttcgaccatatctgatattggagcgacgtctcttagctgcgacgacttcgggcagtcgcaaacgaaaatccaggtgtccctgtagtcaagatgggcggccacatggacgacttttttgaacgacttcagaagtaagtgtcgtgtccaacatacaacttttggagtaaagctcatttgttatatatttcttcttttacgagcaaacagatcgaccgacaacggaaagaaattaccttcctggtgagtataattctcgaaatcatgattgaggtagactcgtctcataacttatacttgattcaacttataggaagggggaattgtactttgaggtatgtctagtattttattcatcaaaactataagtaacaagctgaatccaatctcaaccttacaactcagctccaccgaggtgttagtcagctctcgtattatcgctcacgatcgttaaagatttatgaaccaaacagtaacttatgtatcaaacctttttgaaatccgaatagacttacacttcccatggtctcatgaagagggacaaccggaccaatgagcttcttctcagagatgttgagtacctctccaccatggcctcacttgaggatgaaaccggttccttccagtaccctaaatccaagctggactggtgctgggagcatcttctattgtgccaagtcagtttcttccaagcaaatctcccacaacacttgatatacttaaccttattttgaatctacaacatagcaacatgatgttctacctgggtcggctattcggcttgcttacgacgaagccgaacgataccatgtaaagattcgtaagcttagtgccgaaatgattgatgcggcctatagaattcttctcccgaactcgacttctctcgcggacaaccctctggttgtcgccggaaaaggcaagattgtcggtatcaacactttgcgagtgcccagaagagaggtcgtcaaggtacccgttgatgccaagggcgcactcaaaggctcaatggctcaagtttgcagaggaggcacacatggatatcttttagtcgatgccaccaatgatgggctagcggaagtcaagggcgtctttgcggatatgagtcctgtttcaggtatgttcagctatcgagctcagtgcttgctccgcgcacacggaagaatagaaacctgatgaagctactgagttatctctcgcttcagccactcatgaatccacgggagaatttgtgctcaagagtagttctatcatctttactataaaagatggaaggatctcaagcatctttgatgtggaactcgaaagagaattgatcgctgagggagagtgagtcttatcttcccaatcaacatcaagctcaatattgcaatcatttaatcaaatatcttgtttcacgataggactggtggtttggtcatctatgaggtaagttcagttctcactctgactattgctcgtagtccgatagctaactttctcattcctcgtgattatctaggatatggtgagtcataaaattattatagcctaagatcagttttcaattgtgaatcttgctagcttagttctcaccgtccattctcttttaaatcagcccaactactgggatgcttgggacgtagaagtgagccacagtcttcctcgcaatcaaatataagcatccacttacagtcgctaattgtatgcccatattgcttatatagatattccatctggaaacgcccactcgtctgaagttttcttctgtttccattgctgaaaacggacctctgcgagctacgttggccgtgaaagctcaggtcggaaagagtactagtatgttaaagctttcttacctcactttgatagtcgttacagtctaattcactttgtttctgttctgtttatgatattagtcgggttcaacgtgagcggatttcagcgtgtgctagctttctgacatgcagtcttattcttaccttgtttttggttttctcctcggaccagatttctttggatgccgtgggaggatcgaccaacaagggatcccgaagtttgatccgtttcgaaagtgctgacatcaattggagagagcgacacaagttcctcagtgagtgaacttaatctgtttgaccggtagcctttttgtacatatcgggatcgtgaatcgaggttaaccgatgcaatacgtatgatttcagaatttgagcttcctactgatatctcttctgctgaggcgacatacgagactcagttcggaactgtttctcgacccactcaccgaaatacttcttgggatcaagctaaggtctgctcaagttgtgcagctcattttcatatctcttcaaaagactgatggataacctcccttcctataaatcgatagttcgaagtgtgcgctcacaaattcgctgatttatcagagttcgggtatggagtcggtatcgtcaacgattgcaagtatggtcacgccgtcgaagggggtgtcatgagattgtcgctcctccgatcctctaccgcccccgatgcagaacagtatgtgttccatcctagttgttgtcaattcatttttatcagcttcggaacgaactgacatgacgcgctcgttgctgcctgtagggaccaaggcgcccatcaattctcattcggtatctacccccatacaggatcgttcctcgaatcgttcgtccttgtcttcctatccttattcggccgtaccaatctaattttcctatctaaaatgctacagcgatctccctcgagtagccgctgcatttaattccagcctgcatcgttcgtatttcctgatctcatccacacttatttatctagataaactgattaatatttctcctttggtatcaacaatacgcatgacagtgcgatacatccctgacacgttggctgcaatgaagactatcactacatcctcccttaacttcaacttcgctgtcgatggtgggcggaacgttttggctgaaaccatcaaacgagcggagaacgacaagttttcttctgagaagggtgtgggcaagggagagaagaacgtcattgttcggctgtatgaagcctttggagggcaagccaaggtttcgctcaaactgtttgtcgttttttagctctcaagtcgatcagcctctgcatcagcaaaattgacagattttgaccgacatttgaccattatcagaaccggcttcaacgtcacctctgctgtattgacgaacatcctggaagaacctatcggaaagcctctcggtctaaaggtcgatggcttcgaagatgaacttacatcagtcgagctcaagttccgggcatttgagatcaagactctcaagctgaccatcgccgagaagtgagtgcttcggaaccagtagtccatgttgcaggcttactgtcagcatgaaacttatggctctgttgcgcttcattgtttctcgcaggcctactcgagatggtgactcgtgggtgaagatacagaagaagtgatctttcgtttgcttctctcacctctttaacaagttctctatttcgtctctgtctttttgttattttatcaagttgtattttttgtttgttgcgatgcatgctctttgtggtgacttgtcaaaattgaatcgcacagtgcaaaatatcaaaagacactaggtcgctttatatctgaatttttctccattctaaatctttcagcctccctccgtcctactcggttgcaatcgcttatcatccagcataatcagcaatcactcattggatcattgaaaatctcgacaaccgatatgccttcaaagtaagtaaccctgcagcatgttcccgaatatgtgctggttgttgatggatcatagtttctggtcggtatcatgattcagaaccaaaggttggctcttactccctatatctaatccttcgcgtgctgtgtagtaattgatgaaacttacttgatcttcatcttccttgttgaccgctacctaccgactgatggactatgttgaacaggacccactttgacgaaagctcagcagaaggcggcagccaaagcttcaaagaaggccgcccagagcaagaagggtgagaagaaggagacgaagaaggcgaaaggcaaggggaaaggaaaggaggcggacgaagatgatctcgaggctattttagattcggttcgtttctcttttctctatgcagtctttctttgattatcgaggcttcattgagcttgattgtatgaaaaggctggttgtactgaccaaagttttgacttgtccatggtggtcttctcctgtagttccaaaaagaatgggaaactgtcagtacttcttcaaactccttttaccttcgtcgtggacaagaactgacaacgccagttcctactcaataatagaaacatgccgtcaaagaagagatcgcatccggacctccgtctcggcgagcaaacgccaccttcactgcttgccccagtggaaactacctttggtgcattggaggggagtactacgacggagatagagcgttcgtttgattatcccctttgcttgcaactgcccgaaaggtctcggtaagagcttactgaacacctccttccatcatgttgtcttaatcaaatccacacagaactttctagtacagcagtctctctcagtatctcttccagcgtattctaaatggcgtactcatcagtcgctctgttcttttcttctttctactgacctgtagcaacgacgtctaccgataccagcctgaaaaagatgagtggagatgtacgtctgatgaattactttgaccattgattcgtttgcccttgctcttcatctgtcatatgccatctatcatgtgttgactgttcttctaactcggtgcgattagtgttcgcttcgcccaactcgcctggtcctcgttcggcgcactgttgcgttgcttctccttctggaggtggaaagctctatatattcggtaagctcctcgttctttacaaactctacaaggtacccaagtagagctggtaccatgcgaatttggatatatatgttgtgcgcggctgatgaatgtgtttgattaaaaggaggagaatacgcatcgccaaagcagacttcattccaccatttccgtgatttttgggagtttgatgtcaacagtcatgagtgcgcgtgtcatcttcctccaatgagtgtttgaggattcgtcatactcaatcattttggttctcttctgtgatggtttggcagatgggaacgaatcgagacgaaagtcaaaccgagtccacgttcaggatgccggtaagtttgatttctgccgtcccctccgaagtgctttaataggactcacgttgaaattaatgatccatgatcaatactacaggatggctatgtggaagcacttcatagtccttttcggtggattctacgatctcggcgttcgaagtttgtctctctgtttttgactttccagattaccagcatgaggtctctttggtctaacgtacttgttcctcgatacagccaactacttggatgatttgtgggtgttcgacactcagctgtacaaatggaaacaggtagagttcccggtgactgctcaacgacctcggtacgtgtctcttgtcgaagccacagactctgtacagacgtctgttcttgacgaacgtacgttctgatacagttgaacgtttactgttctagagctcgatctggattttctctactccctgcggccgaaggagtcgtcctccacggcggatactgcaaagtgtttgagaaaggaaaacgaacaaaaggaattgcacttgaagacacatggcttctccgaatggatcctgatgacattggaaagttcaaatgggagaaacgacgacgatcgggctatcctccgagtgtcaggagtggttgttcgatgacactgtggggagcaaaaaatatgggtgtgctgttcgggggggtatgggatgacgaccgggatgaagagactctcgagagtgtgttttacaatgacttgttcgttcaaagtttcttctctctattcttcttttttctccttctacccccttggtcttgcatcaacacgacaaccgacgtttttgaactgtataaatcatttatactctgatctggcgatgcttttcgcaggcacggatacagcttggcccacccaggtagatgggttacgatgaatttgaagaaacccaagaaaaaggcaggtggcgggaggagaaaggcgaaggttattcaggctcccaaaccagaagaccaagctgctacgtccaaagctgatgaagcgtataatacggatgacgaggtcgaagaagaggttcgtccatcaacagccgatactgtgtaggtcaagtggatgaacgcattgacatttttcgtttatatcacatgcgaatgctcaattaggactacacggttcgcgttgtggaggaagaggacgacccagatgatcctcagaagagtatacctttgactagatacaacacgtacgtcgaggatcatcttgataatctaccgatatcgaagcagaagcactgattcgacgtctgtccttgtttcgggaacattttcatagtatgatggcgatcatcaagaacactttgtacatgtatgttaaattcagattattctgatccatatttttttctatggacccggtcttactatcctggggtcggaatctttcctttttaaacagttacggaggaatctttgagaacgattctagagagtatacgctagatgacttctactccctctctcttgacaagctcgaacgatacaactgcttgagatcaagtggactggaagaagaagcttggcttgaatccgaggaggaggatggggatagtgatgagagtgatgaagaggacgaagaggaaggtgggagcggacgaaggagacggggtggtggtgatgatgatgaagaggacggtgaaggcgggccggaaggtgaagagtatgtgaaagaagaagaagaggaggacgacgacggtggagacgaggtcgtaggagtggatgagaacggagtagtgatgactaggagagaacaggtccgtattggtgatctttgttacgagagaagtgaaatctgaactgtcaccaatcgagactgaccaacttgtaattcatatggtcttacatcggatcaactataatacaggaagcaaaagaagctgctctccgggaggaagcgaccaaattcttgggtgtttccaaagacgccgcccgatctctggaagacacgctgagcacacctttgcccggagaagtccttcgagatttctacgatcgcactcgtcagtatcttctcaccggctcagcgccatgtgtgactcaagatcactcgttaattgtatctctgttcttttcgtctttccacctatctgactgtgtgttcaacaggtgaatattggacgggtaaagctcattctcattctgacaaccgaggcaaaatgcttcgtaaggatgggttcgaaatggcctcccagagatatgcaggttcgtatggattttgttgtcgttcccttttctttttcttttcttctcttttcttttctgcagatccggcattgacttttgtatcggcccaatggtgactcagaatacgagccgatcttgaaggagatcgagcggatccaaagggaggctgggttggaagcagaagacatgggtaaaggcggaccggcgacgaccggaggtgttggtgaggccagtcgaaacaggcggtgaaataagagaagtagaaatagatgacttgttcggaagaatatataaagttaaagaaaacgcggtgcaggcagacaagatactgaaaccgagtttagcagagaaatataacaaatcacggtgtttcccgagtctgagtggatagcttcataagtaggggtgacaaccgaatatccattggcgatcgagtctaattggatgacacacacacgtttcatcctgtgtacagcgttagacgatgtattgagatcatcgacgccaaaaatactccgctctcgtgaacacgtaccatgggagtgagctgatatttatgtcgacataccaacccaacatacatgttgctcccgcttccaggtggagcttttcttccaagcggggagacatttcgaatggttacaagcggtacgcccgtccaagttgatcggcaaaggaaaaaaatttgtcgatttctatctcttcttgaatttcgccgttctctccacaaaacagagaacgcgcgtacggttgactcggatgttagcgctgttggcaggaaggaaccacacggcctcccgctttccttggtccgaccgtaaagatcccttcttcaggtgatcgaatgattcatgtcgtttcagtctttccatcattatcatcattatcaccattatcatcatcaccatcatcatcgatattttctcttctttttcgctacaaactaggtcttgacacatccacagtctttctcaatacccatggcagatgaatccttcggaactgtcgccatcctcaaacgtggttcggcgtaagaatttctcatgtctacaagcagatttatttattttcgatagaaatctcgttctgatcaatgagtactaattttgcacactctatctaccagttgccaggtttgcaggtcggttgctttcctttgtgtgcttctagtgaatgatgaatcagacgaccagaacatgtcctgacatcttaccacctccttgaatcgggttgcgtcgtgtgttggccgggctttacaggaaacggaagctggtgagtcgatcgtcgagtgaccggacgtgaattctaaacgctgtgctaacgtatgctggaactcccttcgtcgattctagaaatggtaagagcactacttgctttggcttcgactaacttgacagaatatttaccctggtattcattgattgtctctagtacgggagagaaaccatcttgcgggatgtgtataaaggtacagatacctccagtcgccaaacaacatgtgcttattcatccttaagcccgtgatgaaagacctgttctcatgtttcttcctctctgccttgaccgttgacaacaatagaactcacaggaatgtgtttatgacgaccctcctcgatcaaaaaaccgaatcagaaagttggaagataagataggtcggtgtcgtcatcatcgaatccgctatgtttgtcgcgaatgcaagaaagctgcaagaggtccttcttgagtttcactgatccctctttaatcactctgtgtctagctcggctcgaagcaatgctttcgcaggcaaactcaagcccagtcgccctgagctcttgcgattcaacacaaagacgaaagtcctcgggaggatttccttatcccaccccaagctacgctggaccgagcggtgtttcagaggtatctcatccagctcgacaagtcaaatgtgagaagcaaaaggccttctctcaagctttcaacgagttatgggggatgagttcggtttctggatatggaagcgcagaagccatcaaagatcgatcacagtcactcgatagagatacttcaaacagcccaccgatgcccacagagacagattatgttgcaatggacgtacttaatcaactcatcggagaagcgggtcaggttggttccgtgaccgacccatggaatgtagatttcagtcaactcatagggcatagcccagtcgattcgcccacggaggctcctatgctcaacctcaatctcttttcatcgctacagattgacccaactgcatatcaacaaattcctatctccatccaccaggcaaacacagtctttcctacccctcaagaatctatatcgtcgctctcaccgtcggttccgcccacggattgtgccactactttaagagcatatgtgatagagcgagaggatttacccgaacccatcaaatattccttgctcaaaacattttttaccggaaaaaatatttttggaatccatctcaacctcgacagattttggaggtcagtggtttttaaatgtttgctttctctggtttactaacaaattagttggttgagttctaagaacttacagttcgttttggccttacaaccctaccttttaacctctattagctctctgcgggaagagtcaagcgaaaaccaaccacatcctgcctttctattcgcaatagttcgtattattcctgtcccttgttgttatctcatctcggctagttagccttcgtcagtcaccaatcaaagctgtcaactcaatctgttcattcggaaactcttatgttcttacgatatcagtaccattgtgtcagtcaactctcgtctgatatagctgttcgggctatggacgacttgttctatgagatggccaaaaaacttctagaccagggcatcgatagttgggacagtcgaacgattgacttgatcagagcttctaccgccttgtcttacgcgtgctgtaagtacatggctgatgaaggaaccgatattgatgcttccgagctctgacacatatcttccatgattggcatctgacgtgcttcagatgcgaaagcaaaattcctgccagcctgggttcttggaggggtaggtcgttctcccttcgacattcctctgacttgagatccaaatgcgcgcgcatgactaattcaaacggcaacaatcttcgcaaaccaatctcagctggggatgcgtctgtgctctcttgcccaccttcaaagaattaccttcccattaagctccacatcagtcaagtatccgaaagtcagcacacggaacccaaagagaaagtattgtaagcaccgaaacaagcaagttcgccctccgaaggatgctatcgagctcggagattatatacatgtgttttggaacgcatgggtaggttttcttagtagctcttttctcgcgtcaacagttttcactctctcatacaaggcgtttttttcattctacaactcaacttgaatcgaaacaggccatcgataaatctggagcgacagctaccgggtttgctccggtgagtttcaataatctgttatgattatgttctggatgttgttgttcatatcaaagcgtcatcgtctcataaacatttgtgtcgacaacacttctgtgaacgtttccaggcaatgcattggtcagaaattgaaacccccttcccgctaccgttagagaagtacgccgacgtaagtttttttttcctccaagtctgtcaccagatttcatcaagtgatgagatcaatatcagtaataccactctctatccttctttggtagatcgactctatcaatagccaacctcgaacagcagtgtatgacctgtttgatgattccaagccgattgtcgccggagatctgttcgtctttctcttattatcgtcctttattcatgagtgctatatgaattgacctgttacgaactatgatgctttcaggagcgcttcctgtcattacatcgcgttattgtttttgaatgaggcatcccggttacaagacgaattcatacaaccttctactcgtaatacttatcttgcacatcacctaagctctccggcagagtcctttcactgtcctgtttcgacagcgagctcatccaacggctcccctgatcaagacctcagtccaggtccgacaggtcctgtccctgtagaaatcatccagcttcacagtgcactttcgagatttgtcaggtcccttccggctgatcgtgtaaatcccgctcggaaagtgtgagtgattcgtctggatgttatcatgtacgaggggtgaatcataaaaccaaaacactcatcgattaattatttgtacccttgggccggtggacgtttacagtctcggcggggccccttgttggaagtcagatccgactctgcaacaagaaggggacaacccgagtgaagcggcctctcagatatggggggtggatccagatactgttctgatgcataccgagattcacacgtacgttgccagatcttgacctttcgtttctcgatcattcatgccacatggaaagtcgatacttacccgattgatcaaaacattcctctggtcagcgcgtttgcattgctctatcaggaacgatcagatttcgagcctagcgcgtgggcgcaagctgtctcgtccgctcgatctgtggtcaagatccttcatataattgccgaagtagatttcagtcgatttagcctcaacttggtggtgaggatccttcttctctggattacagtttctctttctcttgtttctttcttttttcttcaattggagagtgatcgaacgtgagactgaaataactctgcgcttgtgaatcctcgacaggtatgctggagacacacagcgtttgttttgttggaggaagtcaaaaggcatcgatcttgtgggaatgaagaaggttggtttcttatcgaacatattgcggctcgtctcgtcatcttctgtgcaaagatatgttgaaattgacgcctggtttcttttctcgcatacaacagaggctctgcaaatcgcgattgaggtcgagcgtgcgtaacgtttcaataactggataaagtacaaatcttagagcacaacatctgacgcgttgaacaactcctcgatcaaaacagtcattgttcttgccttgaaacggattggtgaactcttcgctctcgggtaacgaacctattctttccatttgtaaatccatccggtttgctcatggtcgttggctaactctacattactggatcatctttaggaattcgtctgccgaagttattcaagaataattaagtgggttgtggatctgggagctatttagttctgtatctgtctttgtgtttagttatcgccctgggttgtttttccctcttatgaagatcttatcctttcgctctatcacgaaccgcctcaaacggcacctttctacagttatgactctcatgcctttcttccaacgtcgtacatatcaccgggcacgaacggtctttacctgcttgtatattactttatatcatgctgattgggattcgaattgtagattgtgttgatctactcaacgtggtcctcttgatacgcttccgcttaaaccaaatatttaccatcacgaggtcaaagctagttgattgaagaaaaaagaaacgaagaagagagaactttcgagttgttgtagatgaggtgtgcaagtcgaacaagctgtcgcactaacacccaatacgatccatgtatagatcgttcttacatatgacaatgaatctacaacttgatctcggagctgcagtcaacagtctgatctacagtgtgactgtgctcagggactaagatttgttgtggcttgcattggatagatccacaataactatgcagacatactccagctgagctttctaactgctttgatctttttgtctattcactgaagactcgttatgattgataaactgcgtttatcaatcagttttgaacaaatcagtttcactttatctctggcgcaaagaaatgataattcgctgatatcgagagtgctagggttagtgaattacataagcatctgacatcaaaacttgcatctactgattcaagcctctttgacttcatttcgtccagcgatgcccacctcttacgttatacatcattcgccttttactaacgatgtcacggagtgcgcatccaatgctgagactactagaatttcttcccactcaactcgagtataaactgatcaaactttttgcttttcgacgcattcgcctttcttttggttctgtatctttacatctttccgaatcaaaaatggaagaacaatgttgataagggaagtgagagtgctggaaagaattcatatatatctcagataaagatctatcttgtttcacagatttttcctcttctcatccgaacctaaaagattctctcttctctttccggatctgtcatcatccccaaccgaaattgtactaccaccgatttctttactttccagtgcactgacaagtctggcgatgaggcgaccttgactttcgactacttctctcaacgaatcaatttggcctgagagtgcttcttggttccttgccaactgatgaaaacattgataaaaaaaaacgtagatcgatcagtccgagattccaacatggagagacgatttgggatgacgatacgaactttcatattgctcagtctgttcacaccttcttgcatacctacactcccactcccgcccccgctgctac

SEQ ID NO: 2567 - DNA, 20550 bp, Xanthophyllomyces dendrorhous
cccccgctgctaccgtcccctccccctccgccggcagccgtagccctcgcctctactgttctcggcggcctacgactcagactggcccgaggagaagctcccgtgggaatagttgagtacttgtttgtggtcggaagaggtgttaaatctcgggattggcgaagagacgtcagatgggacgttgacgagtgagctgtggattgatgggctggggagtcgttgtcctcgtcttcgaccgattcaatgacctgattggtattctgttcgagacaatgaacatatcgttagggatttgcgagtttcaaactctgtttctttccggatacggatgatcatgaatgacaaaaagaagcgagtcagaaggccgaaaagatagtcttacttgctcagcatgtcgtagggcgtcccaaacagtcgcaaagtttcttccgagaacgaaactaggcaacgcgatgaggagcagaccaaacatcaagagcgggacaacgatgatcttcccaagtgccgatcctgcaacaaatacagaaaagatgtttaaattgattaaaaaaaggtttttcatcgtacaaaatggagtgatcataggggatgcacttacgaggagtaacctctccatatccgacagtagtgatcgtcaccaacacgaacctacatgaacgaccatgagccaacggaggaaacacataaacaaaaacgataagcgcacgattgccgagaaacacagtccttgaataaaaccccaagactcaccaagctgctgctggaatgtttccgaacgttgtgggatcaccttcagcatcgacgaatgtctgaaggacatcgtcccatgttcctctttccgcaaaatacaccaacctttttatttttatttttaaagaaaaagaaaaagaaaaaaaaacgaagaacccagagacgattgtagaaagaaacagagtaagatgatgaggtcaatgttcgatcggtaagatagacctcttcaagttacgcgtcttacgtgctaaagatgatgacaaccatcaagatgaagaacaacaaggcgagtagcgcgtcttgactgagtttgattgcaatcctcatgacttcaatcgttctgcacgtttttcagacaagccaaaaatttgaggatcagttgcattctgcaatgtcaattatggaacgatcgacatacaagaccacagtgttgctgtatcgaaatgctcgaaatactcggagtagacggaaggtcctgagaatagaaaacctaaataatacagactgacaaccaagatatatatcagacagacgcacttaatctatcgcagactttccaagaatgattgaataaaatacgtactgtgtcggcatggaccagaatttcgatataataaggaaagatagccagcaagtcgatgatcccaaagaaactcgagaaatgactccagaacaaatgtttgttgtcagaatgagccaaaagctatacgaaagttgaatgtcaaatcagcaatgaatgaaaatgcgatctgtgttccatgccaacggaggcgacatacccgggcaagatactcgacggtgaagagcacgacgatcgtggtgtctaatccaaatagggaacgcgcaaggagcggatttttatgaaatccaggaagcgttgagaacacggtgaggcatgctctgtaggttgaccaatcgaggaacaagtgtcgagtagaaacaaccagaagatttcaggagacgtcaataggtagtaacagaagaaaggagaaagcaactgggctgaaagcgactgacgatatgaggataagtgcggtgaccccccaatggatgtgaaatgccatgtctgaactcgtcggctcttccatcatcaagaacaactgtcttctccaaccgctcttcatccctcttgctatgtcccatgtatcatcgtcgttccctagcccaagcattgctactgtatttcctgatgtatgtcccgagtgagttccatcaggatcgtgtatttgacgatttaaatctgcaggatgatgggtctcgtcgacagtaaagtttagagaggctggcagatctttacgggttagactaggaggaggctggttccaaaggtgcaacgtatccattagttgggctgatgactggttcgataggtcgtgcaaggagagacctctaggtctcccgagtggtctggctgaatgagtaggcgatgttgtaagttgattaacagaagggaatgaatgtttggtaggagattgaccgttgagacgaggtgaagctggcggagaggatagctcgtattcttcagcaatcatggtgggagaggaaggtgtggatccagaatagcgtctatagctgggtagtttagaggaggatgcatgggaggatgacattgtgtatgggcgtgtaacgggacgcgcttcgccgtctggtgttcttgttttggtgaaacactggcggaaggttccctggtcagttaggagaggtataaaggctggagtcaagaagcacacataaacatgtgtaagtgtatatgtatcagatgcttaccttattcactatgcacaccaactgaaataaagaggaaggatgtgcaagtagaagaattaaaggacgagagtcgcagttcgggacttttacattttgtcttacattccatttacccttctggctaacaacacagatgcgccatgtcatttatgcccttcgttcttggtatcatgtcaagatgaatgtgcttgtgttatcgagcttgtatttacctagcagatagcgtgtatatttcatgttgcagcctttctgctatcacttgatgtacaaactatgtcaagcttgctcaggttatacacagcacagacacctcttgtgcaaacaacaggaaagcaagcatcgatatacgtgtcttcgtcccttttgacttgggcggatttttttaatctcactttctaagctaatctagggagaatctccaccaggctgcacgtctattggttctgattcttgagctgcgatcttcctgccttcttctaaactcttgacctctcgggcagcaccttgaccctttgcccttgcctcccctacgaaataagagaagaaatgcagcggaaaaatgatgaaagaaggatggaagtgtcaataaaaatcagatagagcagttacaatggatatggtagtgttgaaaacaatagactaacagctgttctcgccgttccagccctcccgggcccaaatcggtacacccgtctcaaactgtccaaaagatgttttgtatctgatcgcatgaagatagatgaacaatctatccggatccggatcgggtgcgagtgggatatagcaatgtttgcagaacccttctggcggaacaaatagctcggcctctccttctctcgattccttaacctcctctaccttctctggctctatggtgggcgagacaggcttctcagaaggcgcttcacgaacggaagatttgggggactttttagatctaggtttgtcggggagctggtcgagagtagccttcgagtcgtgtacgagcgaggtagccaaggatttgataatcgctggtgatttggtggcctcattggtgtacagcacaatatctttccacctggcccaatcttccgcttcatccttcatccttctcagccgacgaatgatttccctagcctcgtcactcaatttgatcggactactgcttccaatatcttcccctgtctctcgaggcatcaatttccgtcctctctccccttctttccgggcttcggcctccttcattctcttgtcaacagccgccttggcttcatcccaatcggctgcctctcctctcggtggggagtaatcgcgtttagcggtcgagcctggatcagccttccagtcggaaggagtcaggtcaatccctcctttggcaaaagtagccgacgccgaccagaccgaggcaagactatatattgggtcgttcggaatcgggtggccgagccattgaagatgaactcggatttgatgagctttttacaaggaaaaccagatacatcagtatgagttgagcctttcgaccagattaggaacgcgacaacaagagacactcacttcgacccgtctgcggtcggcatgccactacactttcattcctctccttgtcgtagaagacacgattgaagattgtcttggcctcttttccttcttttgcaacaactaccaatccgctctgcttgtcgatcgtcaacaacggttggtccactatcatttcgcctctgagggttcgaaaaggaacgatatcaatatcttgggtcgccagcatttccaagaacctcgagacaaaagacgtactctgggaactctccccgaactcgagcgatgtactccttcttgactcgacctttgaggaaatcttcttgaaggacagctgcagccttagcgttaagcgctacgaacatcagtccggatgtcaacctatcgagtctgttaacggctgattatacgagacaacgaatgttataaatgcctcacattagcctcatgaatagctcaagaagaatcgatgcagaatcagctgaacaagaaggatagaaacacatgacttactatagaccttcttgtagccatactctggactctgcagagtttcggtacacgtattcttattgtatcgacctgtcggatgaaccgggtaactgccaggcttgtcgatcactatatagtctcccttgggatcttcatgaatgatttggatcgggtgagccgtcacaggaggctcatgtctatggacgacattcctttagagaatggggaaaaactagtctcagcccacggtctgattgtgaatactcagaggagtaccacagcaagagacgtggtgaatacatactggagggcatctccatttcgtaaaatggttgtagggctggcgacctttccattcaaagtggtcacacctgcctctagcgcatgtcgctatgaggttataaatgtcgaaaaccaagcggtgagtggaatgagcgacagggtcagacgtctgtctcgctaaggaaaaggccgttttagcgaggatgtgtcaagaatatcgtggaaacaagacgaacataatactccaccgatcggtctctaaattctgtactgacaacctcaagcagttctcgcccgtaccagcgctgcttggcaaacgtcttgtacgggtggtagtacggttcgatatatcgaagcccagggttctgaccttgcgggtaagtcgatttgggcgtggtgatatccgatggcgtagaattgacggtggcggcagcggcagcggcagcggcagcactgagagagctctctgatctagacaggttcgacattgttctcctcagcattagatgtccagtagaaagacgctcaacgaaggtgccgagagagaaaggaatgaaggggcaaaggtcgaaagttggagaatgggatttttgtgcattttcatttttcgtcaactgttttcaaatatttcaaccctcaaccttttcaccgctccaatattatcatcaacccgtccctctatatgattgctgtgattgatcctatgtgatgagtatcgtcacagtccgagagatgggcactcgtatactatgcaaaggagtagtctctggtttgatttagagcatgcgcatcaagcgagcgtaggactcatcccatctgctaagccaacaaatcagactaccaatcctcggctcccttccgactggctgattcaacgacaaagtataatcaacaatcatgtcaaagaatcttcctcgggatgtctttctcatcatcagagatttctgcgatttagatatcgagtcccatctcaatttttgccaggcgtcgccttggctggaattacaagttggtatatccctctttggtgtagaagttcacaaggcgatatgatggatgaatgctgaagacgtatcgatgggtatcatcaagatctatcctgaccgattatggaagaagcttattcaaatgtcggggtacagccgatcaaaccacgatctacaagggatccaaagagctcggtcttggaagtctatcgcccaagaactggctgttcatcctggaggtgttggatgtgagatcagtcagatcatcgctgtagagcctggatcggaaggaatgttggcgaagactacttggaggggagtgtgtgaatgtgcgagagactggaatcgttcgtttctcttctggttttgaaggtctatctgacattatcttctctgtactgatcgttatgttcgtgattttatacaggtagacactatgaatattcaactccaatccctccgtccatggtgaacgaatcgatcaccgaactactgatcaaccctcatctacagcctcgaagtctatcagctgaaggcttccagaaattcaacgagcatgctatcagaccggaagaattgatcgactacgcttatgatttatcggcaagagacgaagttgatctagagttgataagaaatcatcccagtgtcgctcattctgtaagtttgcaattttctgagagatcaatatcgttttcaagattcggctgatcttttcgcgcggtctttgacgtcaagtatgcaacatatccaccagtgaccgtacgcaatttctcccttggcaaactaagaaggcacttcatcgctgacgatcagaattcatactgtcttttcatcgtatccgaatgacttgagtgcaggaactgacgatttgggtaggatcaatcaccgtgtcaaaccctgatggagtgacaatatgggatgtcaggcaagccatccttacatctgatcgtcctcgcatgagtgatgttcttccagacaccgatccaacgggtagcgaggaaacattgctagagatgtcgacatcgacaagtagaaaccccttcgattatccatccggagaatggatctcatcactcaggtaagtctccttttgtttcctagatgtctcccacgattcttcgctttgatttgtatatccagccctcaactgacctgagccaaacacacatacacgtaaaaagtcgctcgatcgcagcgggcacagaagatcgtcaggcatggcttcaaagacaaccaggctcagtctatataggtcggccaaaccaggttggatttgagcacggcgtccaggatgtcttgtccatgttctccttctgaacgtccacttgaagatagctaaagtgataataaagatacggtagatgggagaggaattacatatgaattgatagggtgatagagaccaatgggtatatataagacatggcaaagcatgggaacaaagcgaaagtggaaaacaagaaggacacggcccaaaagaatcaatcaatcgaagagaaagaaaactgggacagagctctcggaggcttattcctcctgttcctcatcttcgtcatcgtcatcttcatcgtcatccccctcctctctgaccctcgtccgccgctgcaactccttgaacaaatttcctgcctgactccactcgatcgtgaacggtgcttttgcgagaaacccaagtcgacggaggtatgttttgtctgattccaactccaggtgaagaggcgtgtagaccagaattgtctttctgttcgaagaggatgaaccggatgggtcgagggttgtcgtttgtcgaatcttgaagttgaggcctgtgatcatgtgaatttaaggtcaggctagagaaaataagaagaagaaagaaaagaagggaggacaaactcttttgatcttcgccctgagctgtaaagatacagttccacgtggtgtcccttccaaactctccttcgagggaaacgacattgactacctgcagaccggagatatcttcgtaaaactcaatcgttcgagacttttcttcggagtcatctgttttgaacggtccgttcatgtttttattagcggtgctcgctgagagggaatttgagttggtggacgttgcaaatggtttcgaggattgttcgatcgtcagcgcgagttccttttctcggattttgactgtcagatatccgcgttttcgttagtcagtgatcaggaaagacaaacttgaattcaaaagggacgaaacaaagagactcaactggtctcggcttgatctatcaaaaccttatctttttctttcagcctcttctctaactcgcccagcttcttttccaacttgagttctgcttttgtgggaagtgcgtttggctggccgtccttatctttacctgctctgtcgatcaacgcgtttaagtttgctgtcttctgcctttccagcaggagagctttctcaaggttggcgataatgttgtattggtctgataagaaaagcgcgagggaacaagataaatagagcactatcaatatatagtgcgacagaaagaagaaggacagagatcagatgggacccaccttgggcgcgagattcggcagtgatcttgtattcctccaacagagcttcgaccccagtagttcgtttggaagagagcgcgtcgaattgagtgatgtacgcgtcccgttccttcaaatacgcttccttttcctcggtcacctgaaacatagttcagtcaaagaacgaacaaaggagagaagattgaatacgagaagaatagaggggcaaaggaagaggatgtcaggttgattcgccaaaatgaattgaaagaagaacattgatactcacagtactgagggttctttctagttcttccaactctcgatatagcctgctgacctcatcttctatgctctcctccctttctctctctcgtcttacgactctcgtagagcctgtcggatttcttcctctctttgccccgcctcctgctgttgttgagtaggtcagggaggcgcgtggtgatgatgggtggtgagaatcagtgcgacacgtgttggcatttgcgcttggtttagcacgggatgttgaagttgcaagtgattgcgctggtcgtttccgggaaaaaaacgtgttggatgctaaccaaggagacaatggaacgccagagtcagcaagacactcagatagcaagaaagagaagacagagatagagagcaagtagatatgcagatataccttggttctgaccgtatccatccctatcttcctcatcctgactataattcatggtatcatccagcagagaatcctttgtagtatctctatgctgtccaagttttgctcgtttcacggctgacggttgaagttttgacggaagggcgtagctatctgtcggtggtcttgcctgaagagaatatatgtgtgaaaatgaggagttagtgtgggtgttgaacctctcataagcgggaaaaagaaattgcaaagccaagatgcctacttttgccatgttctgttaaaacaatgctaagcacgaggaagataatatagaattcgagcggataggtgggatgggtgctctgaagtgaaggtataagctagacgagttggatcagttgaagcaaggcaagtagaagataaattcaacgcgcgacaccttcacgcgacgcgtcagggcacgtcttagggttggacgacacgtgccgattgagtcagcaacgaagacactctgtctatcgtcttggggtagactattgattcaaaacacaggctggtatgtatgcatatatagataagggaaaggctatgggatatgtttgtgtttgcaaaggacccagactttctgcactggactttgagctcaacagagccttgccagtagaaaggattcgaccggatggattttgtttctacttcttgtgctacacgaattggagatcgaagtgagagcagactatatggatatgtccttgtacgtttttgtgagtcagagtatgctctaacagggtgaactgctatccgtagggtaagtggtctctattcagagcgatctacatgcacttgtcggtctacacctgtggatctcgagtgcaacgaactagtccaaatccaataggacacactgtagcctgacgtgatggaacactaggaagggttcaatagagagtttaaactgaatgtgtcggtccctttccgagatggaccgtgcatgcatgtatgcgctctagtctctcggccgcccatctcgttagtttctctgttcacttccatcttccatcttcttctttcgacaacccacatcagccccatctctcgattttatcctacttatgacaaccggaactagtgaactacttcctcctggtattcccaggcgaacctctctcgttggtggaacagtcaacaccaaggacattggaacaccggccgctcgacccaagcgaaaccacaaacgttcactcactggttggtttcttcttactccttccctttttgcaatctccatctatccgagggctttccttctacctctagccatctctctcccctgtccttcatctctcttgttaatcactttgtggcatctcttcgtaatcatacgttgctctgtattcctactcttcaggaaactatgttgtaagttccgccgtcgctttgttcccatctcatctctaaagtaccaaaatcgttcctgtccggatcatacgtctgatttaagcatgcttctgcttgttctccttctctctctctctatttagcgtcccggtgagaaagttgacgccagttggccactcggtgatgaaaaggcctggaaagaagctcttgaagccgatggcgatctttgtgagttcttgaatcgcaagtttgtgagaagtccgcgctaacctttcggttaaatacagccatcaagggtcttcagaaatcggcaagttctcttcgctctggtcttagctaaatccgcgcacaatgactgatcgcctcaacttatatacgcttatacagatcgtccacaacctcaccaccggactcgcccgtcaggctttcaatttgcccggtgacaatgtagccgcctaccaggctaccgcgctcagcgtgagagatcagcttattcgacagtggaacgagaccaccgcataccataccaggaaatctcccaaacgtttgtcctcttcatggttgttgtgtactggtgtccttcttggtctctgacgcatcaacccgcgtctttaggaatctactatctatctcttgagtttcttatgggtcgatctcttgacaacacgcttctgaatctcaagctcaagccagaatacaccgaggccgtcaagaaccttggtttcagcatggaagatctcttgaggtgggcctcccatttgtgctcggggatctcactggctatgatcggatcattcattatctacgtctcttatctcttcatctaaccgccggacagctccgagcgagacgccggactcggaaatggtggcctgggccgactcgccgcttgctagtacgtattgttgacaatctctctagatgaacgtttctcgtgttgattagtatccgacaaacagcgtcgatgctatggctaccttgaaccttcctggttggggttacggtcttcgatgtcagtatcacttcgttttcttcgtggtcagtctatcatcaaaacacaaactaatcaatcttcgtgtttgatccgataaaatcacccatcaaacagaccagtacggtatcttcaagcagctcttggatgaggtatgcctatgagtctgtatcttgatcgtgaaccttctttctgctaattatgattctatgctcttgatcacaatctggttcatcatagaatggcggtgcgtagatcttctttggctctcgatcggaattaaacaaatctgaagtactgtttccttttcctatctaccaggtcaactcgaggcacccgacccatggctcaacaacgagaacccttgggagattgtccgactggatgtcaccgttcctgtccgattctatggtcgagccgagcgggttggcggagcgaaaggtaaaggtcaggtcattggtggccaggaagtccttgcgatcgcgtatgatactcctgtccccggattcaacaccaagaatactagcaacattcgattctggagtgtgagtaattgtacaagcttagagctgattaacgactgtcaaactgatatgaatgcaacttgttaattctccttgatcaggccaaacctatctctgggtttgatctacagtccttcaatgctggtaactacgaggcttccgtcaaggctagtcaggaagccgagtcgatcactcgtgtactctatcctaacgataacagcgtgcgttatagttttgttttatgagattaagataatcataatttaatgtattgttcatttgactatataggaagccggaaaggagcttcgactgaagcagcagtacttctgtatgtgtcgttgttctttgcagacgcgccttcggttactaacagtcgggatttctctctatggactcgaatagggacctcggcatctttgttcgacatccttcggcgatttaggaagttagataaaccgtttaccgagctgcccgactatgttgccatccagctcaacgatacccatccgacattggccattcccgagttgatgcgcgtcttgatcgacgaggaagacgtcgaatttgatcaggcctggactatcaccaccaaggtatgtctcgaaagcttcaaccgcaagatccatggaatgtcgatgtgttgacctttctggctttctcttctccttcatttttgtcattgttcttatatattttcctaaataaaggtctttgcgtacacgaaccatacggtgcttcccgaggcattagagaagtggagtgttcccttgatgcaacaccttctgccaagaattatgcaggtatatcccgtcctcttatttgctcgttccatcgaagagtccctctcttacaatgatatctcatcttacagattatctttgacatcaacttgtgagtttgggccaaaagtaccaattcgaattcttctgactctggaaaatcgtcgttctccttttcctcagtgatttcttacaagctgtggagaagctcttccctggagacgttgcccggtaagtattgcgctctcgattaaacaatccatgaacaaaatgtttctcatctcggtccactcaatgttgaacatttttacagattgggtcgaatgagtttgatccaagaaggataccctcagtacgtcaggatggccaatttggccgtcatcggctctcacagagtcaacggagtggcggagcttcattcagaactcgttcagacccaattgttcccgtcagttcttgctcgattctgtttctgacgctaagccatttagtgtcatgctaaaacaagactgggttatatgatcgtatcgacagtgactttgtcgagatgtttggcaagtacgtgatagactgtcttcctccttgatcgaacaaattgttcatagctcattttttctttctctgaacagggatcacttcacgaacgtcaccaacggagtatctcctcgtcggttcatcgatcagagtaaccctgacctgtctcaactcttgaccaaatccttgggtactgaggagtggaagagcaacatgtatttgctcaagtacgtgcttcaacgctttctgtccgttgtgtggataggggcccttaattttgaactcacaatgtgattctgttaacagaaaactcgacgactttatagatgacgaaagtgagtgatttcagagctctgacttctcgacacttacaaagaaatatgcttgacgaatgtctttgtttcgaactggaaaggtttccgagctcagtggttgcaggttaagaagaagaataaacaacgactcgctcatctgatcgatgaagaactcggtattaaggtttctacagaggcactctttgacgttcagattaagtaggtttagctccttcaccctttgatttctcctcaacatttattcaaagaatacatatctgacattggttaattttcattggcaaaaaggcgtatccatgagtatgtgtcgcgccttccttacagatttggtacacacgttgagatatctttatatcgtattacaggtacaaacgtcagtcgatgaacatcctcggagtcattcatcgatacctccgaatcaagaatatgtcaccagaagagagaaaaagcgtcgctcctcatgtgacgatctttgctggaagtgagtttgatgatcttcaactggtaccatatgtgctattactgccgttctgacgcgaggtttcatatctctcttttgcagaggccgcgcccgggtatgtatacattcaaagatgactcgtcaagacagaaggttgatttttcttgcgactcaacgtgtcctacacagatatcatctcgccaagcagattatccgactcattgtagtcgtgtctaagattatcaacaacgatacagatatcggagatcttctcaaggtacgttcccttatgtttgtaattgtcacccttgtgaaattatccactaacagttgagcgccgttccgatttcgccgaacgatggcagcttgtgttcttgcccgattattcggtatcgctcgcagagattctttgccccgctgcggatatctcacagcagatctccactgccggaaccgaagcgtccggtacgtttcttcgacttagtgctcgtcttgatccttgcgtttgaatgtccggttgataaacatatgctttctccttattataggaacatcctgcatgaagtttgcgatgaacggagctctcatgctcgggactgtcgatggagctaacatcgaggttagtcattggattatctgtctgttagatatatcacctttcgcattggggttggtctcaaaacttctacaaacctggtgccgtatagatcgccgaggaggctggagaggacaacgtgttcttctttggttatctcactcctgaaggtaggtattttgacctttccaagcaagctgagagaaccacattgatctgagtgcgcttcattgacaactcaaatatagttgcggagaggaagtaccaaaaccaatatcatccagtgtcgatcgaggagaagtcgcctgcgctggctgctgtcttccagtggatccgccaggcgtttggggaccagttcaactcgatcatcgagtcgattactgttcatggcgatgtaagtgttgattgaccctgttgtgcataataagagtttgttttgctgactgatggttgtgtgtctcattgatgtgactttacagacatatgtaaattcgttttacgttgattgacatgaagattcaagacacatactgacatagatcatttgcctttcgttgtctgacttagctcgtggcggatgatttcgattcgtaagataccgattacttcatcattcactcttcgtttcgttcatctcatcttccttctctgaatgactgacctgtactgtggtttgtctatgtattctgcaggtacatcgccgcgcaaaaggtacattctagtcaaccaacactattctacaagtctgttgagaggttctgatcctctgacctttttcctaaatgctttcttcggcctgaatagcttgtcgacgatacgttcaaagaccaggaacagtgggtcaagaggtcgatcacgactgtttcgagaatgggcaaattcaactctgacagtcagtttatttcgcttcctctaattgatgagcaggatgtgtgctgatacgttgatacatgttcttttcccctcctttgaaaatattttctgtagggttcgttggatgtgtagttttgttgaaaccttttaccatatgattaactgacgcatacttatttgagttcatttaggagtgtcttggagtacgccgaagcgatctggaacgtaagcccatggttccttttcagtttcatgctgcttgaatcttggctgaccacagatttctctctcatcttatgaatcgtgcatgtttaggtcgagcctttgaaactcaagtagattgactcctctggtacctcttcatcatagagggtttatatttcaatttcgagcaggactgtttttttgttttcttattcccgctgtttcatgtttgtctgtgccacactttttttcctatttttcttctcctttagttgttcattatctgtctttttgtatgtgatggaatttctcctcttatattgttctcgcgctaaggccattggagatgagaaagagcaacaatgcaaaagtcatatgttgcgaaacgagaagaattgaggagatgaatggtcataaatggtgaaagagagcatgaatagacaaagatagagtggaggtgtatcagtagaggtatatcttcaggacgacagtgggatgatccggcagagcttagtcctggttgttcactcggattcttcgtcggattcatcagcttcatcgagccactgtgttcaacaaaaccggcaacgacagcagccaagaaaggaaggatagacatcagtctctcatccattcggatttccagacaatcaaatgggtaggagggaaggaaagtgaaatcgactcaccgtcaagaatggtccagccgcctttcggaccctcttcgaagtctccttgtcggtatacttcttgctgacatgcgttccccagttctttgcaatatcctcatctagaatatcagcctggtagtaaagcatcaagacctttggaacggatggaataagcgatgggtgatgggttccggcgagtctctcaaggcctcccaagagggctttctggtgcttttccgaggagaccatctaaggttatgtagggcgtcgatttgtgtcagttctgaaggtaaaacagaagcgggaggggagtacaaagcgagagacgtacagtttgaaggagtttgatgaaccgaggaacttccttgagcacatcatctccgaaggcccactcagatacaaccaaaacagccttgtactttttctcgatccccaactctttcgccttcttggccaccgccttcgggtccaactctccttccttcttggattccaaaatccaaagcttcagctgaaagtacgggctgtcctcgtcctcttcgtcgtcgtcatctcctccaccagaaggaccatcaacttggccaccgaggatggacattcccttgagctgttttgccaattctttctctcgagcggcaacggcctcaggagacatatcctctgcccaatcatcatcgtcttcgttcactcgatcatatcccgggatgtcactctcgtcaacttccacatttgcctgaccatcagcaccgtcttccgcgtctccctccgccgcagcaacggtctctccctcaggagttacagagacagccttgccctgaatcgcttcagcgttggcagccgtagagttctcggctccagacttgagtcccttaatcttcttctcgacaggcggtgggttcttgacgatgaaagaggtcagcttgtgtcggagatcgacgggagttcgcgctccgcaagccttgcagtctctgatgacgtcctcagatttcgtgatcgtgtagaccgtctctgggtttttgcaacttccacagagaatgaactatggtatggaaatgacaaagagagacagagaagaagagagagggtgtgtgtgtatgcgtgagaaaggaatggtctttactcttttgcaaacacatcggaaagaaaaccaatcgttctgataaggccgtgacaaacggttacggaccttttcaatgaagacatcgagtatatctcggagtcgtcccacgtcgtgagctccgtttacaatgtatcgatcgttcttgtcgtcgactttgcattgagcaccgagttcaattccaaagaacttggtggggtctgatgtgtgggtagaaaggcgcaagatggagagagggtactcatcaaaatcgtgagttctctctgagacagaagagactaccaaaaggggtactcacaagaaggaggtcgagccaatgctcgagcgacatcggacatgttgggaatcactgtcttgattccatttcctctgccttcgatcttggtctgcaagaccggcattctgaatatgattaaggtacaaagaacgcaaaagctggtcagctaagtggaccagagagaatggatatggaaaaagagtaaagaacttgcttgtatcgctgtacatcagaaagtgaacatcgattaaatgataataatcatgatgaccaaagtcagcgatctgacaagtgcacaaccaacacaagaaaacgtcgacgattcctttgccacgatcgaaggaaagtctggcgaaaggaggaaaaaaaaccggcgatggaaaaacttacatagaacttgtcctgaggaagagaaaatgagccagacccagaacaatatcagttccggccacacacagagtcccaccgaataaagcctatactcacatcgacgtctcttcgaatgtttacggaagccatgttgggtaggtagaataaaagatgaagactgggtcttagcgaaagagaatgtcgggagggactttgttggaatgggtcaagtggtgaggattataaatcgacgaaatcttgaggatctttttgaaacggtgttctcaggacgaggtggtagcgaggaggttgtgtgtgtttctgtaacgagagcagaatcaagtaaagatgcggtcgttgaagaggaggatgctctgggtgcaagggtgaagattgctggtctgatgaaggtgatgggaaggagagactggaaaaaataaatataagtgaatgctatatttgaatacttagctaaagtcaattaagtaccggctctagccgacgccgactcccgtcttgtctgtttccccactgaccttctcgacgaccagaccgatcatctagcctgggagcttgcttgctttgtttgctctgctggccaatctaaactcaatcaggatacagggaatacagggatgaatactaggagagcctcttttgataccatcccggtagatgtactgggtcagtcccacagggtgttttacactgcggttcatccgctgacttcaagtctgcatgcattcctttatagagacgatcgcgttcttcacagccacttctgatcctgtaggcccaccatcagatattccatcgctctgtaagttcctacttgagatcactgtcgaaacaaggcgttacccggtttgatcgcttcaagaatgcttctaggtcgcacatgcaaatctttcgcccggcatctctccctgcgatcattgccccatctgtatgctcggatatttagatcccacttcgataccgctgctctcaatcgtcgatttccttcctctaacaggaccgcgctcgttctttctaatgagctcgtccgtcgctggaagacactcaaaagggtccgggccggtaaattcggcgactgggccaagctcgaagattgccttcctggggaggacgaagggtatcacgatctttggacaatctggataatgtgcatggagaacggtaagtcttaaccaatggttcttcaagtcgcaactcgattgctcattctatcttcacaatttccatcacatcattccacagacggcagaaatcttgaacaactcaccaaatacgcaaatatctccacctatctcttattgttccgtcagcgttatctggtccccaccacaccatcctctgctatgttctcctctcggctaatcgcttcatccaaacgaagaaatcttccaacagactcacccacagttgcgctcgcgctttggatccatcactacatattcgatgcctcaatcggtaaagatagccaagatgagactaagccggatgttttatacatgctccgacttttcgcatttgctgctcagctggtccgtgctaaatataatttgtactcttctatttcacttcgaagttgattccttattgggagctaatttgataacaaccctcacaacagttcgacggttatctatccccttggacacaccttaagcttcctatcacacccgacgcacttcccgatgaaccaagccctatctctccatacttagccaatctgacaccacgctcgctgacaaccactatccaatatccggggaatctcaatcttgagatcagcccgcctgtggcagcccacgcgggcctcttgtcgtttttcggtcgtgttcaggaagaaggtggtggggcggacagtgttcaagtgcctggagatcaaggtccggtcttgggcgacagccatgatgaagagctgttcaggagcgtagaagatggtttatccgaaaacaccaagaaaatcgatagcaagtcgtttgatcgagactgggagcgattaattcattgccgtgaacctattgttcctcggcgtcaacccgaacttctgacggccactaggaccggtcccgaaatcgaatcggaggcctcgccctcgtcatccacacggtcttcaccgaaaccgactttaacgtcgagctcatctggcctaggcgcctggcgctgcaggcataccatccaaggcgtttggagcggtagttttgtctttcttgatttcgatgcatacagagatatgctcgatggatcttcccgagcaatctacgaaggtcccttcggccttcaacctcaagtctttagactgtccgagatcctcgtcaagcgatctccacaatctcagaagatagtcgaccagggactgagaccgccaattgtgaggccggccatcaacgctgggttcccattaacatggtcttgggcaggaaacg

SEQ ID NO: 2568 - DNA, 1512 bp, Xanthophyllomyces dendrorhous
gaacaagggtgggaacatgtggaccaacaggaggaggaagagatgagagagcgtggtgcagatgtcgatggattggagttgatcctgattggaacagtcagtcaccatcttttatcctctcttcatccatccttagcatcgaactatcaggttcaaactgacagacatcgcttatgagcgtgatctcatagggccattctgcttggggaacattcaacatatcaggcagagtccgactgtgggatgggctgatctacttgatgaaagactacactgtatgtcacctgcctttgcctttttccccaacttatcttgtgttcgctactatgtgaatcttacgtctgcctacgaattcaacgtacaaagccggatagcaggggaaagtggctgtacagagggtatgtggtagcaggcggcgcaatggtcggtcgatggcgcgatacattcacaccagtcagtgatgctttcttgctcttctctcgccttggacgttgttcgctgatgaaatatcaatcttcgttccgtcatcgtcttcaaactggttgaacaggaggcatattcgggctatgaaggatgttttcagatgaccaaacgtggttgaggtctgatatgtacaggtataattatgatgaataaacccgaaacggcattcttgcaacacggcactcgatttcgattgacaacaataggagaaaggcattaagggattaaaaagggaaggtgaaagtcatatatttacaatcaacgagccaagtcttcgacccactttcggttcctctccctttcctcctctaccaacctagcttgttctcttgcttgctctgctttctctttccgttttgcttgaacctcggcttctttcgcttgacgttccgcctctttttgtttttcggcttgtaagacatgtcgttttgtcgcttgattaggttcaagatagctagagtgatgaacaaaactcacaatagagatgagcaattgaacgcccaacagaaaagaaggcggaaacaggctgaacgaggagagacttacacccaaccccgattcatgccgacatcaactctatcttccttccatctctctgccacatcccccaaactttttgcaacctcctctaacatggcctccatgacctctttggggggctttggatccttgcctcctctctttttcttcggtccaaattcgatcgtcgtgcgataggcatcggtgatgtatgatctcgcttgagctactttgtgagaaatatcattcggcgaagaaacccacgagacgagtaattctttctcgatcccactgtttcgaagtccagagttcgaaccaatcgagttctgtttgggtttgctcgacgtagaactggagttggcggtcgaagagggagaagatatagattggaatttcacaatggagtaggccttgacatctgcttcttcaccgggtggtggggctccaaacgtcgttccgattctcaccaaaacgaaatcccctccggtcttctctttcttgcttccaacc

SEQ ID NO: 2569 - DNA, 6772 bp, Xanthophyllomyces dendrorhous
cttccaacctcctcttcggtaggagtgatcaactctagaacgtcttctctagcacgaacagagctcatctcgatcggttctgtgggtgcattaccaggagggatgatcgcacggacgaacaattcatcggggatctcctcgtttttcagatgtctgtctagctttttctgcaaaacctcgagttcctcgatcgtagaagcttgtctaagcttggttgtctttggacggccttctttatgccctgagaaagaagatgaagagccggaggccgtcaagctggcaggggcaggagcgagaggttgaagttggaacgccggcttaaaaggttgagctgtaggttgaggagccgagaaacgacctgaaagcctggaaggaaactttccggtttggagatcgtctctgttggaaggaaatgcaaaggaagaacgggaagagggagaagagaatcggtttgctggtcggtcaaacgcctctgaccgcggtcgggagtgatgtcctgaagatgactgtcgaggcggcaaagatgaacgagaagaaccaggcgaagagaacggtcctcgaacagaggaaggtggaggaggtgaccggggaggaggtggagagaacccgaatggtccattcgttatgttgggtcggtttggagaaattcgaggcgaatgagcatgagaagatcggccgtgtgagggtacgctttgggatggaggagttctagagtttccgggtctattgaagtcaagtgtagcgaccgaggatgaaaacagcctggctggctcccctcctagtctcagaggtccgacagaaggtttgaatggcattgtgagcagcgatgacctacaatgcttggtgatggctgatgatggttaatgatcagtggattgatgtcgtacaagaagagccgggtttttttttacgttcaccggttagtcaccagatatcaactctgacctctttcgaagacatactatcggtcctaccatccaccttcgtcccaaatacaatcaaactcgctaggatggacttgcaggaagacattcgagagctggaagcaatcaagaatgagatttctcaggaagagcccgagacattggctccccaggatatgctctctcagctccaagatatcaacgttctaggcgagtctcacccaccttcacagcatactctaatcctttgctgatatattcttgctctccttgactgaatgtacctctacagctcccttagtcagacattccaaacttccattcagacatctggtatcccagtatgatgtccatattacccatacgcctatgatccttgcagccgaatttgcccgtacgtcctattgtgcttgctcaagatttcgctccgttgtctgatacgaagcaactcatcaaaacttaccttgctcatcgatcgttacttcttccggtactgaatcccgataggaaatggaacggcgcgagagtctgatttctcgacttctaccgaagaaagaggcacgtttctcctcagcgaacggtctaatcccagcgtctttgtcaacgtgccggaagaggaaagcagctgcttggaagaggaggtccagcggttgaagaagaagcgaaaagtgaaaggcgcagtgattgctcagtttgctgccaatgatgcaaagattttggccgatgcgtgagtgagacattctaaaatttttctattcgtgattatgtgttgggaagggtaattctggctgacagacgacttcaaacgagacttctctagatgtgaattgatcagtgaggctcatcttcgtgtttatcgcccatgcccctaggattgctgactgaccaaggaacctttaatgcacaaagatccctatgtagatggaattgatctcaattgcggtaagaactctttcttcacaaattctcatcagaaaccctccgctgagcgcaaacgcccacctcttattcactcgcaggctgtccccaaaagtgggcatatcaggaaaagattggttcttatcttcttcgacaaccggaaactgtccgagatcttgtccgcgctgccaaagatcgactaggatggggtttcccagtgagcgtaaagattcgagtcgactctgatcttcagtgagccttaatccattcaacttcctttcattttctagatcgttcatttcctatacttaacaccccgctgtaatattctcctccaaaaaccagactcacccataaattgattgaaactgcaatttcctctggtatatctcaccttcaaatccacggtcgaacccgtcttcaaccatcaaccgtgccacctgacctaccggccatcaagtttgcttgtgaggtcgcttcgagacacgggatatcatgtgtgggtaacggtgatatctggacggaggaggatgcaaaaatcatgagaagggagaccggggtgagaggtgtcatgggagcgagaggtttgttggccaatccagtcagtttatatgtttctctcctcctctttttacctttctctgttctttctgcggcttactttaaaactggatttgatcctggttggcttgtgcaggctttgttttcagggtacgataaaacacctcaggaagcagtcgaggtaggtctctgtgtttttatttaatcaagatctttatgattgtaatgacaatactaaaactatcattttgtttaatttatcaatacgaaagtcgttcttaaatatctcgacatcttatgggttcatctaccctcttttgtatgtcttcttggctcctcgtcttctcggcttctttgatgaacgcaattaacccagtcgccgttcaaactttgataaagccaccgacatctatcaatgatgctcgagtcccatttctcgagaccagaacgcgtctacttcaatcaactaggttctcatgctgctgtgtttgatcacttagcttcgagaggagtcggagttgggctggaaccctgttcttcaagagctgaccccgagataggagtagggagaggaatagtgagagggtgggatggagtgatgatatgatcacatatgtaaaggttgttgcgagatgattaagattgtcacatctaagaatctcccatgcattaatcttaactgaaaagtgatgatcgtgttataaaatcgttatataataacagcctctccttcaagctcattctttgtctatcaacttgacccttgctttgtataaagacaagctgccagtcctaaattttaggcatctttaaatcgttcttctgtcggtcatgactcgtacgatggatcccacgcctgccacttccgtcaactatcattgttgaattaacccacccagaattcaatccagtagatcacatatcagctcctcttcatccaagttcatcaactcgaaatctatctcgaaaacaatgaaccgacacaccttttcatgccaagtcaagaaaaccgaagggttgacgtccaaaccttcgatcttttccattccctgatggagatcaaagacaaaacatgaatgagcccgagttcattgcttctgatgttatccgaaaaaccacgcgagacgcgaccgaccttgtagataaatttcataagcccgtcctgctcttcagggtttagggacttgatcgtgcttgtgatatcggtagattttgttgagttcaggataaggacgaacgtctggaggctagtggcctgaaagaagcgaaatgagaagagagcggtaagtaagggggagatcgcagaaaagcatcagccattttagtgatcttgatcatgaagaacatcgggatagacacactttggcgtgatcatgatcgactccaaatggatattcgcttaatagcaattgtaatgcgcccttaatgtcttgtctgtggatacgtaaggcggtagaaacagatggtgatcaacgataacacaacgtagcgagtcactagaatcagcgttttcacaaatgaaacacggcagagggacaaccatggttgtaactgaccttccaagtacctgtctaacctgagtagatacctgagtggcgtatgcggctgcctcttcggctgaccgagtgtcaggatcgaaaagctccgagtcttgtagggtatcctcatcgtactggctgtaaaggatcagtcacagatgggctggtcagatggctgaacgcgtgcagacaagacgagagcacttcaaaacaaaagactaaactcgatgttgattttcctgaatgctgtgtcggacatggctctagattgaataagaatgaacgagaaagagatggtggtcgtcgtcgttgtcgtcgttgtcgagatggtagtagtacgttgaaggcgatggaggagatcatgattcccaagtgtaccccagatgctgccccagatatggcccagatctacccaagtcatgaacaaaatacctgctcttcctctcaacacatttgatagccggaatgaatcaaatgagatcaatcgcaatcagtcactctcaaagataggcaatgcatcgtcggactccatctctgaacttgcagtccttggctgcttcttcgccggtaacggaaagtccacgatcaccggcatatacatcagcatccaagtttcgttcgtcccaacaagagttccctgcgtccaggtccattccatcgattgtgaccaccggggtccaggccgatgtcggattaggtattcatcaagaagaggacgtcggggatgaaattttagatagtaatactgaaaatcagatcactctggaggaaaatcttattcggtatacagtcagatcgtccgtacagtcatcttaatgcatcttctgtttcgatttgagtgcgctgcttgcactgggccgaagctgatatagcagcatgacatatggtttcgtctcatttccgacacacgcaaaaaacaggagtaacgctctggaagaacttagagtgaatgtatctgacgcaagctctgggaggaggtgctacaagaaagttagctcgtccgcttgcttgatatctagtccgagtgatgttgcgtctgtacattatctggcctcagactgattctagtgattcaccgttccttcatcgacctttttgatgggaaaagaacagacagctttattcggacatgattgtcactgacgtcaccgtatgtctcgttctgatgcttatgtccagaacaattccttctcagagctgaccgcgcatttctcgtttgagcgcgcgcgaacgttcatacaactcgccgacacaggacacgcaaaacgctacgatctcgtacgctattaacaggccattggatcgtcatatactctatatcacttctcctttgttccctgctcggtcggcgattcctattcaaactgaaagtgtgagtccgtccctatattccgctcatcgtcgtcgattatctcggcttgcttcaaaagaaattcgaaacgattctgatgaagcctagcctcgaacgatattatgtagttatccgaggataaaatcaagggtctccaattttcaggtaaactacaacaaatgtcatttgtacatctgaacgatactcaaactgatagactaggccgatttgattcttgaacagtatcgatatcttgccgattaaatctagccagcatatctgatcaacttggttcaactcccctccctccaaaaactatcaaattcgagacattcccctctcatgcctcttcttcatatttgccctcctttgataaagctcaaagcccatcaaacttggacctagattgcgatgaagtcataccattaagtccgaatctcgaacgaatggaatccggtggattttctgatgatattcccaacccatcacggtctatacaccgatcgtcctcatctctctcctcgaatccgacagtacgaagatcgtcggagaaacgacagtcctggatcggttggtctcgaggaatgatcccctccgtcccttcttttcctatcctacgttctctatcctcactaccgaccttatcgatgagcacaggtacacgtcaaacggggaatgatcaaccggaaggaatctggggagaatgtttaggatcaagtgggaaatcattcatcatcctgtgccctcctgatctacttcctccacctccggtctctgtttcgacgtcgtcctcaacaccgccaccacgacccagaacaagaccaatcctcctcttcaaagatacgacgcctctctactcggctactacccaaggcgaaatcgtcatcgatgaatcagtcgttaggtgtctgggtgtcgagagagggttttggatagctttggctttaggtgtcttggaatctgaggaggagagggtcggatggctggttgagagttaagattcaagaagtttcttcgcttcgagcatgtatttctcttctttctgacctgagttattgagcatggccagaagagcaagatgaacgcaaaattggaattcatatagatattgcgaggaaaaaagatggaccccgcagatgtacaaacaaatcagaccggcaaatggtagagccaaaacagagttgggaagaagagaggccaagactaatggaaggtataggtgaagaagactacttaataagggcggaaatgactttgacccttagtgttgaaccttgccggccccatcccctgctgttgttgttgttgacccgtttggatctgacctcccacgctgggagatcttccacctgttgtcctacctgctgtcgaaccggcgtttgaaccggcggaacccactcccccagctgctcctccagcttgaggcatcatgaaaggcatcccactcattcccatcccgggtcgaaggcccattcccattc

SEQ ID NO: 2570 - DNA, 33930 bp, Xanthophyllomyces dendrorhous
cccatgcccattccattcatacccatacccatcatcccaggcatgcccatcatccctctggctgctcctcctgcagctccgggaatgtttccgccaggactagctccgccgccgttggcaccatttccggacgcgccgccagtaggagagcctgaaaggccgagcataggattgtacattcctgggctggacatcatgcttgggaatccagggttctgcattccggagctatcgagagcagattaacggtaaagaacagggtcaactttcatcggtgtttttgaacggagataaggcgtgaaaggttacggacttcatcatctgaggtcggttcatcatccccatttgaccaggattacccatgcctccactagcaagatccaagaatcccaaacaagtgttccattgtcagttgtgtcatttcgatataagaaaagatattgaaaacaagaactcacgccatcattcgctgatacatctggaccataacattcgggtccattccacctggtccaccagctcccatccccatcattccaggcatcattccacccataccgcccatcatgaactgctgttgttgatgaagccctggctgttggtgttgctgggcttgaagttgctgttgaagttgtatagggttctgaggaagagacgagggtccaccgactcctccgtaagcaacgttgcctccatagggatcagttttggtagattttcgatcggttgttacagcagtgttagcatctcgaccgtttcgaggttgagccctcttaacttcaacctatggaagaaaaagcaccagaacgaagaccagaaggttagtcattgattcggaaactagaaaatccgtaatgacgcaagatatattgaactgacccccttgccatcgatctcaaccattccgaccgccaaacacttttcgcagctttcttcgtcagcaaatgtaatgaacccgaaccctttactcctactcgaatctcgatctaccataacctgagcgtcgagaacggtaccgtactgggcgaagaagtctcgaagaatatccactgtcgttgacgggaggaggccaccaacaaagattttggcagatttacgatgctcggtgtgagggatggctcgtttggggtcgatctgatagtcaaccgatttggaagggaaaaaaaagtgtagttgtctcaaagaaagagttcaagtctaatctcttgaatattcaataaagaagacgtgactgtacctgctttccatcgagttgatgctcctgagcaagcaccttatcaaccgaggaagattgttcaaatgtcaagaacgcgaaaccccgagaccggccggtcggatctctcataattgtgcagtgctcgaccgctccaaactgagaaaagtatgttcgcaaattgtctgacgagtgagaaggtatcggcaaaatttagggaagaagtcgaagattagattgaaagacgtttaaaatccgatggcccactgcacaagagtgcaagaatgaagagagaatgagagatgtaccatcggtagtttcccagttgaggcctcctacaaacatttttctacataaagcaaacaggtcggaaggtagaaaaggggtttgggtgtatataccatccgggcgtacgcagacagttgaggatagaaaataagggggtagaacgacattcacatcgcagtttgttttgtttgacgagttgttttgttgaaagtaacaggcaagagtcaagagcgtggacgcgtaaacgagagtgagcgagggagagaaaaaggagagatataggagattagtcgatgaacagaacatgcagtagagcgacgaattagagaaagaaaaacgggttgtgttgatgttgatgtggaaggtgagtgaaaggcagatgcaaagaaaagacaacggaaactgtgaaataacgagtgatgagaaacctagagacgacgttgttggtttctcatcatgtcaagctccactcaacccggtacgaaatagcaacgatgactatgaggacaacgacaagacaaaacgaggtaggaactcatacaggttcactgtaatcgagagtgggatgcgaagcatattactctcgcttcgggaacaaaaacagatgacaaggggagaacgaatggaacagatcttgtttgaaacagggataaaagatggaatccctacgatggaaacgtgtcgtccatcgacgaatccaacaggccgatcgttcctccttgcaagaacaaggatcagttggtccaatgagagaaagcgagaagccagaaacgcttacccttcatcaggcatatctctcggtcgaatagcgtctccgttggcgtgctgttgctgaggagcacctaagccggcacccaatccacctgacgaatatgctgagcttgacgaggtcgactcagctgccccagtgatctccgcgatctttttagcgagggcatcctcggtgtccaccccagaggcagactgcatgttggtaacgccagaggtagaggcagcgacggaagaaggagtagctttctcgttggcagaagggacagagctcgtctttgaggcatctacgttggttgaggagggaatcatggcgtccacagttgccggctctccgtcttcatcctcattgtcgtcgtctatcgaatttgacgatgaaaagctgtcagtatgtgtaacaaagatcatgaaaaaaaaaagtggaaacactcatcaaacacatacaaaggacatcctcatcatcatcaggtccgtaaaggtcaaggttatctaggatggagcaagaagataaagaaacgacaagagagaaagaaaggaagaaaaaatccaagtaaatcatatcgaacaacattcaagacagaggatcatctgttgactctatgaaatctgcctccaagcaaacacataccttgctcttcgtcgctagccattttgtatgttctatcacggatgttgctgtctagagaccgacgagaaagaagtatttaagcaagagaggagatgagagttgtaggctaacaaagaggaacagagcgtgctggaaggtgtcgggatttgtaaccagagggcgtgatcgttgtaaccatggtaatgaccagccggccaaatttcgaccaacgctctcaaccgagctttaccagtctctctcacactctgaccttcatcctcttttctctttctagcgcacctcaatcatctttctagtagcacgaaagtggtggaaagaaaggaaataagaacatagtcgtagaaatttctcttgaatacagaaaagaaaacccattccgtcatggcttctacgtcaaatttggatgatcctaggcgtcacgtccgtctcgagttagagcgagtgtctggggtacgttgtttctgtgttcttgatgtaattgtcaaatgagcgaaagcatgcttatctccttttcttcttgctcgttgcatcgggctcctgtgctggcccgttctcttcatcttcaaccaaacgctggtgattgatcgtcgaatcaaactagatcgctggctccgactttcctcacaactaccctggagaggatcactcctggaacttacgaaagtttgccgaggtaagttctctttttgctttctcaatcttgcgtcaattcggaagagtcgatgagttctttggatgcgcttcctcagtatggtataattgacctgatctgctgcttacaatccaccctctcttgaaataaaaaaccatgttaatctttccctcctcactttatcaatccctttgtagaacctgcaagtaaagatcgcccatatctccgagacgacgtgcgagttcgacctggttggaatcgactcttctatcgcgaacgctattcgacgagtcctcatctctgaagtccctacagtggccatcgaagacgtgtttgtgtacaacaacacttccatcatccaggatgaggtcctcagtcatcgacttggtctcattcctttacaggttgacccgagaaaaatcaaaatgaaaggaggtacggcagtactcttgatttcctttgatcaaaattaccatagaaacacacacactgatgtacttataacttggcatggtgtagccgactcgccaaacgatcagaacacgattgtcatgggactgcaagtcgcatgtgagcgcaaccgggaagctaagaagggagagaccgacccttcgctactatatatcaacgattgtggtacgtgattttcagaattatcaaagcaacggattgttgctgaatataagttcgttttgttacgccatcagtctacgcctcagaccttgtatggaaacctgcgggtcgacaggaaaccacgttcggaaccaacacgccgaggtctgtagttgatgatgtcttgattgctaagctgcgacctggacaggttcgtcaaacttcttcaaatcctctgttatgctgccataaacgtgatcagcaggcttacctttgtattttcactctgatactatcagtctatcgagcttgacgtccatgccgtcaagggcattggtaaagaccacgccaagttctcccctgtcggttcgtcggctttctcttctcgattccatatctacttatcttcctttttctcgttctctaacctggtctggcgtaattcccgaaaccaacaaaatttaatacagcgactgcctcgtaccgacttctccctcacatcatcatcaaagaacccattccttcctccgacgccgatgagtttgctgcttgtttcaccccaggcgtcgtgtctgtcgagacggattcaaagacgaagcagaagaccgtcaaagtagtggaaccaaggaaagataccgtttcgagggaggtcttgagacatgacaagtttaaggataaggtcgagttgaccaggatcagggatcacttcatttgtacgtcttgtatacactttcccagtgctttactcatgcctcgcgcgcatacgacgagctctatggaatattgactaatctttactttgtttcttgatttggatcgaatcctacgtcaacagtcagcattgagtctgtcggagcttaccaacctgaagatttacttccggaagcgatcaacgtcctccttggaaagatcgatagcgtcgagtcatctctcaaggctctcgatagtcagacctcggaaggtcgatcgtgatcgcccttgcttccatcatttccttctgctcttccaagagaacggtgttttctctcgccgtcatttctttattgcgtacgtggttagagcgagaaatggtttaaaaaactgaaattatacaaaagactggatcaatgttatcaactcttctcaaaacatgtcatttttgtgcgtgtataaagacaagtgaatgagtcaatgggaaaagataaaggatgggaacgtatgaagaatgcgagagtgatgcatatcttcattctgagccggcggcaaatacagtatgaaagaaagtatagggttaattttgaaacgggatgtgaaagacgatacaaagaagacgaatagaaacgagaacgacgggtgcaaatgcgtcgaacattggaaagaaagccctattgaacagacgacactgaaaggagcgcaaaaaaaaccgatgaaacgagataagaatgtcaaaccgaggttacaaacaccctgtcagatgggctagttcggatcgaaaaacgggtttctctcatcctctgcttctaagcttctggcacttttccttcctgtcgattcacctcccggagaccacaccccgcttcctccactgaccgttcctctcctttgcgatggcggcggtggcggcggcacaggcttcttgccgcccaatcgacccaagccaagagaaacgccggatgtcggctgtcggaaagggcttgtgcttgtgtttgtcaatccgactttatcatcgtacgcctcctcctcatcattgaaatccgatctatcggtagatcttgatcgtctatttcgatcaatgctacgaccgtttcgatctcttctaatgttgaactcagattcagattcaggatcagagtccgagtaacccccgcgttgcttggtgctgctgtgagagccataagtggtgtgcttaggtcggcttggctgatgggaatgatcgtcttcatccgagtattggaaggatgaccgttcgtccctggtagatcgatcgtcaagcccgtttcgaagaggaggagagaatctggaggaagcagactgttggatgggctgagtgaacgatcggccagcggacgtagggcgctgggtggaaagaagaggaggtactggaggagcggtctttcgaatcaagggaagcggctgggtgtaggccgaggggaagagtccagacttgccggacgagagggttcctttccaccagtcctcggagacttcctcgataacagtgatgactgtttatcggaagtagaaaatgcacatggcgagaagtattaaggagaaaggcctcatgaaaaggtaaatgagagagcaagaaagttaactgaccatctccaactctgagagtcagctcatccctttctacacctttataatcgaatgtggccctcactatctttccccatccggcgcccgcctcggcaaccgacgaggttgtcaaccgtcttccacctaaagatggtctgtctggcatggtgattgcttctttatggcttacatcttttctcctttcagctatatccccgtcctcctcttcgccgttcagcgggccccaactttttcgtcctcctggaatataaccagccacagaaacgccgttaaatccgtttgagcctcctccaatcgacttcttgcgaagtgatccaaagagggactttttctcattgtctgtctgagactttgtactgttcgatcgagatcgattgatgttcttctcagaagcagacgcaaacactggctcggcaaacatcgcagctctagcagctgcattcgacaccttcttgggcgcggcagacgaatgatagggtgtggacgcagcgtaagatctgtgattcgtccaagatatacagaacaatgtttagcgagtgatgagctgggtagcatggtggctattggaatcaagttgaactcacgatgaccccaagctgtcttgaagctcaactagaacatctctctgctgatccaagaatgagacttgagcctgaagaaacccgttaagatcactgtggaagacaacgcatcagctgatgaacggacaaagatggacaaagacgccgaagacatggtaacggactctaaataggcaccctcgttttggctgatttcttccatgcgcatctcaacgtcttcttgtgtctcatcgaacctcgctctagctactcggacctcctcgtccagagccggactcgattttttagaggttaattgtcgtttttgagcggcgtccatcgccaatctaggagaaactcaaaaggtattttatttcagcagaaagatcggatcttcttgaagatgatgcagaaagagaaaaccgaccttcgagactcaagcttctttcgtgccgcagagtaatccttcatttcttcagtactcctctctaagaacgtttatgaccagtcagaagtgatcagtgatccatttgttctcggctcgagagaactagaaacggaggatgacacgaacccaatccggacaagaatcctgcgatgagttcctctgcgtatctttcttgaacagcggcaatcttgcattgcgctcttcctatctcaagtaggcgctgtccatatgagcttcggaggccaagctcggttccgaagtgaaccatagtgagaccgacgtgctcgattagaagcactttggaaccatcggtttggagctcaggcgcttcgatcttttctcgttttgtgattgatttcaagtacgcggcggacgtctgagacaaacttttgattgtgaaaaggggattgatatattgtaaatcacactgggggagatcatcatgatagataggacagaaccaaccgttcgactgctttccgtttaagctcaacctccgtctcgaggtcttgaaacgcgcgactgaagaaaaaaatggtatttcgtacgtatatgtatgtatgtatgtcagtgccattcgctcgagttatcagactgtgtgactgcttcaaagtagccttcgctgacctatgttgagttttttcctccttgaacagtttctctcctgtccattgagagaacttgtctatctgtgagttttacatcgtcaggacaccacaaacaaatcatagaggtgagcaacgagtagagatcagttatctgaacgagtttcaacttggcacacgcatagaattgaaatgaaacgcaaatgatttatgaaaactaacctgtttgcctgcttttttgaaactcatcttgttctaccttagtccaagcagacgtatgaactgtcagcactcaaactcccgattccaagctcaaagagcactcacacaatcagacacgcactctctagtaatgactgggttgaaggaaacacgagatggcaagcaataaagcaagcgagcgtacaaacgagccatttactgcgtaaagtccgataccacgtggcccgaccttaagatgatattcaaattaaatcatttttaattaagtatgcgtcatgccatcacctggttttagcagagcgcgtccgtctccttttgcatcttgatcaagcacccccatcatgtcgtccgaaaagaatcctcctaagtcaacaacacctcctagtccacatgatccgtacatgttggttcctatactgtctgtcatcgtgctatgcttagttttcattggcttccgccgagctagggcgatgaagtccgctgtaggctaccggttagttttacgcgtccttctctcgtttggaccgtttattgggagattgatcgtggtggtagtgcctcttcaacgtttgtttcttgtgtatcaataatagtctcaccaatcgcacgattcatggtcctggtcgaatccggttggacgatgaagagcgagatatacaggcgtcaagtaatctctcggacgaagaggacgagctttatgacaaccaggtaggtatcaaattctcatcgtcattcttgccttctttctacccgtgctgaccgcggtccactctcgtacgaatcctaagtctcccataccatccctcccatcctcccctgtccttccgcctcgacattcaagtccccaactctttagacttggaaacgaagcaggcgatctgggttcgctagaagtagcagcatcaccggatgatgtggatggagaacttgacgcggatgctgtggaacttccgtccaaagtgaaccttccgatgagcagaacggcaagctcccggtcgaatggctctagtcatcgaaaatgaaaaaacggatggagaaaacccttcgcaaatcaaagccgatttcaacacgcttcatcatatacctcaaagagatttaaagtcggacacgtgccgcggttcgttcctcgatcttgttccagtgcgtttgatgttcacccagtccatccgtccttcgtcaaagagatcgatacgtcttgtctcttgttgtgatatttcgttttctctcaatagaactgcgaaatagatatagtacacagagctacaatgcatcatgtaactagggaggcttaaaatactatgtaacgacgttgatccaaatgatcctatcacgctctaaacttcaagagagaaagaatagttacacaatatattatcccgaccagtgcgttgccggtgacgctctgttctgttgtgaaaggaaaaatgccccaggcgttggtgattctaacactggcacatcctccaactttcctcttcataagaaaaaaacattgaggtcacctttatcagttgatcaaatcttttctctgaaactagaaaaaagcatacaagggattgagaaagcagatgaaaatgctcacccattgaacgtcatcatctcgtctggcccatacaacccccactgctggttcctctgtatatccaaaccttgccccacaccctgcacgcctccaactccaccgcccgaaccgctcggaccaatcccaccgttccccgttccgaacaacgtctgggttgtgtccgttcttgttctttctattggatcgccacctctctgaatagttgattcccaagtatcgccctgatcgtcacgatgagagattaagctcgaatcgtaccgatcctgcgcaagattatgttgaccggatgacattggctggaagggatcttcggcgggaggtcggacgtagtcgtactgcctaccactgagagatccttgggattgatgagatgagcgaacatgttcgtacgatcgagttgtggatgccgaaccaactgcggatctcgtagatgatgaagacgacgtcagaggaaaaatgccgggattggatgtggaagaagaggccgatatgtgatatgatggttgacgaaggggacgatcgatcttgaaagagtcatccgagtcatccgaatagtccagctggtctcttgtttgagagctagaaacctgagagatatgttctactggagcgtattgtcgaggcggaagctgagcataagatatgtgttgttgttgctgttggtgttgctgctgtagagaatggtaagacgcagaggatagcgaagcctggtaggaccctcctggaattgaggtcttttcatcgttatcatcatcatcgtcgtcgtcatctgaatctgaatccgagtcagaggatccaaaagaggcattcgcctgatcgactatctgatgttcaaatgattctccccctgaagccgcgcctttcgagttgtaaatgtgcgtccctgcagtaggcgagtcgaacgatacaagtcccagatttctgtgtggttgtccgtggctttgattcgatatttggttgttggagacttggaaatctctcggtcggtcctgctgagaatcctggaaggttgattttgcgctactgccaaaatcaatctgtccacctgtcctacttatgctcgagtcgatacctgttgatcggcttcgatcttggtcgccgtcactaaagatgggtggcctacccaaattagagggtcgattcgaacttgcttccctccatgacggtctaggaggagtaggcatcccctgaaacgagtttgccgtcatgttccttcctccgtttctctctgaatgtaagagcccgcgaacgacacttcccacggcctgtttcacaggcgacggcaccaacatgcctgttgcccctccgactcctccccaactattaccccggagagtgttcgacatcgtaaagttcatggtcaccggcggactcatacctggcggtagttcatccaatgagtcatccgagtcggaatctaacggcgtcgactgacggtggtaacttggctttttggcggccgagagaggagtcgaccgaaggtccgttagcccgttccatttattggtagcagatggtctacgcggtgtacctgacggaacaaagtcaggttcagatctattcttcgaattggttcctgaggatcgcatagatgctgggatcttcgggacaggttgagtctcggaagcaacagaagagtatcgcgggttgggatgctccttattctgatggaacggatttgagggatgaggggggccatggatggaaagttcagcgaacgaaggtgtaaatgtcgaatcttggccaagtcgagacacattcccaggttcgcggttatctcctctataagcggtagtaaacgacgcatcaggagaatcttgatccgaatcgtacgcatcatcatgtcgagtataggaaggtgcaagagcagcagcagcagaagctgccagtgccgcatttgctcctgcctcttgactcaaatagtttcttcctcccccaactctttgtattcctcttcctggttcagagcttccgcgtcggtcaacgccattctcgacctgaaggctatcgtcatggtcggcctgaatgtctgcttcagcttttcgagttagaacctcatgagggggtggcataattaagtccgacatcatcgagggtgagaggaacgagcctgattcctccggttcctcgctttcagctcgaaggccgaaccctcctcggctcggatgaggatgatgtgacgatgtggatgtaggaccgatattgggagttgatgatccaactgcggcccccaatccagcgagaaaagacgagtctgatgtcatatgagaagatggtgcgctgggcgtcgagacccctactgaagaataagatgatgcatccggatggcgcagagaagagtgatttgctgatgggctggatgtgtgatcggtcgaagctgatggatgagcgtaaggctgatgggcggtaacatcggcagggtcgggttctgtaccatcaggtactcgagcttgagcggccatctcgaagaagtttctccagaactgaagaatcgcaggatagtagatgatcgagttgatgaatgttgggtgcgaggaagtaatgaacaagtaatcagctagtgtatcaaaagattgattccccaagctgccacgatagctcttcgcctaaatcatcaagtgtatcgttgctaccagcaagcgcctcggttcctctaacaattcaacaacagggaaagcgcataactcacctttgcatactctctcgtaggttcgctcacttcattgaactttttgacagcaggaatgaccctagtagtgatgatttgatgaaagtctgaaaagttcttatctatgtcttgaaggaggaagatgttgagctgctcatgttgctcgatctggctcatttgaaaagtattttgtatttgtcagtttcttttgtcggaacgacggtcatgtcgaatggaaaggtgaatacagagatatgtaagagaaagatatataacagacctggacgctgattggggccgtctggtcgatttccggaatagatagacggtcggataccatgtttaggatgaccttgggtgtaaactgctatgtattcctcgttgccaatgatgatgacgatggaaaaaatgtaagttgtcggtcaagcagtcgagggatctgtgagcgaaatgagtttgatgacagttaaagaaaaaacacgagaggtcactctctttgacgcgtcgagaaaatgcagacgcgtaatgaatatatcacgtgattctgatttccgttctgtccagatgttatggccggggtgtctcaatacttctcgaagaggtaaattgagtatgtacattgcatgaaatcatacatccactaaggtacgtgtagagaagagagtagactaaattatgaatgagaggatatacgcttccattgaagttttaaacagcgtcctgtggatgatgattatcgaaaacccaaagacagcaagttagtatgatgcagtaaaaatgatagtatccttcaaaaagaggatacgagagaaaaggaaaaagtgaaaagctgaaagctctctacgaacctcgaattgaagacgaggaacaatgttcatagccagcagctgttccgttaaattataagaagaaaaatgtcagaaagcttatcctgtgcaagaattatcggcaagaaggaatgaaagtatagtgtacctcttggaataggagcttggcagcatatggcagcgttaccttgacgacgtgtttggatgatttgcagtaagagcaccatctgtcgtcgataccattccgacaaggaaattgcatgtcagaatgttgccattgcatttgaaagtagctgagataatgaagtaagacgaacccgttgtaacccattagaccgcatttctcacacgcatccgtgtcgaacgagtctgaagagatcatcagtcgctcaagcatcaattgagttgcaccataaccaaccaagctataatacagccaaatgacaataaaagtcggtaagtgctcgcccaaggaagatatcgatgagataggaagagatagatcttaccaatctcgctccatctctcctaatcgaagacctccttctcggctacgtccttctgtcggctgccgagtcagcgttgcacgaggaccccggggtcgagcgtgcatcttgtccatgaccatatgcttgagcttttggtagtagattggtccaaagaagacatatgcctctaagggctgtccggtgatgccactagtgagcatatcctttccagcatagctgaatccgctctcgatcaagatttgttgcatgtcctcgaccttggaaccaccaaaagcagttccatactggagcttgccggaaagtacaccagctttacccgccagtaattcgatcatctttcctaccgtcattcgactggggaaaccgtgagggttcatgatgatatcggctatgatcccaattacagaagtttggatcaggcatatgctgtggaaagtagctcactaaagatagaatagagaactcacggcaaatgccctggtcattgaaaggcatatcttcttgcgggacaatcaatccacacactcctttctgcccgtgcctagacgaaaacttatctcccaattccggccgtcgagtttgtcgaataaggaccttgatcaaaagctgatcgttctcgctatcagtcaacatgactttgtcgatgtatcccgctatcggactcttgtatgataaaggtgcgtttttgaacgtatcggtcgccacggccgtaccggctgtgtacgagttgtcattcgcgttcgtcggtgtttgtttgttgatgtagacatctccaggatcgactcgttctcctgctccagcaattccgtcggattgcaagatgtcgtactttttgagaggaacgttggttcccggtgctaaaggagtgtcggcgatacggtcgaagctgttcaatgaacaatgataatcaacaagaaatgaaagtgtcgttcagcgaattatgcgagacgataatgtccattgatggacaagactactaacgttccattggggtattttcgaatcatggtcacattttttctcaaaacctgacaacgcccataacctcgatccacagaagcctgaataagatagacatatcagcatcggttggttgatctatactattcactggcatttgcacctcccagaatatgccaaactaaccttgttcaaaatcagcgcatcctcgatatcgtatcccgagaaactcatgaccgcgactgttgcattttgtccggctggtaacttgtcgtaaccaatcaactcgatcgtcttggtcttcaccatgggttgttgtgggtagaccattaggtagagcagggtatcgatcctttcgagctggttgtaggctatggctccaatcgcttgttttcccattgcacattgataggtatttcggggagactggttatgatgaggataaggaatgaggccagctacggcccctaaaatagtgaacggctcaatctcgagatgggtggtaccaggaacgatcatgtgctcatacagagctattaacgagtcgttttcttcattacagtcgaggtactcgatgagtccgtctaccaggaagtcgtcgaatgattttttgccggctttgaggagctacatttccaacacgggacagatcagattgtttcatagtattacggtctgagtgaacccaaagcagaaatgtgaaaacttacagcgatgtgagattcttttactcgaggcacgccgtcatcgacaatgatcatcggtcgacagattcgacctccgtcactagcaatgtagacagttcgatgatgatgattgatatagattccaacaaactcggacatctttcctgctcgacgaagttttcggaaattggtcacaaaatgaactggggttgaggtcaggccgacggtgtttccgttgacattgaccatatatgttccttttcggtaaagctcgtttccagtcaccaaggagcaatctttcaaagaaaaagatgagacagaagatcagatgttctgatcataagaatgttgagcagtatatgagtatgcgcaccttctacgccaagcaagtaagcaatctgagtgacagcggcgtctggtacatcagtcgtaatatgcgtcatcagagccaggtttttcaccaacccacaggcctctccttcaggtgtatcactaggacaaagcattccccattgggatggttgtaatgctctcggtccagacacctttctcgtcttttcaaactgagaactgatcctagtcatcattccaagtgcagagatgaatgacagtcgactgagtacatgggttactccggcacgctccatcttgaatcgtttgatagaccagtttccggtggagatagctcggacaaaaccagaggtgatgaaatcagagtgcattcggaaggctttgagcgcgtcaaactcggtagctctattaggcttctttagcaccttgtcgatgttaagcttgagatcagagttaaactttttgaatagatcctcgaacaggagagaaaggagttgaccagccctgtatagacgcgtgaagtattgcagcaacgaatgagatagactgtctagtcattccatgattaaaggccatgttgaggaacgctactcacaattctaatctcttgttaccaacgtaatctctatcgtccacattcttgtcgtttttcattgccatgataactcttctagccatcgtagccacatagattgccttcggtctgaagttgccttgctcgacaggaacgtgggcaacgatgatggtcgagaaggcatcgatggcttcttctgcaatagtccggcgggaagtcatgatctttcggttaattttgacacgagatccaatgtagtcgagcgcttgacggatagtgaacactttagacctttgtgtggtgaatccggagtattttgtataacaaagaacattaagcctttcgtcagctttatgtcgatatgatagtgttcagagaaacgtacatagcagcatcctctaagttgaccgcaaaatcgttgtgaaaactttcatcatttccacagatcaattggaggatttccttgtctgactggcatcccagcgccttcatagcgatcgcaattggaatctagaagagagcgcgcgtaagtcatgttaagttgactttcgcctcaaccttaagttgacgcttgaaaaagatcgaaaaaagattcttacatcttcatggagggagttgtgtcgtagatataatttgccgttcttggtgactacatacgtcttcgattttcgttcgtgcgtcgacctaaacagaattggacaggtatatcagacagatgcgaaaagacaagcttgagaatagattgcataaggaacttacgactgcacggaggccatgaccaaacctttccgaggatctgtctcaacgatgattctgttcttagacagctgctcttgaaccaagatgacctatatccagaataaatccacgtcgaaacttagctatacgttcactctgtgttctcggcttcctcgtttctatttgtattacgctcaccttctctgtacccttgacaacaaagtaacctcctggatctaacgggcattctgtcattgccgccaactgagcttcatctttccccttcaaaacacatttgttactcctcagcatgattggcaaacgaccgattggctcgcctcgacgacggatgatttgctttccacgcatgtattccaggtcaacataaatttgagcggagtatgttgtgtcacgaagtcgacactcatggggcgtgattgttcggtcgattgcttcagcgtccgttcgttcgggtgcgccaactctgatatcggtatatctgagccagaaccgggggtcgatatccgaggtgaccttattattagctttgaggatttccttaatctccacctcaacgaactgatagatccaagaagcccaaaggttatgttagtggagtttgatatcaactttggtgaaagaaatttggcacagagctacgaactaagccagagaaggagagaaaaggagagtcagtcagcattaactatagacgaatggacgggctgaatttagaaagtggttcgcgccgcaccatgatcgaacgattccagatgctgcttgacaagacctttgaccttcagaaaggccgggagaaggagccatttatcctttttgaggttgaatcgtgatatcataaacaaagttagaatggttggctcaatagccagagtatacgatctgatatccgaggaaagcgtaaaggatggaacaaacctcaaccgacttgatctcatctgacaagcctttgcccttccacatcttcttctccgtagatgcccaagccatttcatcttcatctacaccgtatccattcgcttttgagtaatcgatatccttttctggcgagggcaatgaagggtcagtatttgcggcggtggcccctgctattgacgctgatcctgcctctgccttggagcgttttcgagcctgcatggctttttggtatacactgaaaagatcgaaaggtgtccgagtacaagaaggatgtgttcgtacgttcccagaggatgggaggacgggagaatggcctaactcgtcgatgaatgatgatggtgcaagcaagtcaaaagaaccaaaagaataatttagctagggcgagaaagcagagtagtaaccggatacttagttgacttacctgttaatttttgaattgtatgtattctgataactctataaccctaacttcattagtcacttgtcgtcaatgatatcatacatacctaaatcgtgttgatcaatactattgaggatacctaccctcatattgcacattatgacctggctgttctctctccgttctcctcaatctccacctccatctccaccgttagactctacgttctcctctgagaatttgctatctgttccctcccaaatttctcatgttgtcggtcggctttcacctcttcaacaggcctcgctttcagcctgcctcgcgtgcggcgcgacaattggcgcattctacagctaccggttcggatggaaacgcatcaaaacagctgacttcgttactccagagatgctgaatggcaagaaatggatcagaggaagagttactaggtttatagaatctcgttctctcttccccttcaccgcgttaaagaaaggctgaccgtgatattgtctttcagtgtaggggacgcggataactttcgaatatatcatacccctggccctttctggtcgtaccctttcaaattgagacagattcccaaagactctaaaggtatcacttcttccctttcgcattatccgagctttagtaaagatatacatatatgtaattaagcgcgtgcctacgcctacacatacccgcacgagcgttcagttgatccttgtctatgttttgtccaacatgtctggagccctcagaggagagaccattcatatcagaataggtttgttctatgcttatgcttcatcggttgactgcagctgaatgatttcgttttgtcttcgttctatatagctggcgtggacgctccagaagtacgcgacttttagccttcttccgacgatcgcgctttcatgaatcaacggctcactgacacctaactcaggcagctcactttggtcgaccagcccaacctctctcagcagaggcgctcgcatttctgaaatctgaaatcgaaggtcaagatgtcgactgcttgctcttcagtagagatcaatatggccgcattgtatgtttcattttgttttgttttcgatactctctcccgcaatctgatgattagaattttttttggttcctactttatctctcaaaaaatgtcatgaaggtcgccctacctctcatccctcgctcaaattttccatttctcccctggaaagttcttccgttaaggatgcttcgagcaggctggggtgcagtatatacagctggtggagcgcagtatgggtatattggtttggaatcttttcaggccgcagaagcctatgctaagttcgttttcccttcgtttcttaccatctggtcgtattcagggatcttatatcatgttctttctctatgacccttacaacaggagacgtaaattagggatttggtctctgggtaacaaacttgaaaaaccagacgcctacaaacgtcggattgctcttctcgaggccgcttctaattcaacatctacgacttcattgtcttctccagaatctcgaggaggtatgtttgagctcaaggtgttcagcaagggaggttggaggcggacgttatggagagggttgagaaaaacttttggatcattataaatgtcctatatatttgcgaacacaatacatacacatccgccgaatgaggttgcactgaccttttgaaagacattttgcagagatccatgcaaaaaggagagagtggtcatgctatagcgagtttcaacatgaagcggtggtgaattatgggagaaacaacagacaaggataaatgaccgtagagggatgaccagagatgtatggaagaacggaataggtatatatgttaaaggccttagcctgaatgaacgtaatgtaacaaaaatagtcataagaggaagtgagggaaagaagtaaatttataaaaatgcctcagggtgggggctttgtggattctaggttggtcgtgaagatatacataaactggtagacagtagagtaataatttgtacatagacttgtgaattgaaagaacaaacagtaaaaacgtgtttgctgaataagaaaaacatgaacatgagagaaagatgatgtatgatggtgaagtaaaagagaacagtgtacgcatatcatcttgaagtgttgtatcaacgtcggcaatgtgagtggagggtctgacctcccttgtcagtttctgcgaattagaaatgcaaacaagtttgtgttagatgacgatgtgagaggaacaactcacctggagaacagaatgaagctggctagacaccaaatgtccttactatgtgttgcttgaagccagataagtttctatcttctgagccgaatatctactcctctgtgctagatccacctagccacccttctccgctctccaaagcgcgtgctgtcattgaactttaccccataatcacgagtggagaagaacgagtcaagaacaacagatcgaggaagcctctcattagatcagcttcacgaggagacagttttatggatagtagaccgattattcacagtgtcgcatgtaacctcggtcctaatagtccagctaccaacctagcttgttccaattccttgtgactcggaacgtccgacttcatgtcttcatcaatgacttcaatctctccttgcttgcctactggatattcactcgaatgaccagagtttgtacgatgatccgttgttggtttgatggcgtttcggccgactggattgttaggctgaatggatgctagtcgtctacgttcttcgacgaatccagactcagcctcgtccttcattttattgtcgagcacaagaggtcttttccagaaataacaaatagcgaggtgttatcggataaatcaacatacaagattcgccattcttgggattggtcaggccgaactcacattgaaatgacaaccctagtcagttgaagtcctaatcgaagtctacctctgagatccaaccagcgcagacttcttagactagactgaatctcatacagcctgatcagctcaaaccggacgacccgagtataaccactctgacgaatcataatttctcggatgcgacgaaacactccttccaggtggtctaccgcatctgggctgatggtcaaaccgggagccgtctcattgataaatgcttttgtacaacggaacacaaggagacgtaagtatcggtgacatccaaagcgtttcctttgagaaaactatagatcatagaaaaaagacaagaggacggaccgaagaagctcctgagggttcgaaagtccccgtcgagaaactctgaaaatacggcaaacagtacgttatgaagcgtctcgtctggctgaatttctccgagtccaccgttgggggtccagaaattggagtcgtacattgtcgaaggatgggacgaaggcaccgacgcggacgtcaagtcatatcgtttccgaggctcgggggaggacaacacggtatgagcgaaagatagtttttggaaagcagcggtggcctcagggttgaacgtaggaaatttactgcgagatcaacatccgaccaccccaaattgagcagtcaagaagaatgatgttgagctccctaccgaatcatgtccgtggcatcatgaatgttgaagcgagcaaacaaacttactctggatggacatgtctacagcgagccagatatgctcgcctgatctcctgttgatcagcccgcttgtggcaaccgaggacttcatagagggtcgaagaagtgttgatctgatcgatcaaattcttcttaaccgatgactctatacagaatcgaatatttcggaaaacaaggtttggacgtcgatgagcttgccatcaaaggaatgagccatgaacctcccgcctctccttccaactatcttcccttttgctctgtctcttgactttgcttgttatcccccagcccagaagataagaaacagggcactaacccttttgaacacgtccagacatcgttcgcctctttcaggccaccagactggcagaaaggtaccgaatacaggctcgtaaatatgaggttgacctctggacgtatatgctctgaacgtcctctcttctcagaaaactatctacacgagagggagaagacaagacctgggtgagaattatagagcgcactgtatctcgttgagcaacagaaacagtcgagtgttgagtcgtctaaagcgagaaagaggtaagcatggatgggcttgtgttccccagccaaatgaatgatgcgcgggtaatcgatcacatgcttttgttgttcgctgactaagcgagcataatcggaatcctagtaactaactacagctgataagaagattgttttgatatttaagctcttgcttaactccaacattcttcacacaaccttccttcttcctccatttgttccatgtaccgtttgccttcatcctccgtcatctttccaatctccatcaagcagaatagtagggcagccctaacagctcgaggcatagcgtttgacgatctgtttgtgtagatgaaaacccagatgattgtcaaaggccattcatccagatgagaagatcgatgaaagactcacccggagatataaacatgcgcgttctcttcagtcagtttggtataaagtatgtgagcatcttgttttattaggtgttggacatatattttatcctcctaaaagataacagagagcaaatatacattttcagtccctctgctcgtagtgaaaggggaaggtgaaagacgaacctgatctcgagaagcagcgaccctcagtcggagaccgcctgctttctccatacgcatccaatcagactcatacaggtaatctttggatagagatcgacatccaaaatacaacgtgttgtctatttgcgtcccaaacacataatcagctttgaaagtggtgatagagtttcaagcaaataaaggaggagacacataccgtacgctttttctaaaagacggtgctcgaggaaagccctaagaggtgcaacacctgtgcctggtccaactagaatgataggtactttgggattctgaggcacggtcatcgtgccagagacgactcttatcggacacgaggagcctacacgcgacaggtttgatgcagagttcgtcagctggaatcaagatgaagagtgtcaaagttctgtctctcgacataccaagcggaagagagcgaagccagcttgtgagtagaccggctctaggaaccttgagagacgtcttgtaattcaccatagcaatacaaagctggatctttcccggatgagtctattgatcaaagagagatacatcaaaccaagcgaactgagtatggatgattacacagatcaacactgatagagaagagaaacgattcacagttgaacttccggcgatcgagaattctcttcgtctaatccttccgagtacttcagggagataatccaaaggaattttgattcctttgaagtcagacagaacctcgagcagcatccggcgaggtttggtcgaatagtcgtaaatgtcgtcctatgatagaaagaaataagacatacgttgtctaagtctggcttgtctggaaatcactatgaccgcttatgagaatgaagaaaaaaacttacgcctccttcgttcacatctaagaactcatcaagccgttcgacttcccttggatcagtggcaaatagtctgagccataggaagaagcttcttctcggtacagccgtcaagtctaaatgatctctcaagagtgcatagagagtgaatgtgaggtccttcaaatgactcgacggactattgaccgactgtagatcagccgatccactgtttggtgtcggttcagcttggtaggtcaaaagagtcgatggtgagggaagatgtggctggagggcgaggaatcggtcaacagaacttggtggattggagggtacgagctgaacaatggatcctggagagtaactgtagttgccctcatgatcaacctttgtccctgatctagaccaaatcgaaagtgcacaagtacaaagaagcataaacttacatcaaaccaggttcggtatcgatctcaacctggcgtacgtcctgaggccaatcttcgtctgtcattcgatcgaaccgaacaagtttctctggcatccacccctcaccatcgtccggcagattcgtttgcccataagcgtctcgcccgggccagtcattggaaaggtcgatagattgtgtacgagatgataaatcggaaaggggccctagacttgcgcgcatagttggagggaaaagatgtgttggaggaagaggatcaggcggaagggatgaagggtaaaactctggggtgagtatctgcgtgatattgtccaggaagggaaagagagtggcttcaagactgcatgggaccagaacagaaacaaataaagagggaacgattaaaaaagaaacattattgattattgaggccaaaccattggacaagatgttaaatgtactcgcccgccagatgacctttcgtcaccccaccattctttgtctctgatcagctcttccgctcctagcgcaagtaaccttctcctcagaatttttccagcccagttgaacctctcatagccggaatctcctaggccgaagacagaaaatctgacttcatccagcacgtcttctggaagatcttttctcatgagcatactccatagcgaccgtatatcccgtgttggctccccgttgcctgtggtggaaacgatgaacagaacgggcccggagagtaagggcaaagagaccggatcgaattcggagaaggacagaggagttacagaaggaagatgatgaagtctgaggtggcgatacaccgagaatgcaatatcctgagaagttcccgtttcggttgcgtagaagatctgaatgggatccgattcgtccgtgtcttgatgatcgactggtaacgtgagaaccattctgagactttctatctatctatcggaggcctgtatgaaccaggcttgatatttcctgttctctctctctctatcttctctcggagaagtccttgaaagaaagcgggaatatatatgcgtatgtgagtgcgatcgtatggtgtgtaagtgtgcgtaaggagacgaaaggaacgaaaaataatcttgatcagataaagactcggctacgcagtcctaccgattcccttcgcttgagcaaagcagatagcgccgctctttcttcagagcaagcctgtatcctgatactgtttgatatctaccattccgtacaagttatagtccaaccctatcatatattttaatgaggtctagaagaattgaaacagaggatgaacaggatgaacctatctcctgctctatctgagcgtaggctgaaggcttagggtcggtctgggggacttgggtttgagcggcagatgtttatccgatcaaatcaatcctgagatcgtttcctcgtcacatcaagctctttctactttattcctttcatcttccatacctacgtgtattctccgctctcaaatccccatcaaatcttagccaagatctatgtcgtccaacccgagctcaagaaaaggaactccagcatcatccgctaatgctagtattatcctcaggagacagctcatgggtcagttgtctatgtgatgatcttcatcctgttatacatttgccctttcgaatctttcccttcaggccaatcgagttcgttcagatagatggaagaagctatagtatcgccttctatggacgtgtcatctagtaaaaccgatctgagcatcagtctttggacaggaaatcatcgacccttgccaccacatgtcgtcctcatcaatctcttgcctgatatctcttctaccttgtctcttactgacacactttctttctcttttctttgtctatttcgtttggattcttctttcctcgaacagagctccgcaaacgacctgtcgatgggttctcagcaggcttagtagatgatgataacttgcttgagtgggagattttaatcatcgggtaagtccatgtgcctgcagtggtttatttatgcccaggaggtatccaatggagaacacaagagtgggggtttcgagtgtgttcaatattctagcacaattaagcaacactgattgcagacagaacgggtcaatttgataatcgaatccatgactggactgtcctcccttggtgaaggatctgagctgaccatcaaactgtgtatcttggttttggttatgaattgtcgatgcaatctacagaccagcagatactatatagtgagcctcaaattgttgattcttaatatgctttctagtgcatttactaattctacactgttcgatgctttccgtcaaaccaattgaccttgccatcttcagtgagggaggattactcaaggcccgaatgtcatttcctcccgaatttcctcttctacctccgaccatgactttcacgaccgcaatgtggcatcccaacagtgagaccaaagaattatgtccctctttctctcatttttcctcagataaactcatcatgttcttgtgtgattacagtttatcctgatggcaaagtgtgcatctctatcttagtacgtttcggcgcgcgctccttacacttgtctggcccggattatgtatacccgctggctaacaaatagctcctaatatcattgtcacacgacctacatgcaattcagcatgcgcctggagaggaccagtggggatatgaggatgcaaacgaacgttggcttcctgtacacactgtagaatctatcgtaagccatcgcttcataatcccgcctgtctagatcgagtgctgttttgcgaagaattcttatattgagccaatctcatgatcttcacctaccttcagcttgttagtgttatcagcctgttgtcgcaggatattccaagtttagattctccagccaacgtgaacgcagccgtgcgttcttttttgttctgcacacttcattcgcgccttttctttgccgaagaaactcctcttgctttcatttagaactaactagttgggttctcttatacttgcacaaccatccggcgggtttgtggcgttcatagaaagaggtccgggaagatccagcaggtcagtcttttcttccactctcatcaactctcaagataccctacttaccaatctcgctgttttggcctctaatctaattggaacacaaaggttacaagaagaaagttcgacggctcgtacgacgcagtgctgaagaagcttacgactgaatgttctctgcttttcttccatgtttctactgtttttgagttctctctttgttgattcacggtcgcgtctccgctcttgactgttcccgatctataccagctatacatttcgtacaaccaatcttccttccatcgcgacttccctacttttcatcctgcacttcgcttttcttcttttgttttacagtgccctcttctgccgtactttcacatctattaaacgaatgctagctatctcaatctcatggcacagggtatttcctgaccaagccttccttgcatcgtatctaatagggctcatgatcaacgggtaatgtagtcgttagccatcaaaaacagtgatatcaaataatcggtatcaactaaccacagaccttatcgctaattgctcaaagtgaaaggcaggtctggtccaattcagatgcagaaacagaaacgcgttggaaaaaggagatgtaacgttgagttgaaacacaaaataggaagagagctacactcatcattcctcctcctctcaacgtatcctgtttcttctcataactttgatcagtatcttcaagggcgaaggggtccaacccactatgcatctcgtcacccagcagacagctcatgcgttctcccccggagctttcgcgtttgctcaagatgctgctttccgaccaagctctcatcaaggctcttccctcacaactgaggagcctccttcagctctccgcttgaaactcaggtctatctttgcatcctcactatcttcctgtgacgatccttctgctcccactccaaccacaccaacatttcaaacctacatatcttcacctttcagcgtctcttcagctgacctagatgttccagccgaggaggagctgacctggttagggaataaggtcatctggagtaaaggaattcatattcatcggacatatacttttccggacaaggccgtcgtcaagcatgctttctttgcctggttcgatcaacaagacgagtcgatccgtccatcaacatctcgaaaagaaacccttggagaacccgttcctttctcttccttttccttatcaccatcatcatcggcattcatctcggagggcacacgcgtcgctgctaaatcttcaggatcaaattcgtcttcttccccgaagaactcttcattgcattcatcgaagtctgtcgtacgcgccatctgctttctattctccggaacagtcgaggtataccttccgtctggctctgcattcaccgttccattccctggtgtcggtgtcaaagcatgggcgctggacttaggaatcatgatcgagactgaaccaaaagcgtctttggacataccaaacgaagtaagacgatctagagaagagggaatatggaagaacgatcttcgattttacgtgctggaggatcctctcagaggtattcgaccggtttggatccaaattcctccttctgctggccagctatctctgacaagtagcggtcttaatccaaatgatcttgtcaactttcttcatgtctttccttacggcgcatccttgcaagcttcttcatggccttccattgccatagctcaacacggttctagctctcgcctctctgtctaccgaacggtctctccttcggccatacccctaaataaagatttatcgatacccgtcttatcagcttcttccattatattccctccgaaaccaccgacagttcaccctccatcacccaatacatcgctttcgttctcctggcgtcgaggcacaccatctaaacttttttctcctaaaccatcggcgcgctctccataccaaacagctcttccaagatcaacatctgctccaacttctctcggacaaagcctgcataaatcggtcatgggcgttgagtttacggcgcctggtgaaagagcggatctgaatatgagcatggacaggctggtcttgattcaacctggaaaggaggaggaggttgatagggcaggtatagctgaaggcgcagctggtctaggtccagatgaaggcgaaggtcgaatggataatgtggtttgctgggagatcgtcggcagttgggaagaggacagtttggcgtgagtttcgattctgaattcgtttgtttgctcgaaatccgactgataaagccttgaaccggatgattagtattcaccctagctcaactctaggatttgtgttggtcgcagaaggtaaacacgatgcctcattgcgtatcagtcacccatcatctcgtctagcaaggtctttccggctttctgtccgggaaggacgaatcaatatggaacttcagagtaaagatgaagctctagatgatctagaggaggacgcgaccaaagagctagacgaccagaaaattacgtcgtcgtgctggagagcactaaagaatgtgcttccccgagcagatgccagaatgataagacgacaagtgatgatctcttcagaaggaaaagacgtcgtccattctggatggtcaacattctcctcggtgcttcttggccatcttggcttgggtccaatcaagaccactacaaatggcccattatcacaaccatcatccgcatgggaaaatgttctagcaagcacgtccaacacccaggaccctgctctccaagctcttcgacctcccttcatcagccctccatcgccgatccaattgggcatccaaacaaaggatcccgccctgacagctagcgtgctacaggcgctgcatcttgtagccgaggaatgcaagttggatttaggaagatactactggttgaatttacttggtgaagttttgataaggttggccgcaggtttaggcaggagagactgggtcgattactggggaaggttgatcccaagagcaacacacggtctgacaggtatgtgtctttgtctacacttgataagagatggcatcgactgatgcttgcttattattggtcaattatgtaggcttgagtatgagcgcatatatggatatgccttctccaagagatgtttatgttcatctctcatctctgatgctggattccaagactccccctccttggccttccttctccacagcatctctctcttgtatctctgcgcctcactctaattttcgaatagatcccactccacatacaactgctctgctcgcaatctatgcctcgctgtctccgataacctcacctggcctgacttacgcagaacggtgtgctcgaacagtttctaccatggtctctcgaggtttcggcgtgccagagttactgcgcttgcctttgggtgttgcgacgcctttgttcgaggcgttgaggacttgccaggcgatgccccctcccgggttgagtgagcatgaatacgatctgattggacgagaagatttaggaagtagagataaaaaagcttggaaggaaaggcgtgggagaccacggagagtgcgtcctcccttgttgtttctctgtcgattataagtgcaggagcagatctaagcttggaggctaactcgtgtgttttatctagaataagttggctaaacagtctatcaatcaattggcagagctgtcttctacgtcaaaagtacagccgatagaccttgttccgtctactaatggagcccttcggctaggctccgatcgacggttggaagaggttgagaggatgttgtctacgacacgagtggttgggctgacagtcaagtgcacattgaaagacgagtaagttgccgttatctatctaatttcttatttggttttccgtttcaatcttgaacgctgacgaaagagatgtttccagtgaccccgagttaccaagctttcagaagacgactgctctcaacgcagcacgaaggacgtccgccttgccgattggacaaggaatgttcaagttctcatcttgcgttgcctcctctacgcgcccctggccgatacagcccattgaatatacagttcgtctatttccggacaaaaccgttgtaccccaagatcgactcattttggacaatcgggattggccagattttcataacggcgtggctgccggtcttcggattgaatctggtggaagtgacatcaactcgtcttggattgtgttcaataagccggtcgagcacaatgccactcatgctggtttcttgttcggtctcggtttgaacggacatttaagagatttcatgccatggcatacgctcccctatctagactctcggcacgagtttacagtcattggcttgctcctaggactagcttcgtctaacgttggaaaccaagatgagctactcacaaaaattctctcgctacacatacaagcgctcttacctcacggagcgccagagcttcatgcttcgcctctgacccaagcttcggcgcttgtcggaattggcatgctctacatgggctctcggaatcgacggatggcagagatggcgctgtcagagatctctcgtcgatcttctccttcctgggcatcgttccgagatcatcaagaagcctacgcgttctctgctgcgatctcgtttgggatgatcatggtcggccggggaggggatgtcgagacacaaggagatgttgatttggtgtctcgattgaagatgctgatgtttgggataacctcggttgcgagcgtaccggaggataggacgatcgacatcaatgtgacggcctgtgggtcgactttggcgttgggattgatgtatctcaagtctggccgttcggacattgccaagttgcttgagatcccaacttccgttcatgaactccagcttgtcaggccggacatcatcctggttcgaacgctgtcgagaaatttggtgctttgggacgagatcggaccatcggatgaatggatccggtcgctcgtgccagacttcttgaaaggaatggttggagatgagaagtcgatcaggcaggcaaagaaccagaacgaggagctggcctactttaatattcttgccggcgcctgtttcacgattggtttgaagtatgcaggcacagccaggagttcagttcattcgcttttgcttcggtactatgactttttctggtctctttcccatgttcccggttagttatgtgtttctttctcttgcaaggggctggcgagtttctcaaaggaaaacaagtagattactaatttataagaaccgtccttcttcacctttttttttctttccatcctctcatcctagccacatcattcaaacaacgaatcagactggcgaccgctcgttcttgcttaggactcatcgcgatctctctcgccgctgtcatgtccggcacgggcgagctcagcgttctttctcgcctccgactcgcccacggaagtcttgaccgagagtccaactacgggtttcactctgccatccatatggcgctcggcctgctgttcctcggtggagggaaacacaccctcggttcgtccaaccaggctatcgcctccatggtctgtgcgttcttcccgacgttcaacatcaccgagaacgagaatcgatcgtacccgcaaccgttccgacatctctgggcgctcgccgtggaggccagatgtttcgccgcgagggacatcgacacggacgacacggtctacctgccggtcaaggtgaggatcagggaggacgggaagatcgggtgtcatcagttgatctcgccgacgttgctcccaccgatcgaccggcttgtgtccgtcagggttgagagtccaaggtactggccgatcgacctcgatctcgggggcggccagctgggggatcactcgatgatccctgtgaaacggcgggccggcttccagagttacgccaaggacccgaaagggaaccactcgatctttgtcgtcggtgggctgacgaccgggttggccgatctgggtcctatccagagttgtctgagtgaccggaccgggttcgaccaggtcggggccaacgcggacgtgtttgtgaacgatctgtttctccgttcgttcgtccgattgttctgcgcgggcccgacggccggtgcgaccgggccgacggagggactggtcaagttgtgtcgagcgtcgtttgtggagacgttgatcaaggatcatccccagctggtgtttgtgaacgtccaactggaccgactcgccagggcaaggccgggtctggactttttgccgttgttcattcaggatctgcatgtgttgaagaagcatgtggatgcacttcagtcggaattcaaccttgtctcatccgggacggacgtgggc

SEQ ID NO: 2571 - DNA, 944 bp, Xanthophyllomyces dendrorhous
tcggtccagaagcaggcatagaaggaagacagacattgatcagagcatcggccgtccatgctacgctcttgacgatccgggagagctcgctcggaatcttttcgtcatcgtccgatccgagggactacgtccagtccgttcgagcctctgcgttggcgaaccagagagggaacggagaatggagggtctcgcccggtctggcgatgtacatcgcctcgctccgacttcctcctctgaccgagctctcggtgctttctgcttccttcgcccggtccttccaggccgtgcgggcgggtcggaccggagtgctcgcaccgagcgaccccggacacgcacccggacccgacggaagcgacacgcacaccgacatcgacagagagatcaaacacatcctcaacgtggtcgtccagaagaccatccgttcgcatccccggttacgagagtgggacgagttttcccggaatgatctcttggggccgttactttcttgacgacgtatgtgtgtgtgtattttaggagatcagaaggagattggacaaaactctatctgatgctccctcttttgcttagaaagaaaaagagaaagacaagacagtacagtaaaaacaaagatgaacacaacacaaagataaacttcttgcttcttccctggataacaagagttagggttatcggtgaatgttgacaagacatcattttattacaatacggatgaaaaggtgccaaatagatgagggatgagaataaaaagaggagggggggggaaggaactttcgaagggatgcagacgatacacagtataccatacacaccctctcgatgttgttttgttgttgtgactactcaagaaccaggatgcgaaagtgaacaagcagaatgatgataattttgtgtgaagaaaaaaaagaagaaaaaggaaagaaagaaaaggaagatatgaaacg

SEQ ID NO: 2572 - DNA, 3353 bp, Xanthophyllomyces dendrorhous
ttgtttttgtttttctctttgaataaattacaagaacgcagtgggtggaagcgcaggctttctcttccttttctttcagagctttcttctgacgggcgcgcgccctttttcttttcttcacgttcaagccacagtcttcgtctttgactgagtgagagccgctcgggcgagcgaagcctggattcaaagggagaaaaagaaaaccaggaggaggaggggggaagccacgtcaggttttttctcttcactttcacatgccaagacaagaagaaaaagggacaaaggaacgaacctcgttgagctggttaagcatatcaacactatatcccgttccgatacgaggtgaagaagaaaaaagacaatgatccatccatccatcgtcagccggtggacattggaaagagagaaaaagaaaggggaaaaaaaaacacgggacgactcacgtggtctcccagttgacacaggcatccgtaacagagataccgtaggccggctggccgtttttggggatatcctgtcttccttcgttcaagttggactcgaacatgacacctgtgatcgagtcgtctccgtttcggagttgttggcagatatcggcgacgacctgggttgattggtgggtgttgagaggtgagggacgaagggagagaagcgcaaagtgagcgagaggatagcggaggaacaaagagagagggggagggggaatgaaagagaaaagaagaagagaagaaaagaagaaaagaaacactcaccacgggctgcctcttgtaatcctttgaagagtttccgtgggaggcatcgatcatcaccgaagccttcacatccggccgggctttcgacatgaacgccgctgctttctgaacgtgctctgtggcgtagttcggtccggaagttcctcctcgaaggatcacgtgaacgtcctgtgtgtgggtatgtaggagagaggagaggaaggtaaacatcagagaaaaagggaatcagtctggttgaactgcacgggaaggagatcattcaactgtacgggtttaccttgtttccagatgttcgaacgatggcagccagacctagaaagaggatgcgaacaaggaaagacggagagagtagacagaaagagagagagagagagagaagagaaaaaatgaatagaaatgagctgcagactctttgaaaaggaaaaccaggaaaggttgatcactcatgagaactcaccctgagagttgataccgaggaaggcgtggggagcggaagacgagcgcatggcgtctactgcgacgctgacacttccgtctgttccgtttttgaaacctatcaagggagcgcagagcgatagattgagttgagttgagaacgtcgagacgagcaagatggatggagagatgaaggttagtgaggggttccaagaaagagaagaaaaagaaaggaaaataagaaaaacgaaccaatggggaaggaaactccactagcgagctctctacaaggcggatgtcccggaagagtcatacgaaataagcaaagatgccatgaatggatgtgagtaaggggaagcgttcaaatgattttttatttttattttttgaaaaaaccacaagacataccggtggagctgagattcggtcgttcgggcaccgatcgcgccccacgagacgaggtcggcaatgtactgaggtctagttttgaaaaggggggaaagagagaatttcgtcaaaaaaaaggacgcacatacacatgaagagagagtgagagaacgagggactgacgagatggtatctagaagctcgcaaccgacggcgacgttgagggagagaatgtcgatgaggagctgtctggctatgcgaagacctttgttgatctatgtgtgtgtgggtgtgtgggtgagttgggggtgagtgaatgagagaatgatcatgcatgggaagggagagaaagagagaggagttagaggtaagtgagatagattcgtagagggcggggcgggaagaacgagcagaaagcaaattagagaacaactaggacacaccttgtaagagttgtcaagatcagggtcactgaacgtgatgggatgaaggtagagacgagagaaggttagacatgaagaaaagggatcagatccagcttccaggcaagagcgagtggagaagagtgaatgtttttacttgatgagtccctatgagagagaagggcaagaaaaagaaaagaaaaggaaaacgaggcaggacgggtgagcgaatgccaattgcaagagaggaaacaactaaactcaccttccaaccgacggtcgttcgaggtttctggagagtgagtaggagagtgggagaagcagtgacgattagaaaagaagcgcgcgcaagcatgatagaaagagaaaagaacgaacctcgctaagaaggttagggaaaagaggacggaaagacatcaagacaagaaaagggatcagacgcaatacgacacatgatgccaagagcaaaccaccaaacgggacatacaagtacgctcgcatgatgatgaccagaccgggaagtctgtccatctgttctctgagcctccttgcgtactcgagagcttcttccgggttgtggatcgagcatgggcctacgatgacgaggactttgttgagtattctgtcgacgacggccgcaccctgttctctggcgagcctgacggtttcttgggcggcctcggagacctgggaggtggattggaatggggaagacgaggcgaggcgaggcgaggcaaggaagggaggattaggatggacagatcagtgaatgacatgacgtacgggatgaggccacggccggcacggacttaccgggaagtcatgcttgaggagtgcaggcgagacgagagggtcgtagccgagaattcgagaatcgtccaatctggtgtgaacggacggacggacgggtgtgtgtttgtgggtgaacgaagatgaggggcaacgaggggccaaaagagagagagagaaagaaagaagatgtgagagaaggcgacagaaggaaaagaagaagatcgaatcagtgggattgcatttgatgaatcgagtgagtgagtgggttgatgagagaggagagagagagagtgtgtgtgtgtgaaggtatgtatgtatgtgagatgaagagctgcgctcaaacgaaaacgaggcaaaaggaatgagaaaccgactggatagtagcttgagtcatgtctgtgtgagagtgtgagtgtgtgagcgagagtgagagagtgagggagtgagggagtgagtatgggattgaagaaggatgagacgatggaagaattggagagttgcccggaaaaaaaaaaaaagttgattcgtttcaaatgtcgtccgggaaatgaactgactcgaacgg

SEQ ID NO: 2573 - DNA, 2840 bp, Xanthophyllomyces dendrorhous
gcacaggcacaggcacaggccaaggggacgcgcagcaggttcaaacgagggaattttcccagtcttggttcatgatcgagacgatcgctctcatcggccctgacggtctggcggcctgccgcccacgttcgatcggccgtccgcagtgagttggccgttggggccggcaagtcgagggaacccgagagaacgcggtggaaaaggaggcaaggcacaagtgggcgaaccagatcaggcacgccagggccacgcacggcaaatagagtttatccagcccgagagcccgtgggtggatgggttgtatttgtgtgtatgtgtgtgtgtgggtgcgtgcgtgcgtgcgtgcgtgctagagagtgtgtgtgtatacgcagtgggagacaagcaatcaagcatgcttactaatcacacacacatgcaacacacacacacacacattctctccaccctcccacagatgactcgaccaccatctgaaagaaccagccagaaggacggtggtgggtgcatgtatgtacgtgagtgagtgcggggaaggcgagtacgtgtgtgtacgcgcaaggaagaacaacgaagcgcacgctatgagcaagcacaactgggcaccgaacgagaacagtaactgtcggtatcttcccaccgaccgaggcgtctcccggcggcaaccgccggtgcccccctccgcttacgtcagccacccagttttcttccatctctttctctctccttccaaaagtctttcagttttaaacggcccccaaaaaaagaagaggcgactttttctttccttctctcccatcatccacaaagatctctcttcttcaacaacaactactactactaccactaccaccactacttctctaacactcttaccatcatggctgtcaaggttggaatcaacggtttcggtatgtgtttgtttttctcttgagctccccatcggttctttcgcttgtccatgtttctttttcctttcctttccttttcttttttctccccactgccttttttttttctattcttttttttttcctttcctctcgccttcatgcatcgcactaacaccatctcatctcatctcactctgcctcgtcttacctcctacaggacgaatcggacgaatcgtccttcgaaacgctatcatccacggtgatagtcagtatttttttaatttctttttttccccatcaatttccctctgctcctttactcatctctttccatctctctcccactctcctacagtcgatgtcgtcgccatcaacgagtgcgtctagatcgaccatctcgtcgtccgcccaaacaccgtctgacaccatcctgttaacttttctctcctccaaagccctttcatcgatcttgagtacatggtctacatgttcagtaagtctccctccccctcaaaaagccgaaacaaagccgaacagaacccgatctaaccattcgttcttcttccctttcctcttccgtctctccctcacagagtacgactccacccacggttcgtccatccctctctctgtcccgaacatctccgaccgggccttttccatctcctgatccgttcgcgtactaacccataccgtacccttcgtcccatcccttcaggtgtcttcaagggatccgtcgagatcaaggacggcaagctcgtgatcgagggcaagcccatcgtcgtctacggtgagcgagaccccgccaacatccagtggggagctgccggtgccgactacgtcgtcgagtccaccggtgtcttcaccacccaggagaaggccgagctccacctcaagggaggagccaagaaggtcgtcatctctgccccttcggccgatgcccccatgttcgtctgcggtgttaacctcgacaagtacgaccccaagtacaccgtcgtctccaacgcttcgtgcaccaccaactgcttggctcccctcgccaaggtcatccacgacaactacaccagtcagtccttttctttgcacttgtctggccttttctttgttggttcttttccttttgtcaaaccatccatactcaccctgcttttcaccttctttttcttcattcacgtattccccctcccgtccaccagttgtcgagggtctcatgaccaccgtccacgccaccaccgccacccagaagaccgtcgacggtccttccaacaaggactggcgaggaggtcgaggagctggtgccaacatcattccctcctccaccggagccgccaaggccgtcggtaaggttatcccctccctcaacggaaagctcaccggaatggccttccgagtgcccacccccgatgtctccgtcgtcgatcttgtcgtccgaatcgagaaggccgcctcttacgaggagatcaaggagaccatcaagaaggcctcccagacccctgagctcaagggtatcctgaactacaccgacgaccaggtcgtctccaccgatttcaccggtgactctgcctcctccaccttcgacgcccaggccggtatctcccttaacggaaacttcgtcaagcttgtctcctggtacgacaacgagtggggatactctgcccgagtctgcgaccttgtttcttacatcgccgcccaggacgccaaggcctaaacggttctctccaaaccctctccccttttgccctgcccattgaattgattccctaaatagaatatcccactttcttttatgctctacctatgatcagtttatctgtctttttctttgtgcgtgtcggttgtgcgactgtacccacctcttgagggacaaggcaagaagtgagcaagatatgaacaagaacaacaaagaaaaagagacaaagaaaaaaaaaaggaaagagaaaacaatcc

SEQ ID NO: 2574 - DNA, 11111 bp, Xanthophyllomyces dendrorhous
cccccccccccaaaaaaaaatctctatctttatctgatcaagagattatattgcatcttttgaatttcctatcgccttcatcctcgccagagaaaaaagtttcaatcacatctgttgaccatcaccatcatctccgtcatctctcatgactcccttgcctgtgaatcgaccagtccatcagcagcccttccagtctttctttctttccatctcatcttgattcccgttttccagatcaccagacttacaaaacacgcctctttctagatcgcccaagacccggaccgagaatcaactctccactcccacgccgcaccgtatgtcctccgagtcgagtcaccagcattccaaacccgacaccaacaacgccgatgccggttccaatggtctccatccggatgccggcatctacaccaacgccgagtttctatgcgagatcgtcaacgacatcatcctggcggacatcactctggcggataaagcagctcggtttaataatctaacgctgggaaggtctggttcccacactctccgctcgggcaagagtcagccaggcatcagcagcagcagcagcagcagcaataacgacgagaccacgagccagcgacttccaagaggtctgtttgggctagctctagattgggtctggcccatcgctcagagtgaccgaccggttggtctttctcttcttttttcttttcttttctttttttctttctttctttctctctcacgtccatccactttttactcaccatggaccatgaatcttgtgaacgatgaatgaacgaataaaacccccttccttctttccttccctctctcctccggaaatgccacgaaacagacagcggaaagattatcagcgctctacatgctcgcgagcatgtacactcaggccgtcgcactcgatccattcagaggggtctacaacgatgtctgggtttcaggacgtttggtaattattcagtttgctttcttcacttggtcgcagcctttgtctattttttatttttatatttattttccaaatggcaagagaagaaagaacattccccccccaagtcgttgacccccttttttcaattattattattattattatttaatctaatttacttcatgcttcgatcggactcgtcttggttggagattattcaggcatcggacatcatcccggcttttacatcagcatctccttcagatccggctttgttgtccactgtgggactcgtcttgctgctcgggaagtctcatctggtgcgttccgctttttccttgttccctttccctccctcagttgcgtttctatccatggtctttcgaaccaaatccatctctgtccacggactgaacgttacttgaactccaacgctcaaccgacggatggcgaaaacgaatagatcgaatacttcacaccatccgagattatccgtcaatgtccgcttgttagagacatcgtccgtccgagcggcacgcatggaccgttcgttcttcccttcctcctctctgatgtcttgaagagggatgtaagaaaagtgtgttgacgctagacagtttccttttcgatcgatcgctgttggcctggcaactgcagcgacagcggtggcgttggcgtggatgggaaggacgggcgattggccactgtggaggattttgaatccacagtctgtctctcgttggatgctctcaccagatcgttagggatcaaagaacgaaaggtgcgcgcggccgtctctttcttcctcttccttttgttcttgttctcctccataggctcacaacggatcgtctccgcccactcgctctactatccgcgcgcgcgcagaccctctctagatcgctctcccagatgccacccagctcgatccccgggctgttcgtgccatcagaaatcccgccgctcgttctttcgaacccatcgatcggaatacaagtcgtccgatccatcctctccctcgatcaacccctcgatgtttcagacgataggaccgagtggccagatcacagcgcacgcacaacaatcacgacggcagagaacgaccaggggagagaacagtacgcgatggtgctcggaaccttgccaccttctctttcgtccctggatgtcttctcgaatctgtttcgcccgaacccgaacccgaatcctctaatgacaaagacggcggtggtggcggcggcggcggcggcggcggcggcggtaggggtcacaaccggaggatcgcgcacttcaccagattctcacgtgcgttcctacgccgaccccgacggcaaccaactagaaaaacgaaggaaggaaggaaacaccgtgcgggatctgctaaaggcccacgcgttaggacggttcgtctcgaactttatcaacgagctcgatcggttggattgtgtgcgaggcgaggatgaacaggtcgggaggttggtccggattgtatgtattcctttctttctttctttccttctttttttttgtctttggcctgctcctcgcctcgccctttctcatctttcttttcctttcttttattcgttggttctttcgtcgtcccctcttggaattcgcgtgtttgttgaaacggacctgacggctcttgtctttccacccacgcctccctccctgccaactcggataacctccacttgaacctttgggcaacgaacgaacgaacgaaaacaaaaacacagttatccctcttcctgtcaaacctccttcagacgaccgacttggtcctcccagaaacgatcctcatcgagtcgacttcttttgcccttcggttttcccggttcgaggacgctcagcgactctatgtcttgctttcttctgcttctgcttctgcttctgcttctgcttctgcttctgcttctgcttctgcttctgcttctgcttctgcctcgtctgcttcttcgattccctctccttcttaggagaacgtgaaggttgggattctttgtaaaggggatgaagtgtatgtatagatctttcctcttgcttgcgtctaggtcgatgtagccttcgtttgagatggaaaccaaaaagggaaagaagatcgagaaaaggagaaagaaaataagaagaaaaagaaaaaagaaagaaaaaaaagaagaaaagaacagaaaagaaaagagagaaaagaaagagaaagaggggaagacgaacgaatggagaataacgtcatcagatccagtcacagtagacaaaaccccgttctactctgattgaaggccctctttaggaaaaaaataataaagcaaagccagaagaaggaaaaaaaaaagaaggacgaaaagagagagagagggagagagatgaaaagagaaacacacttataagaacttggagagaaaaggaaagaaaaagcaaaggatgagcgacagacgaggtcaagaaaacatgaaaacgaaaaaagaaaaaacgagtttatacagaagtcatcacgggagaaagaagggaggaaaagcaaatgtagagatatgggaacagaaggaaccaacaacaagatttgccagggatagtaagctggggtgatttaatgtaagaccggatgcgaaaagcaagcttatataatgaaaggattgagagatgtgaaccgagtgcctacgcccgcggaagtggcgaggatgtggaaagaaaacccaagaacagtggtcggagagagagatttagatagaatcgagctcgtaaaggtattcggtcatcagggtcgttcctttttgaaatgaagtaatggtgcgaggctggagatctggcaagctttgcgcataaagtcgtgctgtaggaccccaaaaggaaaataatcagcccggcacttcgacaactcgaaggaaacagcaagaaagagaacctacatcgagcaactcggtcgcattcgcccttgactttacgtccacacacagacatacagccaaaaaatctttgagctccagactgagcgattcaggcgatttaagtgaaggcgtgccgttcgtggcaatcaggtagagcgctttgagaggttcttcatccaggtaaggcggctccgactcgatcatctcgatagccatgataccaagcgaccagacgtccacttttgccccatactgcttttgcttcaccacctcgggtgccatccagtagggcgtaccgaccatggtggcccgcttcgacttctcctcagagagctttgcacagaacccgaaatcagctgtgtgaataggtcagagtcttgattagtccaaacatttcaagaaaccacatccaaagaaataaaatgaagaaggaggagagaaaaaaagggagagagagggaaaaaaaatcagatacgaactgatcttcacttcaccagcgctgttcagaagaacattatccgacttgatgtcacggtggatgatacttctctgatgaaggtgattcaatcctttgcatgtcttacatatatatatcacaaatgcataatatgtcagttccagtcttggatgttcataatacgtatagagaagatgatagaacagacctcatagcagatactcgcgatctggtcttcctctagcttgttattttcaatcacatccgtcagcgcaccaccctccatatattccatcactacccatagctcgttgcctttgacaaggaaggagtccaagtagttgaccacgttcgcgtgttttgattctttcatcaccacaatctcgttcacaatcagttcctttcgaggctgctgagcaagatccatctgcttgattgctactttagacccatcaaccaaggacttagcaacaaagaccataccagatgctctggagggatgaaaactcagtctttggtcagatacataatcgtgaaagtcgtcatcgagagtatacagcctacttacccttgcccgacctttttgatcttggcgtaaagtgtgttcggttcctccttgctgacaacgagtcgaagccgatccatgatctgggcctcgctgagagtactgatccgacgttccgtcactgtcgcagatgccagcttctcagttgtctcagctatcgggtccttcggcttggacgacgaggtcggaacctttacagctgagcttgtacgtgcgttcgaaggagtagggttgaaagaagtgacagttggaggaggaggtggtggtcgggtagttggcagggaaggcttgcgagtgatctgtaagtattttgtacccaggtcgcattcagccaacgatcgaggtacagagcatatcgccaaaaaaaaagaaaaaagaaaaaaccaaactcacatcacgaggcgtatacaagtccatttgtgccttggtgggaccgaggaccttctcgttgaatgtcgaatctcgagtgaccaagggttgtctatttacttgcacttccggctgccttggtctgtttggaccgttcgcatgcgaattcaaactggtgcttgatccgttgggttggcttgcgcctgctaaaccagttcctccaaacctgggcgcggtcggttgtgctgaggtatggttatatgcagttggagtagttgagagcaagccctgctgtcggtgggccgggctaggcaaacttggtttggagagatggtagtcgtccaactcgcctcctcgtttctgaatatcggtatagaattcgagtacgtccaaaactgcctgaggatttcgagcgtagtcttctttggtgatggccgaggaagtaagaagccgagtccattgctctggcaagccctattagcaaaacacgtcaaggtcgagagacaagcgagcgagtaatcagatctctttgttcttatcatcgaccgtaagacagactggacagaggaaatggaaagtactaacagtgaatgctccgctgacagggtcaaaaccgacatggacctgatgaatgaagttggttgggatgctgacgccaaggggacttcgattgtagatatcatccatccagccataaagctcttcgtcgcccttgacagcgatgtaatgtgctttatctctggtctggacttcgatacagtacggtcgaagatctgttcgctggacaccttgaacatgctgtaggcttatcgatagcgaggctgaactggttgtctgcatgaagacaaagggaacaaaaacaaaaagacaaagcggtcagatatgttacttacgaccgttcgaatgaaagacgttataggaaagaaagagacagcaccgacctcgttctttctgaagcttaagttctgattatctagaaccatccatttcttactccaaagcaaaaacgagtccttgatgttgacgtaacctgaccgagggggaaggatcgagcgagcgccttggtgagggctgttgacgatagggtacgacgccggggtttgttgcctcgtcggtttattcaaaggctgatagtttacaggcggagctggcctcgacggaggagcaggagcagcccgggtaggcgtcaaggaaggaccctggtaatgagccataacgagcaaggagacaaacaacaggtcgagggcagcaagggtggaaacgtgatggtttggtcaaaggccaaacaacgagatcaagcgggcgatgttttcctttttctccacaactctcctcttcttgtcacggacgtcgccgttttaacgatcattctgttgtctttcttcaccatcaaccatcttactatctgacctatgtatctccagttcttttgtccttatatcctagctcgaccagatgacctaaaatagctttggcttgactcgttatcaaaccgctgttgatagctcatctaaaaggagaagaatacaactttaatccaattctaatcaaaaattctgattctcagtcttctttcagtctcatgtgtgggcattccgactctcaacgatcatcgtgatcaccatttttgagatggatagagtcaagtaacgagccattccgtgtgttttgtcttaataaatcgatatctgaaaagaacaagattaaatttttatataataacagatttgctatcccatgtatttatactacaacattaccgaaggtatcaaggtatcagggtatcaggagattgtcttctgtatcctcactgtgactgagatcttcgaatcaactcctttatcggagtccgacttatctgagccaatcatattttcgtaagcaaagtatgcctcttcgtctttgcttgatttgcaaaaccgatttaaatcggacacagaggcaacagtagttccaagttcggttaaatgagaagaatcatagctcgggggtctgagagggcagatagaaggcattaaagagaagaaaatagagtttcattattagcatgttcgataccagggtaaaaaggagaagaaacaaaaccatacgtactctgatgtgccaaaagccctcatccagatgtagctgaaagctgcagtaatcttgttccaggtcgaggcgtgaaaagacaaagcatcctcgtgcattccaaagaaagcaaagtatatgaaagcagccaatgtggtcgtccatcgactgagattgattgaggcccaagaaccaggttgagcgttcaaaattgattgatcagtctcttgcacaagatcaaagctgtggtgaaggtccgcccacgaataggtaggctgcaaattataagagttgtgtatgatctcgtaaatcccgaaaggaagggagagcaccatgtcgactgcagcaacaccaataagacggaggaaacgactgctgttgagagaagaagagtgttgctgaagaacggcttgaaaccgtcgacgttgagctaagaagttatagatggcgaaacctggcgaacgatttgaacaggagatcagtaatggattcaaaattaacatagcgattataacgtacctccacaaatgaaggaaccagccgcacatagtataggcgggacaaatagaccaaggatagcatatagctccaaccaggtcgctggaaaacatccaaagttttcaacgatgttgtatcgatgagcttgaacacagtagctgacgatgagaactaaggtcgtgggaagcaaacagatcgcaacatcggaccagaatgcccattgacgagatgtctcggtttgtctagattgtgtaggcgacgaaatagttgccagacgccggttgatgcataaacaagatgcggctagaccagtttgaactgcgcattgtatcttgacaactaacacaaaacaaacgagctagttaacctctggaactgtataaaagaaaagagcaatactacccaccgacgtcacaccatattggggttaggtcttcagctgtattctgatagaccaaagcattgatgaagtaggtgatgtttgcaagcatgcaccaggtcatgagagagatcgctccaacatttctagcccgaacatggggcccacatgccatcaagaggaggaggatggcgagaccagagtagataggaaagagtgcgtctctcatgatcagaggagtacgatcgaaagagaagattatatatcgaatacggtgatgagacgtgctgcaacttttatatgatatcagccaagacagagataatccatggtttgataggattggggtatgatgaggatcaggaaatggccaaaagacagcacagagtggtaacagaacgaatacgttactatatgtggtcaatatcagtaggtctaaagacagctagaatgaagcaaaagaggagcgaaagatgaacaatgggggtgcgtgcggccaaaaatgaagtgggacaagaatgaagaacatcgctcttatcatttgtaagaatgaaggaacgagtagcatagcagactgcatgattgaacaagatgatgaagcctgaagaaagagctttacgcaatagagcacagacatccaaggtacagacaaaagaagtttgaacgagataaaaaagtttggacaaaacatctggattgaacaaaaagtctggacaaggcgaaaaagtttggactacacatttgaataggacatctgaacaggacaaaaaattttggacagaacaaaggatttggacaagacggtttgtcaggacaaaagaaaagcaaatgagaggtttgggcaagacaaagagagtggtcgccaaagctgacgcatttgattggtctattgtctcggttgaagcgatattgtttgtgactccattgatctgttttgtctgaggatctagacgttgtcttcgttgtctccctgttgattattttcattgttcatattgtttccgtttcctcaaatatctgtcacctctattgtccctattgtccctgttgtcttccgtggcttctttttctctcttttctccatcatctccattatctctgttgtctgcgtgagttttctctttgtcttcttcatcttgtcagacagccaacaatgggaaagactgtacagcgggtgcagacgatgccctcctcctatttgcataaaacgctacctgaagatcccatccagaacatgttttttcatcatcttcaaaaccccttctcaccactgcctccctcctccactgcctacactgcctacctccctcacttcccccaaatctccccttgtttttctctttttgccctgacaatggacgtcttcacaaccatcttcactcctttcgttgcctccaccgaaaccgagctcacttccgaggccgtcggagagcgaccagagagcaagcaaatgttcactaatttctgtgtaatcgcttagagaattttttttctcgacggctttagctgtaagttttcgacctcgtctgtctctctcctttgcctctgactgcgccgcagctgtggcttatccatttttccattttggtcgatattctgcctaacactagacatacccagtgcatgtcttataccctccattcccatctcccttcttgccctttcttttttttccttataccctcaatagctctggaagcgaccacaatatagatcgtctagtgggtcgagagatgatatatgtgatgacctcattctgaccaccgtcaaaccagactgtctgtcactcttctaccttttgccttcatagcaaaggacaaggccaaaggggcagagagaggagaggagaggaatagcgccggcaggtctcatgtgatgttgtgggattgttggctctgaccgatacgcggatggtgtctggaagctattttctgagttctgggtgatggatgaagttcggagctgggtctcgaggtcgggattgaaggttgttggttagggttaaaagcttggggtaggtgatatcgaaggtttttgggtgaattgtcgtggttttggaagattgactgaagggataggtctggacaggaaggttgtggtctagaggggagctcctggtcttggtgatgaaaggttgtgaggaggatagacttggggtatgggccaaaactgttgggggtaggatttgtcattttgagtcatgggtcgattctgaacagacggattgagaaaggaaggaaatggaccattctagttctatgtagagatagtgtataaaacgggagaatgtggtgacttggtgaaatatcagaatttggagctgaaaagggaggttgggagaaaacttctggttttggctcgaaggttgatcattgaagaagaagaagaagaaggaaatacagggtacgtgtcactatatgatgctttcaatagatattctttcatctagtcggtgccactgtagattatacttgtgtatcccgctttagacgagacagagtgttctggaagtcaaaaacgaggttctgcacttgtgaacaacagagcgtgctcttaaaaaacgattcactggatacaagtacttataaaatcagggagcacttcgtggtggttttctagagtagtcacacagacgacaatgttatcctagtttccgaatgccttaatgatgtttctctcgttgcgctagagatgatttccttaatagagacacctgatcccctcaaactgatcccccaaacaaatatttacacacaaagtgagagtaagttgattgagagaaccagaaagaagaaggaaaaagaaaataaattagctactgtatatacgagatcaccaagatggaaacaaaatagaagcaagatggaaataaacaaaaatggaaataaaactagatggaagtgaaatagaacgagagagaagtgagataaaatgttgaaggagaaaccgaa

SEQ ID NO: 2575 - DNA, 18213 bp, Xanthophyllomyces dendrorhous
  misc_feature (4251)..(4260): n is a, c, g, or t
gttgaaggagaaaccgaagaaatagaaaagtgaaccaactcgcaacactcggtggttgatgtctagactgctatatccaataaggcttaggtgcatagatgataagcagaaaccaatgtaccatattcaagtattctcaacactggcggtacccaggggattgttcatgaacccagcccctgatgaacagtcacgaaggtgaccgttatgtgagacccattattgagagctggcacatgaccttatcaaccgacaaagtatatcatctcctcagatgcgttagagcatggagaaccgctctagcaagaggctaatcgtagccattatcaggaacctcgaggtcgtgtgttggcaagatcgaatgaatgatagcctcaatgcagctgtactatcgtaagagcagaaaatggttttgagtatgtcctcgccgtaagcagcggacctggtcgagagaaaatatagctatagtgacagatgtcctaaatggttcaggcaacccgaagtgtacttcgatatctggcccaattgcgctctcgtctgagcaagacagaactctatctatttctggatataagaggtgcttatataagagccgcaccatactgcctggtaccgaaaacgcggtgttgccattgacgtagtggccgtgagaacattggtgaatgaaccgtattcagaagttagtctttttctagagcttgactgaatagatgtcggattcctatccagtgatggcatcagttcgcatcgacgggtggaagacgacccagagatttatacttcgttctgagctactgattggtctccggctcaagaaaaaggatgcgaaggggttgacgcgatttatgatgctgtcgtctagccatcgaccgcactgatggacgctctttccagtcgttctggctgcagaatgagagaagttgttggagacatggatttcaggatggacaacgattgtaagccgacaaataatagccatgatgatcatgacgatcatgatgatgccatgaaaattttgagttcgggatgtcaacaacacgaccgggcgccactgtcaatcggactgatgtgaaagaaacagggctataaggtttgaaaaatattggggaggcgatttcgggtgtcaattaggacttgtagtctgaacataacccttgagattcgatctgtgttcgtcggtggcagttgctgaaacgtgttttagcatcttgagacacccgaacaggcaggcagcatagtatttgaaagatttgattgcgatgtcgtccttgataacgctagttttcgataccaataccagatttgggcaaagaaggcagtccatctgcattgaagaggtgcttgccaagggataattgttggaaattggaatccacacgtcatcattgaaggttgtagctcagtggcaagagcggctctatgtagttcacgagacgcgggttcgatccccgccaactccagtttcaacaaggaataacaacgtttctgaagtatacgggtaggcgtcgaaagaggccgcttgctagaattacgaggttctgatgtcggtttgaggatactcgaatgaatctcttgatcggtcatgttaggggttgtatcgtttggttctaagttcggtggctttggcggtgaccttgaattctttcaccaatgctgagcagctatgttcttcaattgaatcgtgagaacgcacaagaagatctattctggtattggttaggccagaccggaccttcgattgtggttttctgggtctaatcgtcaatgaatgggcgaaaaggatgttgaaaggtatagagcagatatgaaagagtcagaaacaagaccatggtggagaatttgaaaagggacgcagggacgcttggtaaaccgttgagagtacttgaatatggtgcgtcggtttctgcttatcatctatgtacctaagcatgagctagcgcactctgctagctggtcgacttcttttcttccccttccttgtctattttttttctccttcctccgcttctaccagaacgcttctttgatgctgaggttctaaaacccgaaattaaaataataataaaagttaagatcagtgattgaaactcagacagaagggggatctggaagagcactatgatatgcccctgagatagttaggactaatgttcaggattcaatgaatggaagagcaaggtcttagcacaaccagaagtaaccttcgagattggtgagggaaggagaacaggacagaatataacagatgaaaagtcgtgccatcgggagttgtcccgaagctcgtgctcttgacatatcataagagcgccaagcctaaaaacatcagcatagacataactgaatatagaacgaaaggatgtttcggacggagatgatagaacccaacatgggaaaaaagaaaaaagagaaaaggaaccacacaaaaaggagtgcgacgaagtacttttatctctgcgtcactcgaacatgcatacaagatagaaaggatgcatactgatatcaagagcgcgaaaaaaaaacgtattgtcaagatgatatgcatttgcatactaggtacatcactcggtcagatccctgaaagccatctagttagatccctaatagtctttcactcggttgcatgaaacatgaagcaggataatatcgaccagcatctcgtcgaattgacggagaaccagatggaccgacatcgaacaacaatagttgtaaggagaaaggtatgaatatgacctcaactccaagctcagtactctcacaaccacgcgtactactcaccctgaccactcacccaccttcacttgcgcgcttgcattcatacatacctcagctgatcattggaaacgcagctgatttttttttaaatcaattcttgtcattttctgacttcgcgttatcgaagctgccatctccggtttttcttcttcttcatcattccatttgtcacctccttctttgcctatccatcattcattcgttgtttgtttgtttgtttgtttgtttggtttcaatatctatttatccaaccttttaatgttacattcgtctgttcatcttgtatctcattctgtttgctcttcgttctccattacgatcttcgtgcacgaggtagacgactcttgacctcaaatatctactgctgatgttctctgctctcacgttgaatgaccccttgcgaccgctaaccttttgctcttcacgagttcgccttcgttctcttctccttctcaagcttcattctcttattttatttattttattcgtctctcacgcccttctgcaacatctttcacaacactattttacactgtatactttgcttcccttcgaatgcttaagctgactgagcgagcaactgcccgcaccctgtgccccttgcatatgctatcatatataggaataggatttgagccatcgcacagcgaccctatcataaacgaaaaggcaacagcttggttttggttgaaacgaaaaggcgctatgagcaacggctagtttgatcaatctaatgtttctttttgtgtctctttgtcttgtttctaacttgttttgattaaatggtaattccagtctcggtgtatcgaaacaatgcgctgaagtcaaggtatttataagaagaatagcattcataaggttcacatatattcaacccacggcccagccaacactccgcttgcgaagtgagtacctctgctgaactcgcaaaagtgtaaagaagtctcggcctgcaaacggaagggatcgatttatttagaagaataacgacgcgtctaaatcagttaatagttcgaaggaactaagcgctgacaaagaacaggcagacttaccacttaagcaatgacacaggtcgatgtgggcattccaggcgtccactccttggtctctcctttagcggaggaagcggccggactctcgttggtagaggcaacgaagggggtgaagatagcagtgaaagcgtccatgttgttgttattggtggtgttgttggtggcggtggtggtaagggaggtaagaaatgtaggagagtagtagtagtgaagtgaggcaatcagttgaggatggagagaaatggagaagcttctggcttaaattgctgtcttttaagttcttcagtttttcattcaatccgaacggtttctgaagaataaaagattaggagatagagtgaaacaaagaacggcgaaacaaaggatagcagacaaaaagaaaaaaggagtgagagacaaaacaaaacaaaacaaaacaaaacaaaannnnnnnnnncaaaacaaaattaaatggaacaaagaggggcagaacagatcacaacaaagcgggaaaaacgagagcagagcaaaggaaaggaaaggaagggaactcaaggctgaatctgactgaattgaacaggacggagctgaatcaagcaaagtgaaacaaattaaagcaagacggagcaaagcagagcaaattgagacagacctaaagagggcagagcgcgacggggcaggacaggacagagcaagatagaccaaagctgagcaagggtcagctgagcaaagaactaaggagcgtcaagccacaccacagaagtccgggtgggaagagggagttatcgacgaaacaaaagacgcgtacagagtttccgagattgatggtcgtcgcgagtgaacaaaagaatgcttcgacctgaagacaaaagaccggcgcgcttttcggttccctccgacgcgaaattgtctttgtctttagttttaatcttctcttttgttaacttctttcacgcgtcactcatcctttcctgcaagatgatctctctattcgattcgtgtccaattgatgtctgctttcatcttgttaaatattcgctcgttttaccatactcatagcttcgctgtcccgtccacacgaacaaatatcttcacctgttctctctcattccatcatgaaagacgcgattttcccagtctttgcttcaatcgccctcttgcttctagttttatcatgctatccccatttccgaacaggaaatatcggcgctattgctctcgtcgcatggtgttttgcttcaaattttgtctacctcgtcgactgccttatctactgggatactgttgagaacttaacgcccgtatggtgtgatatcagtaggtgaaactagatttgatctatacgtgatggatgattgctaacgatcatgggtctgtctttctctgatatcctttcttgggtgtgtaaagtggtaaaaattcaagccaccacccaaaccggtctggctgctgcatgcctatgtatcaaccggaggctcgccatcatatcctgttccaaacaaaccagcgccacctctaagtcgcgtcggtgggcgttctggtcggacataatgatctgtgtgctagcgcctgtcatcgtcgccgtggtcagctattgtgtgcaatcacaccgttacaatattgttgagaacttcggttgttctggatctccatggatggacgtctatgctatcctaggacttcatggctctcctgtgcttttgggggcgatttcttttgtttacggaggcaagtaaactgcttttcttcaaacatatatgccaatcatgtgtgcttattctcatctgtttctcatgcagccatcgcgatctataatttcattgctcaacgaagacggtttcaagtagtccttcagcaaaactcttccctcaataccagtcgttttgtccgcttaatcggtgttgctggtgtcaacatagtgatttccctgcttttcgctatccgtgaaactgtcttaacggcccattcggtgtatcctaccgtctcatgggactatattcattatgatttcgacctcgtttttacctacgactccttcttcctcctaggagacccacaagcttgggtcgaactcaacctttctcgatggcttccatgtgtggcctcgtttatctattttgctttcttcggcatgcatgaggacatgctatcatattacacgtatgtctgggcgagattgtctcaggcgctgttgcgaaccaaagaacgaatctttggacaacctctgtaagcgccatgtctttcttaccctcgtttgatgtctgcattggaaactgacatcttactattcacctcgtcagaactgtacacgatccttcgcaatatcctaagctcggtacggccgttgcttcgccatcagagtgtggatggtctcaagataaaatttccgatgaagagcaggtgttccctcatagccgtacggagatcagtgagaagagcaatatagacgaaggctctttgccccgtgttggtgtaacgattgaagtagagaaagtgatttcataaatgatgcgcgcgacgtctgtatatatagatatatatgtgtgtacttctagttcgaaaagatatgcctctaatcgtcatttcctattcacgattcgtgaacaacatgactccattcttgatatttaaaatcttaagatcaaccactgaggttcatacatgagtctttgcacctgaaatcttttgactgcctagcacttggcgtatcccgtctgccttgacatttttgacttaaaattatgctccttataattaatctcggtcgagaaacagtattcatattgatggcaagacttgagatacatcaaattcaagattacaactcaacccctagccgtgattccaactccacgttcgctaacatactgtttgatagttttagagacaaaaaaaggcgtacaagatatgttattacaacggatcgggcaaaaataaattcgtggcatccgactatatgcagaaacgtatacatacctgtccaacattgcctactttggcacaccaatcgttaaatctcgcgctgagcgcctcaagctgacccctgtcaagcacacgaggctgtacccaagtgatggtagcggtctgggcaattgcatcgagcgagcctcgaataagttttaatctaaagaaatatcgattgttgtgtcgccagaatccaagaattgaatgacgatcatctcagactcgttagtaatcgaatgtagattggagagcgcgcgacgcattggaaaagttggacgaacgagagtgctttcatgacgagatactcaacttcccgcactggaaccttagtttcttcggcgatgctttggaaggagaacactcggtcgtcaactgaccgtcggaaaactgactcaatcaacgccattaaacaaatcttctgtcgaaggaaagcggtattctcttgaagaatagcctaggtatggaagaccagaatatgaaccgttaatcatcgcttgtttggaactaacagagccacagaaggacgaacctcggtctgtagctggctgacgagagactcaaactttccgatctctccgccattaaaagcaacaagtagcgtcttgatccacgagtgctccgtgttgtccagcgcagctaagattggatgttgcaactgaagacatagcaagaaccgaagacttaaatcagctcgatacttacacacatacaaaaaaacagaatcgaaatgacagacgtacaagctctccgaagttatagattgagtcgccaagaagagcagcgataccaaggtcgtgtgctcgagcggtcaattcctccggtgatagatccgatagatttacacatgccaaatagagaagagaatgcttgtagtagagaccatattcagcattgacctgagcaaggataattttccaagagaaaagatcagcaagttgcgtaggagaacagcctcgatcaactgatacactttgctgcgtctgattggagacagatgaactcgccttgtagtaatcacctgcgaccccataaaatcctgcccaaaccacaccgtcaacagtaggtagtgcgtctagtattttctcgctctggtccatcgcctctttcgttcctttaagatctccgagtaagagtttgccataggcgatagaggcaagcgagagcgcgtaagcctcagccgccggagcggcaggaggaggtgtcggctcgcccgtacttgatggcggaggattaggatgcggaattcgagaatgaagagaggtgaggaattctaaagatgctgtggggtctgcacatggcagaatatgatgagaggcaaagtttagcaatcgaccgggtggtgcgaaggccacgtagaagaggaaaggtaccttcaatatgacgagagacatagcgggcgatctcaactagacgaagcacattaagcttcttctcaaagccccgaatgaagctgagggacataacaagaaaccgcgaagttgcatatcagatggctgtatgcggagaacagaatgaggatacgaggcatacgagaaagcagggctcacttgttgaatagagaaacttgtagaggaccggtctctggtgtcctaacaaagctgaggagcaggacagtgaggttgtgccataacctgtggagaaaggagatttttaaaatccaaataaacgaaatcgatgtaaaacacgatcaacaccgaactcgaagagaaacgaaaggaagaaggtaagaaggaacggaatgttcaaaggctcgggttgacgtactttcgattccatgctttctcaatctggctaaccagctggttcacggcaggagaaacattggcctcagaagcagaggcgagccattgttcgggagaagggtcaacgtccattgttcgtatctgaataagagtaaagtagcgagagatgttggatataactggacaaaggaagaacgatgtgtacgctggaggagatgggagaaggtaacttccagccagccggttcgtcaaaaacgaaccggctagacagagggttcgtgggggttcatttctgatgactaatcataaccctaatccacttatgtcacctgtgtgtgatgatcgcaaaggaaagaaaaactcgctggccgacttttcttcacaatttccttcaaacatctcgttctcccatcgcgtcctatcactttctcagagtaagcaccctttattggtggttcatctcgtgtctggatcaagtgctagtagctaattgcttgaattttgtagatgtcacaccttctccccaagtctcttgacgaagtcattgatttctctcagccttccctttggttgtctgttggaaggtatgtctgcctgctttttgtttatcctcagtctattccttttttttcctgcctcttcttgcaagagagcaagcacccagagaaaattccactttcagctatcgctgctgacgcaagtaataatctcttggcaacttcagcattgttttcaaccctctcatttggaatatcgtcgctaggaatggtgcgttcttcttttgtacttacatatctcttcgttctctattgctgagctctgaccccggctgtctttatcggcatgtaatattctcacaattcatagagcaccgaaagcgaacattgaccaagacgcttggcagtccttactcggcctgctacctcatggctgtctgtatctttgctgctggaatcttccgagacagcctgtacgcatctttttcaacacgcctccttttactttcaaatatcgcgtactcacaccgagatttctgcttcatccctattgacaggttcgagaaggctctccgagctcaacctcagaccatccccgagtcaatggagctcaagatcgccgctgctgctcttttcatcatcggacagatcctggtgattacttccacatgggcgctcggagtgactggttcgtcccgtttggggtctctggaagctgtctacttcgcgtatactcagtagtttttacatcacatatggtacaggaacatatttgggagactactgtggcctcttacaggacaagatgggtaggtttcactctctatacactcaccatagacgaccatcgggtatccttacacatctggctcccgtctttccttaaacagtaactggattcccgttcaacgttcaaactgatccgatgtacaacggggcaaccatgtgcttcctcgccaccgcactctggtgagtctgttatcgtactgatagcttaaatgggttatttacatgctgaacttactaaatccaattgacgatattcaggtaccgacgacctgctggtattctgatcactggagtagtttacatcgtctaccagatcgctcttaaatatgaggggtaagtctccagattatctttgctaggaaaagagctgttgacaacaaggacgctcatatcgcggtcttgactcttcttccagaccgttcactagccagatttacgccgacagagaggccaagcgggctcagaagtctaacacgaggtgcgttcttgaccgctaccaatattgcaaaactttttgcccgtacataaattagaaggccttgactgatatctttgttctcttatctccttcaaaagcaaatcgacctcgacggccaccgcgtccgccgcctctccttcgaccccttcgtacgccgccatgacctcccgaggaaagtccaaccggaccgaactctaaggacatagtccaactttactctgagggttctatcctcagagtggtttttttcaactaaaaacggaatgttgctagggtgacggtaatgcattaccgttcggtggaattcatcgacctctctcctttctttatcgactggtctcttctttgtaccttcgttcttttatttgaagaacaagggagggccggcagagacagaaggggtgttagagagtcatgagggcattcaacagcctagagttttgttttgcaagtgttgtcgtctaaaaaatacaagtgaaggttgattcgttcccagtggtagtgatagagcatggagagaatataataactatttatttttcttgagtagattgaagttagatttatacaagattcattatattatcaggtcacattaaacaaggtagaacaagagaacaacaatccttattagaccaagagaaatgagaaatcgagaagggaagcagagagaaaagattgttctcattcatccacctctgtactcctcgtcaaagatcaaggggccggccaaaccaggtaggaagcgagtcgggtacgagtcattcctcaactctccatccggtcgtcatccagcggattcctgacgggcgggatcgctccagtcgtcatcacttgttgcaagtgttgtccagccataggatcgactttctcaacgacaggtgtttcaatggaagaggagcggaacgccgggttctgaagactattgtcagaagaggagaacgtagagcctggtctgttttcttcagtgacaagtcgcttcgttgggggttgaccttcttcagtgaaattgtagtatccgtttgatgctgtatcgccaccttcagcaacatgatcgtcgtcatggttgtcgtcatcatcatcatcgtcatcgtcgttgtcgtccggctcgtcaaacggatttgcgttctcagctgccatctcggcgcctatcgcttgcgccaataaagcttcctcctctccagtcgtcaacgacagttccgttccaaccatcgtacccgtcgtcgttgcggtagtagtggtcgaagaggaagtcgaagacgatccggctcgacgggcttctttcaatcgacgaagaaccttgtgggtgaattctttggtgaacgccttcatctttgcttgtttgtcctctgagagcgcgagagggacaggatttgatatgaacgttcttgatttcttctctttgttgaggatcagttgagagcactggatgagaacagatatagagatagggacaagaaatttttagccatgcgcctcaaagtaaagacgtgcgatggaagcttaaggaaaggaaaatggaaaggaaggaggagaggaaacgaacctcttttgcgtatcttttaaacttgtcgtgatccatctcgttcttgtacttcgacatagacctaacaacaacctggccgatcaaccctagatacttcttctccttgtgctcctgagacggacccgctttggccgccgctgccgctgccgttgattgcatcttggcagcccgttttcgcttctttcgctcttctctcgctttcaatctctcggctaatgcttctgccttttccctctcagccttctcagccttttcggccgctgcatgctcagccgctcgctcggctgcttcgctatccaatttagcctgagcaatgattgcttcaagtcttgctctattcgctgcgcttgtcactgatgacgggacgaccggctgggagaccggcatcggtggtggcggagtatacactcgagaagtagcctggaaggaagacgatcgagtggcatccggacgttggaacggagtcacgtcagcaccagtcttgtagaatgttccgacagagaccacaggagtatatggtacgggcggttgaggagtaggatcaacagtcggggcttgcgttcgatcctcgtcttctccattcagcggtaactaatcggaaacaagcgcgaccaattattgaagtgtcgtcaatgtacaggtcggtatgataagagagattaggaaggaaagaacgcttactatacgcttggcaattcggtatcccaccggtaacgacgaccagccttccaaaagctacgtcaaagatgatcaagcgcgaaatgttcaatcaatacttcgactctctcgttctatcggaaggtgattaccaggtcagcttactttctttgctatcgaagtaaattcttcatcgtcggagaatcgaacgatcatcgcgttcaccggctcttctatcttagaatcctcgaccttattccggtttaataacggccaggcactcatactctccagcgtctaagattcatcgtcgtaggagaccataccatgtccagttttagaagtcaagaactcatgtgaggtgaagatgaaacagacagacggaccagcttgacgacctctttgtcttctggaaactctttcagtagggtgttcatcaaattaaatccgtgcattcgtagcagttgacgttgaacaacctgatcatcggtcatctgttggaatacaggacattcgttttattctatcagtcgattgagcttcgggagtgagactaagagatagcgataagactaaccttgattctgctaagtaacttgcacagtaccgatcggttagctgtcgactgtcgaacagccgctacgaccttggggacctcgggtgtagatatcggcctaagcaccggctatagggcggtcaaggacagaagaaattagctagagacgtgaattcaccgttgccagatagaaaacacaacaagaattaacgtaccatgaagtcttcgtcaagttttctactcttcttctttcttgatcccttcattccatactgctcgacctcgtccatgatgcccagagctggcataccgagcggaaacaaataatgagctcaaatatgttttgttcacagataccactctgcgacaaggggtagagaaccagagtactgaccatccaggtaaagatcgtccatgcctccgacgtctgtttgagttttccctcctagagttcctacacagttgggctcgttacagtaacatggctgtgcgtcgtgtctggtgtgtacagacggagggtagatgtgtgttttttttagacacaattcagttcgaaaaaggaaggggctggaaacgaacccgtatcgatcgacattataattgaacgtaagctcttcaccggccaggatgtcccgctttgcgaagattcccatccgcatgtgttttccgacgacccactttgcgacgaagcaatttgggttgcaactgtggttgataaaccgaccaatccctccatttttcgttgcgtccaagtactaagtgaaggccgcaagaagagatgacagaagagcgttagacaagagggatgtcggatatgtaatgccccagttgagttttactaacctcatctttttgaagttccataaagtagaaatgacgaattccctcagcgccataggcctgcatccgcttgagaaagtttgcctttggaacaacttctccaaggtattcatagataaaatcctctctaaagaggtgagaagaccatgttagatgagcatgtcagcataagccagcgacagacaaggtgaaagaaagaagaggaaggaaagaacaaagaactcaacgtactgagaaatgtttgatgccgcacggagaccaaatcctttcttttccgtcatgacgacttccacatccgcatactgtctacgcgtgaatctgatgttttcacaagaaacggatgtaagacgatccgattaatcacgacgaaagagagaaagggtagaaagataaaaaaaaggtccgcgccaccaactatgccgaggttaaaagagatctgctcatcaacaagacctaacgtacctctggttattacagtactttccacatcgacactcgtgctccaaacattctacctgggtcagcctattgatacagtccgatccatcgccacaagccatataaggatcgtcatgacctgatgacaccgggtaacgatcaatgagacacgtcggatcagacacagaagcacataacaagagaaccagagaagagacacggatttagaaacagtcccagagcgagagtcaagaaagaatgaggaaacagacagcagtcataggaataagagacagtgaagaagggagaaaaggaggaaggaacaaaaagagaagaaaagaggaccgcaggcaaaaacatggaacacgatagctggaaacaccgatcagcacaaagagagaacaagagggaatatggcgctcacctggtcgaaagttgcaatcacagatcatcgaatcatcatcctggtgacttctgcccagactagcagtctgatgatgatttgtctgaagagcgacgaatgttttgctagcttcctcgaatgcaactggaaggtgagagatcagctgggtcggataattctctgccgccttcttcttattttttgttcctttggtggtagtggtagctgtcggtaagagcaaaggggacgcttcaccagaagaattataaggcgaagcagaaccggaaagtgtgggcttgacatcctcagatttcacatgcgcttgatcgtttgcaggtgaggactgagaatgtgaggtggaaggagggaagaaggacgcggtcacatcggtcttgatgataggcgaaaagtcttttgctctaacagggctattagaacgaggaggagaaggaggaaaaagaatgaaagcaagcggagccatggactggtcttcagtcttggccgttacgatgttcgatgatggtcgagaggaactcgacacgtcggctgaagattcgtgcacatcaggatgatcaccggccgaagtgacggttggatccgaagtaagcccgtcaaccgcgtcaaatgtggttgatgttggtagcaacggcatacgagaagcaaaaatgagagagcagaggagaacagaggatataggaggtgactatattcagaaccaaagttacgccgtccgtctgtgacaaaggaagatgatgttttggtgaaaggtgtcgtcgtcgtcgaggaggaaacgcgtacacggaagttgacgaacaaacaaggaagaactctgtgtatgatcaaatgacacacataggatcagcttgagtacaccatcaagaggccgaggatctctaatttgaaagccaggaaggaatgaagggatgaaggagagagaagaagttcgtacccttcttctgatgtaatttgggtacacctttgatggagttttgagttaagcttgaaataagcggagaggccaaacaacagcctgcactcttctgtaatggataccccagttttctagccgagtataggaagcgtttgtattgttttgggtttggccatctgaatacacacgttttgtaatcttcattagaaattatttcgtagtctttttgccaaaaaaaatctgattctcgttcttccttctcgtccgacgtacaacgaaacctcacactccatcctccatcccgttgttcttcgagaacacacacgcataaacacacacgtacctcaatggcttccaaccagccgtatcaaacggctccggccagcacacagaaaaggaagaagacctcggactcttccgtctccgcttccagcccggccagcaagaaacttcaaatttccttcaatgaggcatcccagctcggacctgtttttggtgaggatcaacttctctcttgtgaattcttgcccactcagctaactgtcatctctttctggatacgtaaaacgctctatgtctttttacttggtctatttcttttcttcatcagccaatttcccttctattgtgccgccgacaactacgccattcaagctgtaccgacacaaggattcggacaccaagaagccgttggaggaacagctaactatcctcgctggagagaccgctggagtcgagctctatagtaccaaccgggatgtacctgtaaaaggaaatccggatggacaaggtggatacccctgcaagtaagtattatccttgcagatgctttgtcccaagacagcccacttaccagttcttgatcgtttaaactacaacttcgtttcctccacgatagataccttattggaattcatgatccatcgacatccacactcacccttgctcctacgccgacgtacctgctggctcactctgttaagcgactcaaacaactcgactcttccgagtcgacctcggctaacttcaaagatcagcgaaacaagctcggagaggcgttcggaacaaagaaggcgaagtccagaatcaaggcggtcgaacgaaacttgatcgatacctcccagatggaagacgtccgagtgcttctacaggacagtatccaacaatctggagcggccctgcctactcaaggtaggttttctagctgattggtattgcggtctagtgcagaagaacgacagtttaacaatcttttcctctttcgcgttgttgtctttatcaaccgacagagaccatcaaggctgtggccgatcaagctcggccgattcctcctccgaacatggaagctaccaccccggaagaggttcgttctcatgttatagggttctgtcaacgcatccgatcactcacttgtcatttggctttaatatatctaggcctacaaactggaagatatcatccctgcttcatgctctgtggcccttcggccgctcatcaaagaaatcatcggcgcggagaacgaccagacacgaatgactctgctccctttccgtcattcgagctgggtcaaccgacgaatgagggacacattgctcaaggaaaagcccagcaaggagaagctgtgcgtcacatgccgatgttctgttcttccgtctttccgcagacatgatgctgacagatacgatgcaacgcgttccctccttaaacttggattgtttccttagaaaaattctactatacatcctgttgatgagaaaattgatgataaccaggcgagacgatttgaccgacatcggtacgcttaccaagaagtttgcgcctgtgcctagggtggtggtgatgaacctgaaagacacgttcaccgaaactcctcgaggagccaaggcgtaagcttatttcctgtttgtagaatatctggacacgcgcgcgtacggaacactaacccctggcatgccttcttgtttccaagggcgacgatcacgccggggatggaggcaaagctccattcatggatgctctgcttgtgtctgatgtatgataacttcatctgcgatgccccggagctcgccaaggatctcaacatggcaccgacaaagtaagtctcttgctgctttgttctcttcttcataattatcacacggaatttcaagatgttgtgtactgacattcaaaactgatactttcccacgaagggtcaacgcgttgttgggtggtttgggatgcaagattgagatcccgaatgcggttgagcgagagcgattgggaatcagctacgctgacgcaaaggcgaccaagaaggcaatcctcaaggtgcctcttgtcttcaaagagcctagccggtatgtcatcatccttttttctttttagtgatttactagatggaaagaagagagaaactgacggtgttgtcctgatggttcatatatcagtggaggaaagaaaaagtagagaatctgaaaatcttgatagaatgcaacattccaacttgatttgtgtgaacgcaaaatgaacgtatggaagaaatcggcagagacgatcagagcttgggtagggattgttagagaaaaag

SEQ ID NO: 2576 - DNA, 331 bp, Xanthophyllomyces dendrorhous
agggattgttagagaaaaagcaagaagaataaggagagaggaaaaagaaagtctccaagcaacgtctccacgatgtcgagctctgccaacgggcgacctgtctgccttgggagtagagggacccatccttccgatgaagcgttgccgctctccggacgagaccaagcctgatggcctggaggatgaagatttgactgggaccgagagccatcctgtgaaggacgactcggcacgccagccctcgcgtctaggcagagtcgcccgccagagtaaacgggcggagaactcaactgtaatgaagacaagagttatttgcttggattcctaatga

SEQ ID NO: 2577 - DNA, 20617 bp, Xanthophyllomyces dendrorhous
tttgcttggattcctaatgacccgtcgcaggttgtctactatcaatcccttccgcctacaaaccctgcaacttttgtcacacccccggcaacgcctttttcttggtcgtcttctttaatatatctatcacttacttctctgctaccaattccattcctacacctacacattcttacatcatcgacatgccaccagcacctatgaatcttcccgccggagctggtcagccctccacgttcgataagagtacgtctaaatccgggtccgatccgttctctgattcttctgagaccatcgtttcgagaaacttcgacagactgaacccattgtttttgatcatctgttgatcacagtgaaaatgggtgccaccatgggtgtaagccttcttgtctctatcctatctctatcagcttctagatgaaatgcttttcagaaggaaactctgataaattcagtctaaggctcacgcgatgcatcgtcccggtttggggtgtggtggttgatgccatagaccgtcgttgggctcagtatgggtttcatctttggggggttcaccgtcctgcggtgcgtcgatctacccatcttgattcgtctccctcgactcgttccggtttgattgaaagttcttatcgaccctgatttgcattctcctttcttccctgtctgacgaccggctatatggcagaggcggagccggacctaagggaccgcttcacaccatgtctcagtatatgctcagctctgctggtatgtcacttttccttcaataaatctcgttctttgacgaggaggatgaaccagatcggatcagattccagttagattcaagactgattcttcgaatactttatcgaatcgcatccattgtttgggataattaggaacctttggattcttcatgttcgtttctatcctcgtcttttctctggttgttgaagtcttctcactaaatgccacatgctgcttctttgtccatccgtggttcttttttcccgaacagggccatcggttctgttgtccgaaacgactcgcccgaatcaatgttggtcagagatgatttggcccgtatgcgaatcgccagcaagatagaaggtgcggcttggctcaagactcagaatgctcgagctcagtcgagtgaaggaaggatatgaaaatggaagaagtgaagtttcacgatttacagtttcatttgacatcgaaagaggacttgcacataaaagcccatatatttgggtacgtctttgtatgcattctatccaactagagtcgaacaaacatgtatcgacttgtgcaaggacgaaagtgaaaggattgaagatgaaaagagagagacgacacagatatagcaacacattattccccttaatcctacacgcacaaacacacagggagaaaggtctcggtaactcaagttcttcagttcaaaggagctacaaaatctatagaggaaagctcgtcaacttcgatgaagctgactcgaacctagttgacaagacaagaataagtagatcagtttcaacgccacttacgcccatgctcaagaaagacgtaccgaatgaacgctctgctcagccattacacgctccttgatcatccgctcaacctgctgagcttccttcaaactgatcgcgtccgatttggaaaatccaagctcgagttcgatcctcgcgcccgctccggatccgatccctttcaatgaacgaacgtcccacctgatgtcctttttttgtcgacctgatggcgtgccggtctcctgattgtttagttgttcttcccgaagatcttggagaattgttcgaacatcgtccaagacttcttcatcacatgaagagtccagaagtgttagtgtcgatcgatacgtcaggatggatgattgatacagaagcatcgtagagacgagaatcccaccgagaggatcaaggatgggaacacctgcggtggacccaaggatagagagtagggcgatgaacgatgtcagcgcgtccgatcgatgatgtagcgccttttaagaggaagcgagcgcaaattcagatcagcagacaaacaagagcacaacacgggttcgaaagaaagtgttggcgtacgttggcagctaagactgaagagttttcttcctcgccgactttcttcgtgatcctatacatccattcttttactaccacactcaacaaggccgtccaggccgcgtttggatcgagtaacccgccagactcatccaaagcaatctcatgagtgtgagaatgatgaccagcgagcgcgtgaggaagatgaggtaggtagtggaggatatttgattcagagaatggaatgttggtaagaagctggcaggcccgtgaaaggaagaagaatcgatagtcgatgtttagaaacaacttctcaagacgagatttagcaaggaagacagaacgacgcgtacagaataactatgtatcccaatgcctatcgagccaacgacaagaatggcggatacagtaagcatgcccagcgtgtcgaactttgagaatccgacaggaaacatctttgaaggcggctgtcgagacatgttgctaaagtcggccagtgaaacgaatacagaagaggagagatcaacacgaaaacgttgtgcaatatactgattgaagacgctttcactgactagcaaaacaaagtgacaaagtctccaagcaagtctgaagcagaatggccggcctctgccaacaaactagccgagttgtatctcctgattgggttggaccagtcaaataacgatgtacgagagtcagtctcactatctggtattatcatgtcgtttggtggtctactcctatgacgagatgatagacaaaagggccagaaagaaggaagaacagagagataaaaccgaattatctactgaccaaccagagaacaatttgagtccggtcaacccgacattactagccagccccaagagtgtgactctgcttccccggtcaccttttcccatcaaagcggctcgaagcgagtctggagaaggagttgcatgcgaatgcgaatgaccaccagaatgagagtgaaaagggttgaaggaagaatgggagtgatcgtgactatgcgaatgggagtgcgctttcgcgggcttcttaggctcggtggacgaagtatcacgaggagatgaagatggatcagaaggatccgaatgagattgtctcaaggctgacgtggtggacattgttctgaatgataccagtggtgataaacttcttgatgatggtgatgatgatcggagatataaaggtaaatgaaacggacaagaatttgaacgggcgagtggggaaactggcgcgggagctgcggtccgtcgggatttagtgacagagaaggaagataccgagcggaattgttgggtcagtagagtacgttgagaatgaacgataggatcatagaggtgggagtttaatttgacggagttcgcaaacagcatcgaatggaggaacggtggggagttgtgtcgacgactaattgaatggatctctctgtcggggcccaaaaggccaaaggagatggagaaaaggagaagaaaacaagaaaggaagagacagaacagaagactctttctgtgaaaagagacagattcttcttagtgacggaccgttcagtggaaggatgagaaccaagattcacgatggataagaacaaacagagatggaaacagaatgagacaagagcagatagaaatcctaaacagtcgcgtgagggaacgctgactgtactggctggatactaaccgtgtaatgcatagtaagccattttccctactgtcttgtcctctcttaccgatgacgtacttgttgtttctacagtgttcaaatcaacaaacaggttttttttattcttcttgagcataccaggggtatagaagacatgtgtatagagtcagaatgagaggaaagagatgtaacatgcgtgaaggagagaaggtgatgcgcgtagaggatgatgaacggcttgataaagggaagtgtccgatagatgtaaaaaatgaatgtgatataaaagcgtgaaaggtcgtgaagaacgagatatatcgtcagacaaaaaagaaaagaaaaaaagacgatagccagaggcgaaatggaagatggaatgagaagaaggacagagcattgggaaagaaatccatcagaataagaaagaggttacaacgggcagatcaactacctatcgttctgatctcttgggctgctcccgtcgtcttccgaagaatgcacaagaagagtttgtcgtgcactgtcttgattcgaagacttgtgcagggagaaaagcgagtcccgagtttgggaaagatggaagagagactgtcggtaggcgacctgagtatggttggaccaacttgattagcgacttgcacgcacatagataagaacacaagcaaagatgatgatatacctgttcggtatagtactgttccaacatgatctgatgctctgctctggactttttatgaaagtaccaaagtgtaccgaatgtcccggcgatgactgatacaatgacgaatttacgagcgagaaggataaactctgaacggtcaggtctgttgactagacacgacacgacggatagatacacaacagcccaacttacgaagaactatgcagagggccacaatcacgtacacccaggtggccggggtaaccttagaatgagcttgcacagcgcattttttgtcggcattgcagttgtaagaggagcatctagtaagaaaagagagaataacgacgttcaattgctcgagccttgacaacactccttgagaaagtaaggaagcgaaagcatcatactctttgtctgctgtgcagctctctcctatgttcaatgtacgaagacaggtcaaactcgttccatcacagtaaccaccgcgtcgacagctggcgagagaaagagtgattgaaacatgaactccatcagccttgttttcttcttctcaaacaaagagattagaaaacagtttcttacttgtccctgctccggatgtcagagacaggattaccatcggttgtgtactcgatgaacactagattctcgatttgacacgtggagttaagtgtcacattttgatactggcacgcttggttaagacaaattgatccgttgacgttcctcgaactcgagagatcggaccagtcgtcggccttcgagcattcatctgtagggcggaaaaggtgtagacgggcacggtgataagtaaagcaatcacctttgtctgcaaaacagaacaagaagacaacgaaagaaagccacagactgaccatctctatccacctggcaggtctcacccggcccaacctgggccacacagccggatccctcatcgggacaaacatatccctcttcgcaccgtggtggcagcactgcatcctcggcgtatccgtaagggaactttgtttcaaaagaaggaaagaggccaatgagagtcagatctttatctctctatttgagaaaggagtgatcttaggacggagcggaaatcgaatggactgtgtgggaggaagaacaatgaagaatttgagttgagctgacctcatctcttctacaggttctggccacgcagatgttgtcagatgagcagtacgctgagggtacacatccggtgacgagcgcataagtcgtgacgtccagatgaacagcagcatacctagtccggagagacgaaaaaaggaggtgagtattggctcgggttatcaaacaggtcactctgtttggaaacagataagtgaaccaagagaatagagagaagaaagaggaggacagaaagaaagaagaaagaagcccaaaggagaagcacgtactcgcaagctgcaccgatttctgccttgtccgctcggacgggagtaaacaagttgcaggccaaggggagcaacgcgagaacaaatggaaaggtcaacatctctcttttctcttccttatgatttctattcctggttttctttcgccttcttctgaagaccggtattgattctcgactgggctagcctatgcagagaagaagatagaaggcaggaggggaaagaacacgagaagcaaaagaatatgaaaagcaaaagaaggcaagtaagcaaacgaaagcgacttatgcgcagttcaacacgaaagactacataatcggtgtagtaaattgtaatcgagggttgtagttcataatagtaaatgaatcgtatcaacatcactacagcttcctgatgaatactctagtgcggtgtctattgatttctaatacgctattcgatacacattcattagattcctggatttattttcctaatacatccctctattccagcaatgttcttaaacttcggtcggttctcatcttgaaacaggaacagaacagaactcactccacccacttggcgtctacaatctctcagtctactactactactacctaaacctttctcctcttccttctttgctctctcgatgagctcggccatcaggattacagccccttcctcgccggcatctggcccagctactctgacagttccttcgtcggatgcttccatcctacctaatagaggaggtctgttcgtcatcttgtcctcagtttgatgtttcacccacgctcaactgtcgtccctacttgatttattcttctcgttcaacactaccaacgtcgatagcaacagccaaattgtgcagaaacacattgatctatgggtatgtttacccatcgtctgtctttgttgttccgtctagagtctttctttgccagaacctactaaccacgagaacttgaaattcgcattgaacccatcagctactgtaaacatgagaacgatggggtgagtgccatctcgactcttttatcctcacgctacttctcttcctcccattattcaaggtttcatcctgctttcactcggtacagccacgctgacagctatcttcaactctactgctcagtgtcttttctaccatcctccagtatgccttcctggttcttatcgctctacggtttccaacagactgaacgaacactctcctatcgctcttcaaacagtctacacctcaacccccaacccatccccaaagttccccgaagcgagtttttcttgctttcttccaagtttttgcctcctcgacgaacgctgatcacattttgcttcttacccgtcatagctctcctacgcttgcccatgcagagcctaatcggacgcttccatcaacagctttgtctcttctagcggccaagaatgtgtcggcgtttgttccaaagaccgcttcctcggccgccaccgttatcaaagcgcccaattcagaagagaaggaaacgtatgtctgcaacgcaactatccatcttctcgtctttctctgatatcaattgttctttcaccaacgactttgttgtacaacatgtcagttcatccccggctctgaaggcatcaacacccgcatttcatatgtctcccaagaagtctcaagctgttccatctctgatcggacagaacaactcaacgccggacatgggtcttggcgaagtatattctcagttatctttggtacgtctctatggtttaagaatacttgccggctgaactggttattaacagttcagatatctatcagaacgcgcctccttttgatcctccgttcggttcaagggcgcctgatttctctactcttcaacaacccattcagatggatgatggcctcgtcccttcgctcgctggagcgctctacgaggatcagttttaccaacatccagtggttagacagccagtctgtatctcttcatacttttgtttcttcgtgttgtgttgctatttatgtcggctgacgtgagtcgtggtttaattacatctccgatttgtatcagttggattacaatttatacactactccattgccttacattcattcccttcatcacccatcatccctgaaccaaaccccgaccgcacaagacgcgaaccttcacacgttcttcctttcgcctacactctctaaagaccttcatcagcgctccgctgccatcatggagtcatcgccgatccctatccctggtctgccagaaactttgcacgtctaccacagcctacacccattggaacctggaaccgtgggtgtaccggtaccaggcacgcttccaggagaatcttctgccaaaaaagccaatggtgtcctcggactcgggagtgaggtctacaaagctgttagcgaacgagatggaaaggtttattgtctccgtaggattgagggcttcaagatcatgcacgataaggcttttggtccagttgagagttggcgcagagtccaccatcccgcaatcgtctctgttcaggaagcttttactacccgggcgtttggagacaactgtacgatttattcaaaccttctatctgcagtcatgctccggttttatttctaaatctgattgtttctctccttcacaacaattgctacagcggtcatatttgtgtcgaactatcatccggccgccagaacgctttatagtgagcacttcgtcccgcggccgccgacggtaggtagaaatggccgactacagcctcaagatatgcacatcccagaacggaccttgtggagctacattattcaaatcgtcggcgctctcagggcggttcatcgggaaggtctggcatgtagactaatcgagagcagcaagattttggtcactggtaaaaacaggttcgtttgatcaactgcctttggacccacaagcaggatgatgtgctttgcttgactaactgtgtttctgatgctttgtgtaggatacggatcaactgttgtggtatcctggacgtgatcgcgtacgacggtggacagaatatggctcagcaccaggtgagtcccatcatacctgtcccagtaaagtgaaggtaccgatcgacatgaaaaccaactcatctttcgacggtcttccttccacagcaagaagatttgatttccctgggaaagctcattctctccttgacgaatctatcgacgtcggccacgcaaaatctgccgaaagcgctcgacatcctttctaggtcatactcgtctgatatccagaacttggtgatgtacctgctgggtaatcctgggcaaaacggaaaaactgtggaagaactgtcaggattgattgaagggagggtatggaccgagatggaggcagccgaagagtgagttctatattttctggatgtatgccctagcttggttgacgcaaaaccccccttgttcttccttagctacaacgacctgttagagggtgatatgactcgagagttggaaaatggacgactggtccgattgttgtgcaagtttggttttataaacgagcgtcccgagtaggtgttttctcctctttctccttgaactgtcgggttcggagcctatagcaacggtacaagcgctgtgtcgtactgaagcccagaaaactaatcccctttttgttgagtatacagatttgatcatgaccctagatggtcagagtccggtgaccggtacatcatcaagcttttccgggatatggtctttcaccaagtcgatgaattcaacaaaccggtgcttgatttgagccacgtactaacttgtctcaacaaggtctgtcgctttctttctttcttttcctctgtcgcagcttgtcgggaatactttcctaaagacttgctcttgcgccctctctttctcctttgattctccccctcggtcttctcgaacggatggaacaattggtgaacaaattgaacggagcagctcgacgccggatcagatgagaaggtaatgttaatgtcaagagacgagcagagttgtctggtggtgagctatcgagaaatcaaagaatgcatcgaagcagccttcaagtcagtcaacctcttgttctctaccattctcttctatctccttcgcatgggacttcacaatcttgtgaacttgaggttcttatgtcgattaggtttcgtcatgttctgatgaaaccgtcgtttgtttgaactggcagtgatctatcccgtggatcgatataactttgcctttcatcgtacatccaatattttccaattactctctccatctcttctttgccatttcatctcatcggctcggctcagctcagctcgaatcagggttctcgaacaacgctggccccgtttcccttcatcttctcttttttctgctaggtccccactttctgcttcctacatttttgttttctgcttttttgtgtaaactttataacccgagatctcgggctccaaaaacacttgaaaatggcgatttcacacacaattgatctgatcggaattgatctaagatactcgggaaggatagcctatagaagcgaggacggacaagagaggaacacggatgataaacagaagagatagataagacaaacggtataaacgaagtaagcacgagcggcatcgtgctattctataaacccgggaaggcaagtataagcgaaaaaggagaaacaaaacggagctgaacgcaaacaaaccagaacaaaacaatgaagcaaagaaaactgttacacgaagaaaagacggagaaacaacagatgcctgaagagaaaaagaaagcgaaaaggacgagcggaaagcgacgtgttgagataaggatacacagacaaaggagaagataggaaaggataagaagagaaaatcagggagaataaataagttgataagggaatcaaggaaaacacctttcctacagcgtactctcagcgcacgccttcatcttgatcaagccgagacaatcactcgtgagacagtttggcagagcgcggaagtcaagggttaggcacatgggcaaataccaaccgctcatcatcaccatcatctaccgtcgggggcacgatcatgcattcgaaggcgaagtctcgcgattggggtcttaacggagaggttgcaaccgaggatgatactggcttgtaaccgatgggcgcagggcgagtgtgctcggttttgttcgcaagcggaaacggttgtgaagcttctgaggccgaccattttggtcgttggaacagccggaagagaggggtcttcttggtgggagatgacatgacgggttttgtcggggaaacaggagcagacagaggtgatgaaggctcacccaacggtagttgtgagagcatcgggtccatcgagggtgacggtactaaagatgaaagctttcccaagctcgatcgattcgtcaacgagttcaacagaaatttcttttttggctgttcagaccgtttgatgaattctggttgctccagttcatcaagatcatcgaatccggtccactcatcatcaaacacgactcgaacgccgactaggtgatgaatggtagacgctttcagcaggagtagttcctggtggttggtgatggcaggatatgtgattgaatcgcgcgagatggtacgcccgatcgagagggccgaaggagaaccgaaatcgtctatgagagaaggacaggtctcatccgatggtgtgtttaccagttgagggtttctcgaatctgcttgtggatgtcgttctgggtacaatttaagggaaaaattccatgtttatgtcagcacattaaggcgttacacaaagggagagcaccaacatcagggcgatctcggatcatacctggcgaacagcttgaggagaatcgggggagtggaaattctgcagagtccgccagttctagggcggactcagagtccatgaagaaatcctcgttggaagcctctgaggacggttcctcgttctgagtagtcagcagaccgggtgctgttggttctgggctgaccgtcagatctgaacgttgcccatacgaggaggacgaggttgaggacgaggatgaagaccaggacgtgtagtgttctggtgatgatcgagtcgttcgattctgaggatgtttcgtccagaataacatcacaaggtagatatagctaagaaagaggtggcggttcgagaaggatcgacagataggccaaaagaggtaagactcttttcttttgtttttctcgaacaaaagagatcaacacgacaagcggtgataaagtgtagaaggtaacagagtcggggaagaggaaaattaaaaggagccatgaatttggaaaaagaaaaaagatagtatccgctttttatacaacatctatccggcatgtctctttcggctgatctcaaaaggagataggtatgtatgagtgagtggacgggtagatgggtgtgacggagcggtttgggggacgggccaagagatgatgatggcacagaacccagaggatgaatgacgcagatctggcaggacggctcagcagacacgcgcgacgcccgtccggccttctgtatttgtttatttatctcgtcctttcattttacccttttattatccccggaacgcgttttgacatcactcaatgaaacgtcgggagaaatcgtaaagagggaagggaagagagaaaaaaagacatatataataaaaaaagaaagagaaaaaagaagaaaaaaggtaatggcaaaaagcagtatcaagaaaaactccgaaacgagtctctgtctgcaaaggtgcatacagaaattagaggtgagaaagcttgagcacaattcatatagattgtttatccccagaccagatccgttccatccatgaggaatatatgagttccgatcgatcaagagcgctttgtgcgggtctgaatgtatggcctcccgatttcaaaccctcatttcttttatattctttttaaatgctatcctactcggttatcatgtatatactctctttttttttcctatttcgtgtattctcattcctcaagcaatccactaattaacaatatcccttcactgacaatccactcggcctcgactgacgatgcattgactcgacacaatcgccctatggaatcatccagccgaccgacttctttcatcacgttaagtgttacaccacatgtggcgtgtacggtgaaagagaactgatcgggcgccaaaaactcaagtgtcgtccgaggcgcaggctccgtcggtgtcggtcggagagtggaaggtagatagatccgaaaagtaaacgaccgagtcgtatcggtcatcccagcagacctgtcgctaggcttggaaagttcaaagctcgttctcaagcgtggtagacctagattggatgagctttctgatgagttgggagtagccaaggttcttttctcagtcaaaggtggtgccaaggttaccctcggcgcggccaaccgaggagcgggcaaaatgaccgatcgagccaccagcgggcctttgctctgcagtgtttttggggtcgaataatctatgatccggaaagaattgacgagattgaaagagacatgttgaccgatcaagagagaagatgtattcaatccggcgattacatcagataacgcacacgcatgtatgctctgtcgtgatatattattttcaacatgaactcttacctcgggctagttttatagaaaactttttctcaaccctttctaaagcaaactggatcacgatctgtttgtacgcttggtcgctcttcaaccgccggtgaaccgtcgacgccattatcacatccaccaagagtgaaggcgcgcccgcttataacagagagaagacagggaagagggaaggagggaaaggaaacaagagtagaacagatactaagtcccaaatactgaacgtgaaaccaaatgtttcttaggataggaaagggggaggaaaagaggcgtttctctcaccccggtctaacgtgacggccatgtcgctcgctacgcctggaatccatgcctcatccgacatatcttgcttagcagatacctcccccttcgttgactttgacgttgacgatgaaggctcaggaacggcttcgtgatgacagacattaatgaatatcttttgagaggctccgaacgtcgtctacgttgccgttaacgatgtagaaagacagaacacagacagatttgtcaagcaccgcccatacgttgatggccgtatcccattaaaaacaagatcgactgtgccgaatggcgatagattgtgctgcttaccgatgcgttttcagatgcaatatagatagaagctggctcggcaagcacagacttgagcacaaatgaagcctgtgtagtttcaaacgtcagagggccagtcaaacatcagtcggtgtgttctatttttcttattggaacccaaggcaatgagaagaaacattgttcccaccgagggagtcagagtttgtgtatttaacctatatgccaaccagacagaaacgactggggtcactaaaccactcatgttatctctgaaggatagccggcaatggtccgacactagaagggatgacaacaatcagaaacaaacatacatactttgagccaccttgtcccgggaaggagatcggcgggcagagaacgtcttcgtccagcttcggtcggccagcagccaatttgtttccatcaagcaacaagcttgacgaggaagaattggaggaggggacatccaagaaaggcatgttcaatcccaattagcggtgatcgtcagggagcaaacatcatggagagatcgcggcgatttcaatagtttgattcctttgccaaacatcggtctacaactctcaacgtcggctttctcggtctctcaactcgccagtgtataacgaggtatgtttgactcaagcctaactctcaagactatatcaacaaagcaggacactacctatggggaaaggacatgaatacatcggtagctaggtttgcttgttcgatcgattttttcttagactagatagcattggaagttaggcgaagaaagacaggattgtacacagaaatgaggcgtttacaggccgaaatctatattctgggcgggttgatttagttggcagcaggggtctctttctggacagcaggctcggcctgctcttccttagagcctcctcccaactgagcgatcttgtcggatactccgttcaaggcggcctagtagtgtcacagagaaaggggcggacagaaaagagttcactgattcagtttagttcgaatacaagacaaagaaaatgatgtgaagaactgacggtcaatttggggggcgcagcaccagaaacggtatcgatcttggttcccttgtagaagatctggaaggtgggcatggccttgataccactaaaacagagaagcaagatggtagaagtcggatgcaggatgtgagttaccaaacataaagtctaacatcggtccaggagagcaagaaagaactcgtcagaaaagaatgaacgaaccactcggaagcaatctcctcctggtcctcgatgtcaaccttgtagaagtcaatgtcggtgaacttctcggaagacttcttgaagtgaggcgcaatcatcttgcagggtccacacctgaacagtttcatcatcaaggtaacataacatcagtattgaatagcttgcagctgaatcaagagagaacaacgtaccaggtagcccctggtatgagagagaggttaacaagatgaagaatatatgaaagtcagaaagtgtctttcttgtgagaggatggcctgttctttctgatcaatctcccctgtcctatatatctccttctctgtatgagataagaaacattttcaacatctacttacagaagtcaatgatgacaggtcgatcaccgttgatctaaagttcattgggattcaaaaagttctcagtaaaccaatcttgtgacggagtccaaggtgactttttcctcctccggtctagtcggacttgattttcaaccaaggaagaggaattttactcaaaaagatagggataaacttacgatgttcttgaactcctcaaaagactggatatccttaggcatgtttgttgggaaatataggtttgtttatgaaggaagaaaggtggttcgagtttgagagaactgttgttgttgtggtgatggttgttgaaagagaagtgactgacaaagatcgatgtgagttgttgggtctttttattcgattacgcccaccgtgtcatgaacgcgtaatatttatcagcatcattttcttacaaagcagaggcgcaatcttatacttgtcagctctttcagaactcattctttcaagcacctcagacaatcgcttagaactctttctcaggcccttgaatggctacaggacttgaaataaaagccattctatcaaacgtttcatctctttatctatctatgccgacttagagtacttctgaacacactccaaataccagcgcatgtcttccgggtcgaccgcgggctgaacaaacgaatgaacggatgagaggacattagcatactgcacgttctgatgtatatgtagaataaagatggttggagacatagactaactgtcactccgtgcccaaggttagaaatgtaacccttcaactttccacccttgtccttgaagccttcacacactctcttgacctcctgttcaattccgtcccgaccaccatagaggcacatcgggtctgcatttccctgcaaagcgaccttgccctcagtgattcgaatggcctcccccggggtcacacaccaatcaagtgccagaacctcgaacgcgtctgtctgagcgagggaggccagagaagagttggctcccttagcaaatagaatgagcggaggaggaataattccgtccgccgtaagcttctctcggaaaagcttggagatcttgacaagcgaaggaagggcgaatgtcttgaagtgatacggagtaagttctccggcccaggagtcaaagatttggacaagctgacaaacagacagaaatcacaatctaagatgttaagttctcgtctggttcaaacagcaaggtcgaaaaggaacacaaacatacctgagctccggccttgacctggccgactaaaaagtcggcgcatacaactgcgattcgatcgaggagctcatgtgcagcttctgggtacttgaacagccatgtcttgcacttttggaacgtcttagttcctcccccttcaatcatgtagctcattaatgtccatggagcaccgacgaatccgatcaacggaacttccccgttaagcttctctcgagtcattgtgatcgcctcgtacacatagccgagctccttatcgacatcgacattctttgagagtcgctccatatcggcaggaacgcttatcggctcggggagggaagggccagggatcatctctacagtgagacccattgcctgaggaataacaagaactatatggccaagcgaaatataaacatcaggtcagtcagccggtacacggagcatcagatgtacgcagtttatggaaactgcttactatcacagaagataatggcagcgtccagtagtccagagtatcttcggatgggttgaagagtgagctcagaagcaagctctggggtttgacagcattcaaagaaggagtggctcttgcgaacctccatgaattctacggaaacgcgaacatagataaactcatgatcaggaaacatatactgtgtaccacatcttcctttacaaggcctgcaggatttcttaccaggaaggtatcggccggcttgcctcatgacccaagccggagctcgctcagtgtattgacctatccgaatggaagtgtgtgaatttgcagcataaattagttccagtcagaggatatgcatcaaggcaaaaaatgagataacgggacaagcctttggcggcccgaatgatcaagtcattcttaagaggaggaaaatcagcgtcggtcttgattgcaggcatagtgttaatgatctaaatgctgcttgtcaaagatgatggtttctgctctttcccggtcgagatgaaagtgaagagaaaggtgaagaggaacgatcggtcgtgtttacgtaattcgtaaccagattcgctcatgggtgatgtaaccattcaaggcaactcccacctgtgccttgtgtctttgccttctcccatctctgtcctgttaacactaacgtacacacacataccatcacctttctttatcttcttcgattccgaaccatggaagcccttttctttaatgtgagctcatagtatttcgctagggatctgcagttcctgtctttgtgttgttagggtagagcacacacatgcacagaaccaacgggcggccatggctgtagaggagatcatggctcaatcatcgccataaccgaaagctatgtgtggttatgaaccagctctgtagactagcgattcaaactcattcttgcggttttgtattcgaaaagatcaagtatggaccaaaactgaccttgtctcatttctttgttcgctcaatatcaggccgatggaggatttttggagggagttgtcagaggatacaagaacggactcctcacccaagcaaactacaacaacttgacgcagtgcgagactttagaaggtcagccaactgtttctacatatctatgctcccatcggcttgaagccttcaagcattctcagtatcgatatcagcggagactggatcgagtgtggtggagattgccattaattgatgctgtctctcctcttttcatgtatcccagatttccgattgcaactttcttcgaccgactatggaaacttcttggccaatgagcccttgccaataagtacagctactattgctgataaggttcgtcatcagatgttctgaaatcagaagagccgtgttgcagtgagcaagtctgctcatatgaaccctccattttgtctgaacgtcgagataggctaccgagaagctagtctccgaattcaactacatccgaagtaatgcagtagaacccctgtccaaatttttggactatatgacgtgagtcttgcctaaatgtctttgttaatgtgtgtcgaagccatcaccaacggacttgctgtttccgatccgcgtctttctctagttacgcatatatgatcgacaatgttatccttctcacgctaggtacgcttcacgagagagatactagggaacttctcgatcgatgtcatccgctgggagttttcgatacaatgccagcgctttgtgtagctaccaacgttgaagagctctatcagagtgtgttggtggagactcctttaggtataatagttttctcctttcacggtgtgatcatcatcgacctgatcatcctgagctgaccctttgaacaacgttcttgtctacgaatcggtctctagcgccttacttccgagattgcttgtccgctcaggatttggatgatttgaacatcgaaattatccggaacacactctacaaatcctatcttgaggatttccactcgttcgttcaaacgctcccctccccaacaaatgagattatgtctcgagtgctcgcattcgaagccgaccgaagatcgatcaatatcactcttaattcattcaacacggatatcaccaaagaacagcgtgccaagctcttcccctcctttggccgactcttcccagaaggaaacaacgcgcttgctcgagcggatgaccctgatcaagtcaaagctgtagtagacaacgtgatggagtaccgaccgttcttcgaatctgggccggcgggtggtgccggtgccagagaggagggaggatcaagcttggaggacaggttctttaggtatgatgttgagctgaacaagcaaacattcttgcagcaattccaatatggtgtgttctacagctttgtcaaactcaaggagcaagagatccgaagtttgacttggattgcagagtaggtttcaatctttgccttctttctcctctctttcaaagtggctgtctcgaatctacgacggcttcgcagaaactaatagcgcgtacttctttgcctttccttgtctgtttgctcggtatcgatcgcagatgtatcgcccaagacgccaagtttgttcattttttgtaaatgatgtctcgatggcgctgcatgactaactgtcctcttttgatttgacacacttcagggatcgcatccaagacttcgttcctatcttctagattaatttccagtccttatccagactcttcttcgtgctgttgctcatctaggcttttagtgacgtttatcatgaattttacccttcctcttctttcttacgttttctctccatgtcagatcagctcaactgacactcgcaacgaccaaagacaaacaactatatagattgggaagagatcacgacgttacatgggcgaatgaccctggaaacggctagcggagacctatatgatacatatcgttttatggcttatcttttgaaaagcgatcgtaagaatccagtcttcggcttggaggatggtgatgaaacccccttagggtccgcagtctgattccgcggctcatcagactctagccgaacacgtttgacccgaccaccttcacccgaatctacctcatcctccggaacttccccggcagcagcggtggccgtggtttcggcctctttggcgttgtcagtctcatctccggtgaatcctaaggaccgctttctcttagcttggacgaaagacgtttccaggggtgcatcatcagctatcgaatcctcgcccgacttttcgttctcatcggcttcttcagccgaggccaatcgaccttctaaaccttcgtcgtcttccttgtgtttgccatctccttcgtcctcggagatcagcttttcctgcaaagattcggtacctgattcctcggatac

SEQ ID NO: 2578 - DNA, 2677 bp, Xanthophyllomyces dendrorhous
tccaccacctgttcatcgaccggggattcctctatgcggcttgatccagagtcagatatcgcaaccgcctcagtctgttcatcaagagagctcgctcgatccgtcgaagctgaggaatcagtggctgaggctacccccgatgcctcatcatcttgctgagagatcgtatcaaggaaaaagacatggccttccttgacgagatcaattcctacgattctcgtcagagattgctcaatctcttccgacacagtcggcttgccctctccaatgagaggctgacgtcgctgattctcttctattgtagcctccccagtaattcgagcatgctcctttgccatgtcttgggcgttcgacatactgcaagagggaacgataaaacgagataccctatcagactctggactggggatggtcaacacatgatctattgagaacaaattccaaaatcgacacagttttagctgtagccaacaataatagggccagctatcagaaattatttgaacaatacctacacttgcactgagagcgtgtgacgggactactgaatttaggctgaacctgttggcttcgggaaggtgtagtcgtatccgaaacaatctttggaacgggtccggcaggcgttggacgactttgttggcgagtggacgaatgctgatgaaacgataactgacgagcttgagccgtcggcgtggagtttgaagtggaagggagggaatgtcgaggtggcgaagctatggatggactgaaagcatcactttgttccaatcccataggctcatcattgagaatgttcgattcttcaagaagaatccgttcatctgtcgtcgagttggaaggttgaggtgaagagatagattgttcatcggcatcggattcaagggttggtgtcattggtgttgagggttcaacataagccggaatggttgttttctcaggggaatgcggtggggatgatggcggagacagtgtaggttgctaggcaagacatgataaattaggtcaacaagatacatgatagtgttggatcacttgttgttgtttttttttcgctgctcacaattttggaagaagtcgcatcttcagtacgatcctgtaaacgcccgctctttgacaaagttttatccgcttggtcttggcttgaaacaaaccgaagtgggatagaatcactataagatccatagatgtagcgttagtcagtttgaagctccccattcgtattcgaatgaagcagatttctgtgtatttacttccaaagtccaggacgagtgacaccagacaatcggataggagttgctttggaattatcgtcatcgtgttctactcctgatataggagctgtaacttgccgtgccgattgtggggaggatggtgggaaagaatcggtcggaggattaatttgaacgagcttagtcaaaggtcgatctctgatttgtggagaagacatgacgaaagcttcgggtgattcgttgatttctggatgtagagttctagattcttcatcggtctcgatactgataaagtctgcctcgccacttgagcctacaacacatgtgaaggatgagaaatcagtcgtgtcctatgagaatgaaaagaggaggaatatataccagttgccatagctgattccgtatccgaacgagaattgtcaacggcattttcttctgttgtaaagatagaagatttggttggttcagcgccaaacacatagtcatctggaatcggatcctcgtccagttcatcctcctccatatcgaatgcaacgtgagtcgtatgcgggtcaatcggaagaaacgaagaatcattggtagaaaaggattgagattctggagaagacggagcctctccttttgatgaaatttcagtgcaatataagcggacgcgtcagcaatatctgaaagctaaacagctatgaattcaggcagtctcaccttttcccatgtcgtcgtctgcatgttgaatctgctctaaagaagatgtgctagacatagagttcaagttcgtatcgaccaagttcatcacagcatcatctttggcctctgatctagtcgcatccgctgaaccctcagtcgccattgtatcctcactatctgcacctttctcagccattgcctctgcctcaacctcgcgggaaaccttttctgtgggagttaaatcgactgcgctactcaatgtttcgtcgtttagaggggatgtgggcagactggttgactcttgctcggcaggtgattgaatttctggccgtgggtgtggatgcgtgtgaggttgcatagcggcttggtgttcctcttcaaattcatcaaattgaggctccgcctcggacaataactcgggagaagtggcttcagatccagcagatgatattgactcagcgagaagagaagtatggggatggggttgaacagcctgctcatgctccctctcaaactcatcgacaggatcaatgtctgctgaagccggttccacggtaggtgtcgagacgaaaattgctgaaaggtcgccagagctatgattcgagggagtcttcatagactttgtttgaggttgaacagtgtcatgccgcgtttcaagatcatcaactccttctccgtctaaaccacgctcttcttcgatattttttgacgataaatctgattcctcgacgtctttgtccgctttggtcttatctgtagaagag

SEQ ID NO: 2579 - DNA, 23189 bp, Xanthophyllomyces dendrorhous
ggtcttatctgtagaagagaaggactcgggttcctcgacctgccgctgttcttggttgatctcttcagcctcaatcgattctgcgaagcagtgatcagttgagtcggcggagtgagacactacaggacgaggttgaatggctagttcatgctccctctcaaactcgtcctcctttggcacaggtgagcgaataggcgatggcttttccgaatggttggtattctcgttcgcagaaaattcctccttcgatagagtgaattgttccagtatgttggcagtagaaggcatttgttcggcatatgatgaagtcgatgcgaaatcaacttgaccaaagaagaatttgaaagcattgtttcatttgaggttagtagatgatatcagtgtcggtacatctacattttgttcagaagaatcaggagaaatcacatacaggcttcagcaagtccttcagtctttggtagatatacagaagtagcatctcttatctccttcactggtagaagtatcttctctttttcgtcctcggcatcatgctcaatctctctgatgtcaactcccaattcctcctctgatgacttgtcctgctttctgctctcgtcctcctctccgtcgctatcaatgtcgtcgaacgcgtcatgaacaacactcatttctacctcattgaggtcaccctcgtcttcgttctccttatcggtatcgactgacccgtgatcatccggatcttcccgttcgagcatatacgtgtctcggttccccggatgccattccaccaggtcaccatctcgatcaatgacctcgatcccatctggttcgagtccataacgcaatggtcgtgataactgatcggtatccagatctacgcctggtccttgaatatctactccattgttcacggaacctttaggcagacttgtagaagaaagtcctggagaggaagccgatgagagaagaggagtgacttctttcgaattcgaggtaaaaaaattgaagtggtttacagatgaaggggacgatgcagttgacgcgaacgccaatttgtagctgggatcggacgacagacgaagaggttctgtcgtcatcagatccattggaagtccaagaggaacaaagcttgataggtccggatcaataaagatctcttcttgagaggttccttggccattttcgttctcgttctcgttctcgttctcgtcttcatctactaccgactctccttcgatcaattcatccgattcgtcctcaaaggtttctatattgatagcttggttggcgtcattatcgtccttgctacaaaacacgtcgtgatctccaagctcatcagtatcttcgctgtcttcctcctcatattcctcgacatcctctatcggatcctgaggtaaagagggaggagctgatgtggacacaacctgggagactgaaccaagctcgtctcgagaaatatcagagggaaccgaagcggctggttcgggtaaacttccagggggtgagagcctacgaggacggtaagtggagtgcgtttgaagtgctgatggttcttcaatatcagacccttcgctactctcatggtcaccctcttcttcttcctcctcttcctcttcttcctcttcctcttcttcctcttcttcctcctcctcctcctcctcctcatcgtcatcctcttcactgtcctctaagctctcctcctcttgctccctatcttcgctattctcttcatcgtcttcatcttcgtcttcttcatcatcttctcgagatagttcatcatcttcctctgatcctcggttgaggtttgacaggccacctatcttcaccattccgccctttgcgtaccaggttgcttgctcaccttctggttcgctctctagatgggcgtcctcatccgaatcctctagttcgatcacatcctctccgtcctcattttgatcaactgtaaatgaaggtactattggagtgtcctgactacgaaagaacacatctcgggcagagttgaactttggagtacttcggacggaagagggcgcttggaggtgtgtgggaaagggagggaatgcttgatcgtcgtgttcaaagtcagaatcttcgccttcggactccgactcgttttcatcagagtaagtttgcttagaagcttccgagtcttgatcattttcgtcgctctcgtcttgatctgatgcgtgcttttccaaactagactctacagaagggggttgccggcatgagagtacgcgtcagtcgttgtcctcgatactcaaatatcgccctaaactataaagagaacctacccgacacatctatctgttcaaatttcgacccaacagctaaatcctccttgtctctttccttctcaccgatcatcacctgaagatcatccacctgaagattctcttccatattcacatcaccgtcttcgcattctgaggaatctctaggaacaagaggcgcgattttgggcgtcagaatagagattgtcggttcaggatttgggtagagaggctttctgataggattgagggctctcgtgatggttgattgaagatcggatatctgatgtaagcgcataggaagaatcagatcagtatgaccaacctcaaggaacaaagagaagggagttgtgcccaagatagttcgtggctaggtacacatacccaatgatcaaactcctcctctggttcatcgtatgggtttagatcccagcgagacatgctcgctattttttttaaaaaaacgtatttcaaagtcgtagaggtgtaagtagatggagaaaggtgagcggttctgaattcaacatgcagaccatcacgtccgtttgacgaccggtacgagttgtgtgagttagggttagttgtagccacgaagtttgcatatgacacggtgtctaaaagctgtgcagatcgatgcaaatttccttatgacgcattttcgatcgtgagcgacgcgtgccttccaacacacgcgtcgccgccggagatgaacgatcttttccgcttacgtgattggaaatcgatctcgatcatcgatttcagctaccttccacttccgcttcttactgccatggcttgtttcctttcgttgtcacgaccagttgctgttccttctctttctttccgacctccattctgttaatttgttccccataggctcttttcttgtaatatacggaatcctcagtccttttcaaaaatctaccggtcttgcggcgtaccctttgctcttgaggaagaagaagaagaagaagaagaagaagaagaagaaaaaacctatttcagcccaacagatatacccgcttttctaccgttatgactaccaccgccttttctgagctttcgatctctcaactttatacccggttgtcatccatcgtaatcgattccagagattcccggagcacattttctaactgggccaagacgtttagctgtcgacctctcactggttggtctgtcttggcttctttcgatcttgcggcatgttttctctgcttactaccttccgacgcttcgcactttggctttgattgacatccatcccgccccctatagtcttccttccaaacactgaggatgactgtcaggctattgtagagcttgccaggcgagagcaaaagtccgtccgatgtgtaggcgcgggccattcgccttccgatctagcatgtactaccggattcatgattcgaacggataatctgaccaaagtgtttgaggtgagtgttctcacggttagctgccttcaccttctctgccgatcgatgcttacgactccatccacccgttcctattgaccgggaatatcaaggtggacattgagaaaaacgttgtcgaggttcagagtggaatctctcttcatgcgtttcataggctccttgcctctcacggcttggcaatgtccaatttaggctcaatatcggatcaatccatcggtggcatcttgaccactgcgacgcatggctctggagtcgactacccggtgatatccgctggagtaacctcacttacgatgttgctggcggacaatacgattgtagagtgctctcgagagtcattcgaggatctcttcctcgccacgctctgcggcttgggcaccactgggatgattctccgggtacggatcgcggttgagcgcgcatttaggctagatgagacgattgagccggtcgaattcgatcagtttgttgagccagataacttcgagcgcatcgcgggaagcagtcaacacactagagtgtggtggttcccccaggtgggtaaagtgagcgtaggatgcgcgaacagaacttctgctgtgagtctttttgtctgatcaccttttgaggagtcctgcatctctttgagtactgaccacgatcggtgtttccattgcgctgtcaaacagcctccggatccggcacccggatggggagcctatttccgaaatgtcatatttggcttccacatcgttcagttcttgctgtttgtgtcgaggtttatcccctcgctgacaccaccggtatgcaggttggtatggaagcatctgaacggtcggactcagagacacatcggggatagctacaaggtgttcaacttcgactgcctggtatgttcaggggtttcatctttgacgttgcaccctcgtgttatgtttttctcggctaacgactggagctaattgatacatgctagttcccccaatatactaccgagtgggcgatccctgcagagagtgcgccagaatgtctaaaggagcttcgaacgtggctggaccaggaggcggctaaggctgatggtgtccggatacatttcccgatcgagatccgctggacaaaggaggacgacatctggctgagtcccagttatggccgaaagacggtctatatcgggattgtccaattccggtgggtgccctttcttctctttttcttaacaatcatgcgtctttgtactcaatcaaattaacgatgaatgcgcgtatgttgcttgttcagaccgtacgggctgccagtgtcgtaccgtcgatactttgcaaactttgtgcgaatcgtcaaatcgtatgaaggtcgaccccactgggcaaaggcgcataacctgacgccgggtaaccttcgcgcgctttacccaaagtttgatgcatttgtcgaactgatgggtaggtatgatccggacgggttgtttgaaaacgagtatgtaaagaggcacctgttgggtatgcctattggggacggcgtcttcagatcgagtgggcgagtgggcgagtagacgctctttccttacatgtttttatttatttttggaagaaaccatatgttctcttggttcgtctttggcggctctctgttgttcatcttgcttgttccacttgttattatgttcttgcagtactctctcaacacatttgaatatttattggagtgtttctctttctctttttcttacgcaaaaccattttcccctctaatttcttcactcggattattacttgtgccctttctttttctcggattttttttagatgcgatagatgcaatgaatgcaatgcatcgggtttgtgacacaaagactagacagactggctctttcaatcgtatccctttatctttcgtcgatgaagatagacaactagtcaatcaactgtacaagtaaagggttcatgttgggtgagaagaaaggaaggaaggacgaaatagactcggtaagagattccggatgatgtcacagtacagctgtcacttctctggggaaacaatgaatgatcgagagagatgttcttctggggttcctctgatttggtgagcggaatgaatcctccgggagtgagaggaagaacgacgaaaacaagaaacccacgtcagttgtgtgtgaaaaagaacgaaatcgaatatcatctgccgctgccgctgcggctttcaatttctgttgggcttgtataggcttttttgttctcgcgttaagccttttctcttactatctttctagaagatattctcttttgggcttgggctcgggttcggtggtcaaacctgggtcacaaatacatagagccgatggggaaacgtggcttagccgacacgagcgcgaggtacgttctgatacgcgtgcggacccccgattaaattgatgacgcaagcggggtaaaacgacgtcaggcttggattctagagccgtaccttttttcttttcttttcttttctttgatctagtcccgcctcgaagccaagcagacagcagatcatcatctaggaacacatatataaatctctctgggggtcgcttcatcctcttgtccattctcaccttctcaccacccatctcactttctccttcactctcactttctccttcactctcactttctccttcactctcacttctcgatcccacttcccttctcaaacccaacactcatcttctaacaatcatcacaatggctgagactatgcgagccctcaggtactgttcgtaccctcttttcttctaatcctatcgccattcattttcttcaatcgagttttttctaacaccttgcatcttccacagctgctgccaagaccttcgaggtcatttccgatgcccccaagcccgttccttctgacgacgaggtccttcttaaggtcaccctttgcggtatgtgcggaaccgacggacacattcacgacggagagttcatggcccagttccctttgatccctggtcacgagggttcgttcatttcctcgcttatctctcttttccatcgccctttttacatctatatactaatcttctctgttcatcacacattcaacctatgtacagccgtcggagtcgttgagtctatgggtaagaacgtcaagggattctctgtcggagaccgatgcgctgccgatgtcggaatcacctgtggaacctgcttctactgtcgacgaggacagaccctcctttgcgaagacttcaaggccaagggtgtaagtagatatcgtccatcgattctcgaactagtctgcaatagcctaatcttttcttgatttcttcatctgccaggtcgctcttgacggagggttcgccgagtacattacctaccaccagagcaagctctacaagttccacaacctcactgacgaggaggcttccctcctcgagcccgcctcgtgtgccgttcacggtctcgacaagctcgacatgaaggtcggaagcaaggtcctcctcattggagccggacccaccggtttgatcctcgcccagctcctcaagcttaacggagcttcccacgttaccatcgccgccaacgagggacagaagatgcagatcgccagagagtgcaaggctgctgacgagtacatcgacctcaagcgaggagatgccaaggcccagtgggccaagctcaaggaggataacccctacggtttcgacgtcgtggccgagtgcaccggagttgagtccattgttgaggactccatcaactacgtccgacgaggagggacccttcttgtttacggtgtctacgagaacaaggcccgagtttcgtggcctccttcgaagatcttcggtgacgagatccgaatcatcggttccttctcccagacctactgtttcccccgagcgatcgagtacctcgattccggacgacttatcctcaagccgatcgtcaccgatatcttccagcttgaggactggcagaaggctttggactgcatgaactcccgaaagtgcggaaagattgctatcaagctctaagtttgagaatgcttgggaaacgcggaccgcaggggtgtcctcgattcttttggatggtcagaccgatatgtatccgtagaagtcgtcaaactcgagcgaggcaagcagagtgagcgtgtatcagtagattagcatttatttcaaaatgaacgtttcgtgtatgactatgtgaacagaggaagagaaaagaacagaaaggacaattaattaggcgttgctctgattaaaacaaaaacatgtaattgagtggaacgtaaaacaagacaatctaacgcgaaatattttctgtcgtagtctatggactttgggagggaggcaagacaaggcttgtgttgtgtgccagttcgcgatttgagtcttgatcaccaacatgccccaagaactatcgttccgcagatcaaaagacatcaaatcaaagaggttccaataagacacaaaagcatacatatggaggtctcgtcgcggaagttgaattccttgacgactaggaacggagataaagcggaagagaagaaagagaaaaacgaatgtcggggatttgctcaaagagttatagctaagaagatcaccagattcgagattccaacaagaggtcggtgctgctgtccaacccaaggcaagctgcaggtaaggtagagagaacgaccggcattgttagtaacccgttgacaaccatttgatgaatcgagagaaaaccaacctttgaggaactgctcgagcccgtttcgctgccgagccagactgttgataactgcagtaccatccttgacaacaggagccttgagctatgggagaaattagtcaaagactgggttagcatgctaacagattcgcagaaccgtaagatgtgttgaacaaaccatgtagctcaggagcgagaggacgctgtgcagaggctggaagggctcctcggcatcattcgccaaggcggggctttcagcatgaggggacactcggtattggacccgggtaagcaactcggccaagatggcaagatcaaggatcaaaggggtggcgagcaaggaatcttcacattggttgaagatgttcatcgtgttctatatggcatgatatagatttgacagatggattagtcaacaacgcccaaaagctgatcagcatataacccagcctacttgcgctgtcgaacacagtgttaaagagacttactcggccaccgcagaatagctcggaaacgtactcatcaatggctcgcttgctgtctccaacggtaggaacgtacttgatgacaactaagtggtctgggtgcctgagaaaatcatagacgtaagcctcggtcccaaaagagactagaaacatgtagagaaacaaacaaactcactctcccttcttggcaccctctcctagctgttccttggtcttgtagagaagggcgttggaggcaaccatgtcgtcaatcacgctgcttttggaaatctctttgcttcggaactgagagggagcggacagattctgtaaagagagtgggtgtcaagagcatcagctcgtttctgatgcacgaacgacggagaacgaggaaatagtgactcactcgtccgtcgttgtttcccaagtggttgtaggaagcaacagagagaggcttgattccggcgttgacaaggaactctgcgagaacagacttgaccttggtctgaccgctcttcaaatcgtctcctccgatgaaggccttgttctcttcagccaacctgacaattccgggaacgaaagtgttctggggggcgccgttgacgaaggggcaaccctcaaggatggaggcgaccgcaaagagagacgaaggagacacctctgagtgagatgactgaatcgaccgaaggacctcggctgaggtttcattgactccgggaataatatcggagtatcgctctgtgttggccgtccaaaaaacgacgacggtttcgagatcatgctcggcctagggatttgttgcaaacgagaaggaaaacacccgtcagatttgaacaggcaaacctggttaatgccggaaggaagaaacataccttaaagtctcggatgtcctgtcggatcttgtccaagtggacctgcttgtcgtttccaggaagaacgttatcggcccgttcttcctgattggcagcgataaagtcggggtagtaaaccgaggggagaggcttgatctcacacatgagaggtgcaacctgtcgctggagatcatactcgaggacctttgctcggttcatagccttgtcaagaggcataccagaaatatcccatccgccgagaacgaagtcattgggatgaaccatgggcaagacgtcagagaaggggatgttgacatcatgaccagtgacggggttgactccgattcgcatggtggacgctctgacgagagaaccgatatagttcggtccctgtcggccatccttagttccccaggtgatctggtgcctattagctaggatagaggccacgagagtggttccgttgtttccgccgagaccgatgagcatgagactaaaggtttgcacaaacagaagaccaagacaagggttcaatggatcggttcttggcgccagagcgcacaatcatggcacgtccgtagaagggagaagaagaaagcaatgacctacccagttttgggtacggttcgtttagtcttaaactcgtaaccagtctcgaccctagtgacagcaatcttgccgtcctcgcctagagaaaaaaaaacacaatggttagcgggatgtcggcaagattgggagatatgtcgtcgagacttacagacgacttcgttcttcctgtctacaaacctagctcgaatctcgtcgtcagagtatacggtcgcccctttaccgaggtcaacctcgatccccttagggaaggcggtcctagcagcggtaggatgaatctcgtaagcagcatcctgggagggggtggcaggaagagagtgaggtggagaggcagagtctgagatatcgcttccgttgggatgggagttcatattgatggctatagatgatttttttgtttgatttttacttgttttttgtgaggagcttttctgtgttttgcgaagtgtctgtaggttttagactactgaatggattgatgttgaatttgaaatataccaagtttgaggaaaggattcttaatgtgttagagggggagggcaagtgtgcttgttgcctgaggaagagagaagaccgagagtcccaagtagttagaagaaggaagaagaaggaagatggaaaccaggaacgggacctgttagtcaacagcggaggcagagcagatgatgaagagaaaggaactgaagtaatggacttgccaaagaagttgtgaggacttgacaaggtgttgctgaacatacagcttgaagaaaggggtggatgcgaagactaggagaagactaggaagcctgggtgagattgttagatgtaagtgagggtgagtgagtgttgtaggtgagtgaaagagaaaaggaagagagggaaagaaaataatcattgtatgcttctctattatataggatttaaagagcgaaaggcgtaagtgctctgtatccgtatgattggactagccagtcagccagggcttcttggctcggcctggatgagtgcgcaaacgaagcgagcccagacccaatgaggtcttttcgccttctcttctctcttcctttcactctccggtcagtcacaacatgagtaaacaccgcctctgtttttctttgcgtttctggtattttcggtccctctctgccggccgcttgttagccctctctgggcgttgtcagcccttcttacctttgctcttctgtccctccgtcggtttgcccggctgttgccgtagtctgttgctctccgttctcctttggcctctcgacctcaaaggtcaacaagcgcgacatacaagagaacggacggacgatcttccaagaagcacgtacacaaacagaaagagatgcctggacaagaccgaaagacgactgcgcatctacccaagtatgatccgggtgtacgcgtggggatgtgacattattacaacaattggctacggcttacgtatgcagcctgatcacagcatccggcgaaggccgacagttagggttaactctgacttacgttctcttccattctcagtcactctcttccttctgctttccattctatctctgtcctctatctctgtcctgtggattattactttctcttcagccatgtactcatccgtacagatccatacgaggaagccgacacctccgaacgtgcagcagacaatatacgaacctctcctccatgatagccccgattccgacagatcggtacatcatgaaggcactaccgacgacgacgacgacgacctaaagttgggcaggttccaaggtggacgagccactgttttttccagtgtgtcaaagtcagtcccctctattcattcattcattcattctatcctgactaattaccatttatttccttgctgaaccactgaatcatatctcatctgattacgtcccttgtagcttagcaaacagttcgtttccttcggtcatgatgagctcccacgtttcatcctcgcattcaccaacttgtatttatactcttttgcacaaccgctagccatcctcggaactggcatgttggcttttccatacgtgtgtccttgatgcactcttgataccttgatcgatcttgtcactgacatcttttgtttgtatacttgtatacaatcaggcttttgccagcatcggtatcattccaggcatcttttcttgtaagaattctctgcccctaagtgcgtcgaccaggtctcgctcattatatttaatcgtatcctaggcgcgttctctggctccatggcgttcttcgggctctatctgctgtccatctgcgcggccaaggtggagcctccccggtcgacctccttcaatgcgatctctatgcttacctttggtaaacgagctactgtctttttcgacctcgctatcgctataaaatgctttggagtgtctatctcgcgagttctgcttccactgtacttctcaaaagttttaaaggaagagctgtagtagagcttactctaatttatatgtgacccaacttgaacatctattaggtatctcatcatcatcaagaccttgacctcaaccgcgttgaccacgttatataccatcatctccggctctgatgaaatcccacaaattttgatctcccaccgactatggcttttgctctccatgtcgatcaacatccctcttgcctttttcaagaagctagattcgtgtgtcctctatttctcctgtttctctcgtttctcaatcttttgttttattctttgacatcttttctcttccccccccctttacctctcgtctttaaaccattgaaatctgtctctgcgctcagcctccgatttacgtcccaggcagctctcgtctttgtgctatacatgttggccatcgttataacttattacttccaccgtccacacgatatcgagcccgccggaccagtcaaatacttcaagtggtctcatggcgcgatcggcacgttccccgttcagatatttgcctacacgtaagtctaccctacatccttcagctcatgataatttccaatgtgactcctaccccttcatcctctgacaagtggtatctgcctctctttcttaggtgcgcgcaaaatctgttccctgtatacaatgagctgaaggaaaatacccaaaagaggatgaacattgtcatcggaactagtattgggagtgccacggtcatctatgagattattgcgctcgcgttcgtcccacccctctttccttttcgtccttcttcttcttttgtttgcgtctcggctctccaaaactaactggctgtggttcgtaatcaaccattcgtctatctcgttattcgaaatgaaattctacacacacccagaggttatcttacttttggatcgaaagtgaagtcgaacatcgtagaaatgtactcagactcgtcgttattcgtcgctctcggtaggcttggtatcgtccttatggttctattttcctatccgctccaagttcatccctgccgagccgctctcgataaagtaatctcaaccgtgtggaaagacaaggagacgctcattcaggtgcccagagaggaggaagaaggcgacgctcaggtggtagttcccagtctggagatgtctaaagttcggttcatctcgttggtcagtcgacccttcctttcctccttggtttgcttggtcaacatactgaatgctgattatcgagattccttaaccctttgccactccattatttggaaacagaccacgggaattatcctggctggtttggcaatcgccctatcagtcgatcacctcgaaactggttcgtttgtctctactttcatgctattttgctcactggaaatgtgacgctaattccgcccaatgtaactctcatctagtcttatccttcgtgggagcaaccggctcgacgaccatctcattcatccttcctggcttattctacttttctctgtttagacattcaaaagaacgttcgcccgtgttgacctgggcagcgcttggattggcgatctacggaatctgcgtcatgtgcttctgcttgacgtataacattatccaattactaaactgatcttttaactgaataaagccacagctcttccgttagatttcctctcttggagttgtatttatttagagacttcctcgtacacttgctacacttaaaaaagttctttcttgtcctccacagttattcgtagaattgcaatctcctgtttctttgtttaacatcacttcgagatgcatcttttcttgatctttgtctttgtcgtatgtccaatcaaacttatcacaggggtatacttgatttgatgtttagtcgagcgagggagaatgatagtttcgagagtggtctaagcacgtgtcgacgaacgcgtctctactctttcggccagaagcgagattctcttcctcctacttctacacacacacacacacacatctacgctcctcatctttcttcgttgcatcatgacagacttctggtgcggttttaactatgtttatatcaacactgctgcaggcaaggttcctgcccaagacaacgatgtacagaagaaattaactgttccatttctttctcttatccacaatcgattctctaggaaagccaccaagaagcactattgttcgttctctcatatcttcctttctcgtcttcctctattaacaacaaaaggttttctttattattcgatcttaatttggtaaaatctactaggcaagtactgtgatctacatataaacgatgatgcacccgtgagtgaaaacccaaagccatccttccttcatactcaattcatgagaactgacttgcatatgaactaaacgatgcctctctttcctgacggacagtccaaacaactacatgagtctggactcagacatcttggaaacaaggaacgtgctctgagggagatctacaaatctggagaaaagatgaagaaggcgaaggatgaggaggcgaaggaaatagccaagatcgaaaaagtatcgtttacttctttcagtttctcatcctcttcaaataataacactgtgctgtatcaactaaaatttcgatttgttttctcaaatatttctttccttctttctttctttttttcttcggctgcgtctctgaactttatctttccaggcagcagctgaagctcacgccctcgactctgggattcctctcgtttcatccaccgctggcggcgactcgaagaagactgaacgaccatcgaaatacgattcgtacaccacagcagctgacctgggatatgaggacccgaacgcgcatctcgtcgctgagaaagctcttcgtcagactgaaggccgagtaggtcaatgggaagccgttccactccctccaccaccaccaccaccaccccggccgacattttcggatgtcgagtccggatctgggacttctcgaactggtgcttcgacaggcgtgtttggactctcggcaagaaagcgggaagaggcggaggaagaagagaatgggcgaaatttcaaatttagacggagagaaaaacgcccggtagcttacgtagacgaagacgatgatctcggagagatcaaagtcaaagtaaaggaagaggagcgaagtttgctggacaaacagaaggaacatgaagcggcggaagcgaagcggaaagaaaagctggtatggcagccggtcggatgggggacgcggttggtggatgaaaaagaagccaagacgcaaatcaaggaggaagtgaaacaagaggacgagggcgatggttcttcctccgtcaaagccacttctttcgttgcctcatcttcgtttggcctaccactcgtttcccactccatcaaaacggacgaagatgtcaaattggacatcgctaagattgaagcggaggaaccttcgataccgcctccgtcaacgggaggaatgtttaaaaagcgacgaggtccgccaaagggagtaggcaagatcgtcaagccataaggcgagagggagattaaatagtaagagaaaaggaaagaataatctttctttcggctagccacagacactgcatgatgatatgctgtataatgtattttccttatggattcctctctcaccaggagataacattcattcagaggttcatatccagctgtgataatgcattacatgtaaaagatatccatactaccatccttttctcctcatacagtcttcgctacgacgagctccgcgggatcataggggacgtatcatccatagagactcgacatgatatgttgtacaatgtagtaggcagaagtcacgatcttttgttcatcagatcgagttgcgtaggtcagcctagggattgggcgccagagttaagagctcatacgtcgtgaccaaaagcaaaaggacgtactatctctctcgatgagcttggtctactaaccttgttggctaggctccagacattgggaattgtaatcttacgcatgagaagactatcttattcgtcgtcctcttcatcgtcatcttcgtcctcttcgatattctttcccttattcttcttcttcttttcttgaacaccctctcctatactatcctcccactctttccagtcggtcaatatactgttcacctcatcccggcatgtcttcatagcctctaataaaggcccgtaagtgcttgttggttcagccaccgctttcacctctgccttgtcagagagtggatctgaagggataggtgtcggcaaagtcggtttagctgaaggtagcggatacgacgtaatttgtttcgccgggtgtggagcagggtgaagtgggtcagatgagattgtgacttgtagtgtagcagtgattgatgtcattttcttttggtggcctgaacgaagaaagggagggataagaaaacggccagatgagggttagtactcttgcactcgacacagtctatacgggcattacgacaactgattcgttgaacttaataaaccaaagaaagtcataaagaaactgacaagcgagtatgtatgatgataatgatgatgatgatgacaatgacgatgtctgcctgttctgatgggttgatggataaattaggcgaaggttgtcgaaggtagaggaatcttctttcggccttacggttttcttcttccttccagaatcctccccattgaccttcttttgcccgtctccccatcctgaacctctctgtcctctgcctggcatagcaagcgtgcacttgtggagaaagagccgatatcacaatcgcatctagagttgtaccatctcgataagaagaacagagtccattgtggcctaatactaagcctgttcgttcttcctcatcgccatcacgtcctacacttcatccaatctaaccattttttttctttaatctattcacatcacccatacgttttctcctcctctggttccccgttatgtcttctccaccatcggacttggtagaacactaccacccagatatatcttctaggtcgccacataactctcccagcaaatacgacatgggtgagtgatgacgtaccgactaatcatgattgcagtctcttacaatcctatccttaaatttcttatattttctacagccaacgcattcgagttaacatcccctctgacaagacagaagacgccagaggagattgccactccgacccggtttgtcgatcctaaacagcctacgtacggaaaaacgctctcgtctcctttggattcgcctggcatattggccgatcaaatccaagagttcgatctacctggtcagtcaaaatcaggagaggatgaaggaatgaagatcgtcctggggtatgacaccactgttgatgctcttctagctttcaaccagtcagtatgcttcctcttcatctggagtctcgatcgacacgtcgaatggtaaactgacgtatttcaaacgacttggggacctcatcttcttttcggattctacctcatcaacagcgtcttgaataggatgtctttgcatcccaacgatcatgtctacatggctcaagttcttcctttgacatctgcctccgccagctcgtcactgttttctagtcctcaatctactcccaatacccacaccgcccaggcggtctcttacgaaggcgctcatggcgatgaggacgataccaatttgagcacactttctagtaaggatagagaactggttatcttgcgaagaatcagaaaggcgacgatggagaaactcacaaccgaaggtattaagctcttgagcaagggggtgagcatatgttctttctttttatatctttcagcatcgatgagctgggaaactggttttgctgatatctgaaagaaaccttccatggatccagtgcaaagtcactcctgtcatcgttcactcagaacagcccgccaaggcgctctgtacgcttgccgaacgtcacgatgcagatctgattgttattggtcgtcgcaagctgtccaagttgcaccgggtagtaggagctggttcggtcggaaattactgtctactccacggcggatgcaatgttctgatcgttcagaaataaccgtcaggtagccttctaataaagagcgtgctgtatctgtttccttttttgtttttgaatatatgaggatatggtcgtgtgatatccggccttgtacaatctattttgctctgtgtttttatacaaatgctccgaaccttgattataactggatatcttttcgaatacttgatcaatgcgattttgattgaaagagtgaaatgagatgatcaccgatgctgagtatatcaatgatgcctgggaaagatactgtaaaggaacctcaatagattaattctcacttttccgattaatcatatttaccatctctgaccaccatcaacactcctctccttcacagcatggtgcgtgttttctttgatttaccccagaagtcatacataccaccaagccagctccttcgttctgaatcttctccatctataatatttaactttcttcaagtcggctaagaagctcacagttgccgatcagcggaagctcatcgaccagctttccaatataaccaacgccacgtttgtcctctcgtctctcatccgttctgtctctatttcctccttccgtttttcttaatgaccctttggtcattcgatcgaaaaatcgtcatttcacctcgtgttcttgcacaattccttcgtaaaagcgcgacggattcgaatcgactcctcaagacttatagatggaaccttgaactagccatcagcggcttcttcgatgatgccctcgctcaacagaacgcagccaacaacacatctcgcttggctggaagtgcaagtgcgaaagccaagaaggatagggaaactaaacttttggcgatatttgaccagtttaagggtccgtcagatttttgtgttcctttcttcccacacgggcggatcgtgcaatctaagccttgatcgattgaacccaaaaaagagaggaaggggaagaaatgctgacgccgatcctggattctttttcctttcaataaatatatagatgagaaggaatacgcgatcaccatcgaacaggttgcggactactttgaagctatcggaataacagagatggactctgatatcgctgtctaccttgtttcgtacgagctcaagtcgccgtcaatgggtcgactgcctcagaaggaatttatcgagtcttggtctgcgctcaagttggtatcattctgattctacttttctcttgtttcaaaaacgtgagctgatggctgttactcctttttcaatagggtggattcaacagaagccatggcgaacgaggtgaagaacctccgcgcaaagtacctaactgatcccgaatatttcaagaaggtctatcgatatgtgtatgatttaggcaagcaggatggagcaaaagtcatcggttagtgaaatcttcatggagttctttctcatctaagatcacgtacttgttcagatagctgaatctgctcggatctgttgtcttgccttttcgatagtccgagatatgggtcagtccttcttctgttgggtttatggatcaaacttcttcgttctctgcacacacctgccgaactcaaggtagtgtcttcttacatcgaccatttctccgatctgtgacttcagctgtcgctctatggcaatcgctccttccgcctgtgttccagtccaacccttcagccatccagtacagcaccacaaacggcgcgcggggaatgggcgaacgtgaattcgggtggtggctcgaattcttggaggagcaaaagacgaaaggaatatcgaaagatttatggacgttggttagtcttctcttccgcatgtttgaacacccacatgaagcagatcgatgtgtactgaccctgacgaggtttgacggaccgactacaatcagttcatcgagtttgctgtcaaggtgccctacacatacgatgtatatgacgaggatggtaagttgcttgcctcatcgattaatttgttttcctcccagctgacaaaggcgcttgacgtccttcttttcgttggcatataggtgcctggccatcattactggacgagtttacggattatgcaaaaaaccgacgtaagagagaaggacttgacaatgcctgaatctgcttctcacactcgaggtttcccgtaaacaattagacctgtcaggcaagaatatcgctcttgtttctgttcttgatcaaagttctatcttccttgccttaggttttgttcaacttcatataatctatatatgttatcttgcatcgaagctgaacaataataatcgagtcgaagagacgatctggacgaccagatttgttaagagaagcgtcaaagaaagaccacaaagttttggtcactaattgcggataatatagcttgttgtttctaacgtcttttcatccaacacttctcgcttaatgttttccaaacaggagccctctcaggtttgcgaataaggtcgaaggctcagaggtatgttttgaggcactgtcccagtgataagtcgtactgggcgactcaatctctggggtgccttcagggtgagccagagagataggtgtggatgcctcaacggatgaggatggatacggatcaagcacgagagaaggtgaagagacagaaggctctgttggcatcaaagttggtttagatgtaagggaggaggtttgttctgatttcgaagctgaagatgcggaggaagactcggccaggagtagtggtaacgatgatagtatcggagaagcggcctcgggtggtgataaggcctgttttgcaagatgaggaggaaggcttcggtccaatgttgtctttgcaacaggaagagcagatggatgaggaggttgcaaaggttgtggaggggatgatgcacgaggggccggatctgaagacgaagaacgtttacctcgtttctgactttgtgcgttcgtttcttcaattccttttgtcgcaatgtctccctcaagatctgattggtcgacagacacccgggagggaatctcacctgcccggcgctgttcgtcatgatacctagctgcttgagcttctttctctagatcgagattcaaccggctcgcggctgattctcgggcctgacgaagtccaccggtgaaaccttcgaaatgtctgaaccccttgatccacaggtcgcgttcccacttttccaagtaggcgacggacgaccgagtaatctctgggtacccgatcgagaatgtctgatcaggaagaaggatctcggccggggaccagtcatgatccggatagacttctattgtaaaagctgtcaggggagtacaatcgttggctgttgataagttagtactgtgactggagttcaaagatgaataatcggtaggaattggctgatcggattcgttggcttcttgatcaccaagtcggttgttgtacggctcgtgttcgtcctcatttggttcaaaaaggttaggcagatggaagtctggctgaacaggtgcggagagcttgatgagatcgatgaatgatgggccaccgacaggtgagctgtgaaagtaggccggaagggtccctctgagccggaaacctttctgaccggtagtctcattgagagtaggcatacttccgaccggttcattcaacacagtgaacgaacactcatgaccggctataggtgggaaggctgttgaattagggtcctgcatgcgtcgttcgttaaaggcttgttaacagattatatctacgatcgaaaatggaaagagaggagaaagctgagggagtacacaccatgccaaagtgaatagtctctagcgaaccgaatctggccttgagagccttgatgaatgcgagtctgacgatgagatccgaaagctcggtccctttgaatactgttccagagagatctctcattacagctttgaaccgtctgccgtagggaagatgaatgcttctattctcctcccaagtaggatcttctttttgaaggattgtacgtagaagttgagcaatctcatcgaacgatgttggatcaccattcgcatcgacggaggagagagctgaagaaggaggctctgcaagtgtatcagtggtgttattgagtgtagtggaggaagaagaggctgcccaacgagacgaagaagagaacatgtctgcgctagatgagcctgttccttgagtcgggacaggagtatcaaagggcggagtggagagagagaaagaagaggaagagaaagatgcattgggcaaaaggcaagaaggagagctcggagctgttcgaagcactgaacgaacggtcgacgccgatctgagcatggctaacgatgagacagaaccggtggatgagaagcgtgtgtgttgtgcgtaatacgaaaacgattgaaggatttctagacaaaaaagaaaaggcgttgccaggggtgtgacaaaagttgcagggtttgtaggcggaaggaattgctagtagacaacctgcgacgggtcattaggaatccaagcaaataactcttgtcttcattacagttgagttct

SEQ ID NO: 2580 - DNA, 12773 bp, Xanthophyllomyces dendrorhous
  misc_feature (1571)..(1610): n is a, c, g, or t
ctttttctctaacaatccctttcccaagctctgcttccctctgttcaaactctcttagcttcctatcctttctcgtccccatggtctcgtgtgcacagtagcaagccgtttctgactctggctctggtacagggagtcagttgcccgaggagggtcagacatctagaggattggagttgcgtccaagtggtgactttcaaataactagaataagaagcttgctaaatttatcagaccatgagcctggcttaagctgcttccagaaactatcaataccaccaaggacatgatgaagtactttgttgtcaacccacctgacgactttgttgagtgggaacgctaaattgaatttcatttccttgtcataataaggggtgaggcctggcagaagcagagaccaatggcactgagggcgcaaatgaaagaggataacatcagaacattctctcaagacggttccctgacaaccgatcatgtcactcatgccgacagttcgaacatgtcatagccgaacgttgaaaccaaaggatcaatggtggatgttagaggaacaatactcacaattattgaggagataatatgactgacaacaagccttctggcgaaaatactcatgaaaacgttgctgtatcaaatgaagcatccatctgctctgttcaacacaaagaaagtgtctttcaagtgataccgagaaatgtggatagcgcaaaagaagactacgaaatataatttgactctggttgttctaaatcaatctttagcagcaagagctggttcagtccagacacacatcgtctggcgagaaaacagatcatcctcggtgacggaaactcgatctggtcgactagagtgggagatgtcgaactgtcaacagcgactgatacaatcatcatcaagcactatcttcatgtcccagagatcgcaggcaacctgctttcggtctctcaactggacgacgaagggtacagcgctgagttcagcaacagcacatgcatcatcagctaagagggaagaaacatactcaccataccgaaagaacacaagatgtttgcaatcgtgctcgaatgacaaggagcaatgggagcagcggaagcaatggagtcctcagaaatacaagaagtataacaagtacaagagatactgcagtaaaacaaaaaggttcgccgatcaatctgatgaccgcgcacagacggatgggacacatcaacattgacgccatcagacggacagaaaaggcagacaacggactcactctccacctggagacaagaagctcagatgcgaggcatgcaacgtcggaaaggcaaagcggtcgtcgttcaagccgactggaacggtctacacaaaaccagacgaccaacccgcacactcccaagcagaacggcgaggcagaaagagctgtgcgcaccatcaaggatggcacacgcaccatgcttgctgatgccggactgcccaaggagttctggggactggccgccaaggcgtttgtgttcaccagaaacaagttctgagtgcagaaagtacaaggtatacctgaagagcgctggacgggcaagaaagtagacgtcagnnnnnnnnnnnnnnnnnnnnnnnnnnnnnnnnnnnnnnnngatcgactaacgtgatggaagacagcgggatcccgttcgatcagccgtggacagcagtctcggctgtgagagaaatgactccagttgcaaccacccggcatcagccgacctatccttctgcgcatccttcgctctatcctcccaatcgatatactcctgttccccatccagtcaaggcgaaaagtcctgatgcaggtagccaggatgatggatctaatggatctgatgagtctgactcggattatcacaatcaagaagaggaggaggagtaagatgaagtagaggaggaggacgatgatgttgaagaacgggagggaaaagaggaagggcgagacaatgttgttgaggatcaagtcgttggagttgcagaagaaaatgcagctgacaacaatgtggaagaagaaagtgaggctgttcaagaggaagaggaagaagatcaaagtccgatcgaaacagaggtagtgtcagcagatgagtcagactcggaaagcaccgccatctatgaacctcgaacgactagaatagtgcctactgatgttatagttccaattcaaacagactcaatgatggaacctactttggttgttgctggatctgttgttgaacaagaaaaggcaacagaaaacgtaccagaagacattgcaatcagtagatcagtcacttggattccagaaaagagctatactccgattccgatcgaagtgcctggaaagtacaggaacagactcattggaacagccagcgcgccagtactttgaaggagctctcggacacctgttccggtgcggagatactcgagttctggtccaggacatggaagactggcaatgggatctgttgaatagaaaagacggaagaggtagaagaataacccaacgtcctccactcgttacctagacgacgaaagctacagtgtatgtacagatcgtcacgttcaacatcacaattcaacgcaggctgcaaaacctcaacatatactacaaaccctcgacatgaacggcttgaaacacaacaaagactgctttaaacccacattcaaagctgaagaatattactgaaataaaagggtgaaaatggacttttcgttctggcacttgttcccaatcaagtcctcactggtttcccaaaccatatacacaccacccaggtgtttcagtaaaatggattgagaaaccaggaaaacagaaagggaacctgctagaaaatttatagcttttcggagagagaggcttgggactccgcgcaaatagaggcaggcagatgatgtctcaagaagaaacatcaaatgacagatgaaattatgtcaagactgctgaaactccaacagcgaagatgctcaaccacaagaacatagtaggttacaccacttgctgattgtcaacagcctggctagctcaatggtagggcgtcagacttctaatctgaaggctgcgggttcgagtcccgcgtcgggttcttactttttgctaatttgtatacataataacttcaattccttccatggtctatctttttcggtgctgctttgctctagagaacatttgacaacaagttttgaagttagagcaaagagtacacagagtatgacttggatttgttgctcaatagagaataatctatcgagagggtagcacatgtttattctagtcaagagggtataaagagagacgtgttatatacatactaccggatctagagcagtctaaagcaacaaccggggtttgacaagacattatccgaatgatgacgaagatgaatagacacaaataagagatatgtagcagttgggatttggtggttgttcttcgtggtgaaacagagagaaagactgtgtatgagtgatggacttaagtcaatgaaaccatgccacatgtgtatgatgttcagaaacaggatgccagacgtcagtcaaggagcctctagagaacatcatccaatattctgacaaacaactatctgatgcaaaaaacacacctgaacctaattctttcgaacagcggcatcttttttcttcttgcctaatcctccccaactttctcgaacgagaaggaacattgctgttgagcaaacgacgtcctttagctgatcggcactaaggaatccactatcatttataccttccactgggaagggattcattgggtatggcattcgaagttgggcgaggactagaggcaagggaaaaaatcagttagatgttgcgaaatagctcaactcattttcaaacaaaggagtactaaggtggagaaaccactaactcttgggatggtgcggcgcggggctgagcttacccaggagtattctatcagtacttaaccctgagtttccaataccagctccatttgagattgcatggaccgaggaaattcgtgtgatatagcataaccaaggggtctccgaatcctctggatcatcgtcttcgtcttcatcttctgcttcggcaggttcacttttgtcatcatctagagggcttgataagggtctacctcggtttgagctcggtgattcaggaacctgtagattcacctcgcccttgggcgagggagtgacattcgagcgcaagctgctggaatacgggcggagggcatttgatgcacctggtagattcacacgattgggagaggaggacggacgctcggtttgtgatgataccctacggggaggagtagctggcccagctgagctttgtgagggaagcgatgcagcaatattggaagctgatactcgtcgggtcgaagtgggtcgagagttgcaatcagcggagagtttatcagtagatgaagatcgtcctcggacccattcgaatcggacaagggataccggtttgagagaacggggatctggattattggcgggcgggcggatagaaaatgaagtatcgctgggtgaaggaataggagagtgagaaaaagaaggtagggtgtttgagatggcggcaaaagaccagacgtctcctggtgtggcccacttgctgactatccagctatgttaagccggtacataaacgagggttcgatcatttcagtttgaataacatctatactatggaattcaaagctaaagtacaaacgttattgaggtcttacatatatgcagatggtcttccgcttgtcttcatcccttcgagcggaggtttaactatcggactcgtaccaagtgtgggggcaccgagatatggcgcccttttattggaccctcctccaacgactgcttcattcactgcctctgtgacggcggctgatagcggagccgtgaacgatgacctggacgacctagctctttgttcgctgctcgttctaggctccttttctccaagagagaaggatgaaaaaaaattacccgagctactaactgctcgctcacctcctgctctaggcccattctttgaaggggtctttctgaaaagtttccctaggaaccgcttggtcgttcctccgttttcttgcattccaagtggaccccggttcagctcgtcaagcgcaccagccgagagtgtcgactcgagagatattcggggtgacccagtgtctgagggtgaggtcgatagcttccgggtggaggttagttgaggtgaagctggatagactgcaagcgacgtggacgagagcggctggtattgcagggtattggacgaaggaagtggaggccaatgctcgatgggctcaagagatccaaaagaggatatctccagattgcgcttgaaaaactagatgaacgatatttagaaatcaagaacgagatttgatgcacatcacccttgagaaaaactggaaatatttactcttgctactttggcatcagttccagcatccgactgttatgcacacaacaaagagtcagtatctagagaagcttgagaaaaaacaagcagatagacttactatgttgcatgcgatgaccgtctgaaggcgaaaaaaagttgagcatggtagcccatcatagttagcgaaaaaggtcaatacatcaaggaaagcgagcagacctacatggcagttgaggttgtagagcggaacaattctcttcaaacctgatgaacctccgatagtacctgatgtgctggtgctgatcacgctgttggtactcttgacactcggacttcggctaagggcatgatcttctggtgtctcgagctcctcgacatcgtttgaatttgggtcagtgggtggatactcaccagcaggcgttgtggcatcatgggaagacaatcggtgggattgaacggatggggcggtagattggcgggaagtgataggatatagggagtttatctgatgaagagcacaaacccattgagtttgttcagaaaaatgtcttgcaaacgagatagaaaactaggacaacgtaaataagaataggaacaagacgagaactaacacttgttcggcgggggttgggcgtaggtggtgacggagcgactagttggcactggaagtttagaggatgggctttgctcgtgggaggcggtcgtacaaaaatcaatgtctggagaacaaacataaacatgcggaccgaagccgaccagatgactcgtcagcgggtttcaggctgacaaatacaaaacatgtacggcgaagggaggaaatctacctcaaacgctgccggcttacgtgcttttttcttactgcccgagccaccatcctttcgagcgatagattgttggctcggaccggaaggcgagcagagatcagaagtagatacccggttgggagcctgaaaggactgatcatggttagagagctggctatgagaggtcgaaagtgaagttgaggtcgacgttctcgagggtggttgagagccagagcgacggggctgacgactatcaagaatctctccttcatcactggtcgagtgcgaggaaatacctggggacgtgtttggacttgtgctaacactggtacttgtattcgtgctcgccccgctggtgagaccatgattggcgatgttgttcccgggccgagggacgacgggtgcggttggtggccgaggcaccgttgttgtgccggtaacaaagctgaggaagccagacattgtaagcggacacgagctgtgtgtatgtgtgtgtatgtgtgcgtgatgttcgacgtggttactttcggataagctctgaatgtgtacaggtgtcgaacaaaaaagaagataaagtttaacgaggggaagaaacggaagatagatgatggatcgagttagggaacaggacaacggaaggaaaagatggtgggatgcgagacgaaacaaaacacctacccagagaattcgtcacacgcttgacaacgacacggcagactcaagaagggagcgagaaagttatattgtagaggtacacaggtatttagtggacagaagagacacaacgtagaagagacacagccaagaaaagagatacacagtgacaaacaaacactcgatggtacttacctcactgtaaaaagtgggctcacttccccgcaggcttgagggaaaggagaagaaagatcggctacggccttgctcgcttccgacccggccttccctcgtttttctctccgaggctctcgcccttcgacgcgtcaacgtgtttgactatatgcgctcttacgctgttttgagtagatgactactatgatattactagactactcaaaactgtcatggctcatccatataacaacagcgagagttgaattacagcccgtcctaataaaccattacaccgggatatagacacggaaaaacacacagatacatgtatcattcttggtcaataacaatgacatttttaggccttagcacactcggatcgtttcttacgtcattatctcatcggaccatctcggaagatgattgttacatttaccccgaggttacgagtgacattttgatcgtcaactggccttgttccgcacctcccttcagtcatcaccctctgctgatggaaagttggaagaagaacatctaatacattccatgaccactcacaagaacttatctacactcgtccatatccccgacagctcaaccataggaaaacaccagacattacttaagagagtcgctaaacatagggcacgcagggcagatctgctgataccgtcttctcgttcacttcccaagcccatctcccctccggcctctacgccctcatcgaaagatcaagtggacgagatttcattagtctctctgcacgttcctcaggcaaaaagagcaaaatatgaggcatactatccaacatattcttgggaagaagagactattcggaatgatcttccagccaggtatgcccttagcggcgagtggggaggcaactttatctatggagccgacgaagccgagagatgtgacgagtaagtgcacgaggcctggatgttttattttattctatctttcatatgtatgttgtgctcaatcaacgccttttccttgcttttcttagatatccgcggcaaaaaaagttgcttcatttaaaaaaagagcaacttgatcatgtatcacatccaccctactggctctctcttcctctacccaagctttcgtcttctcctcgtctgcctcaaacttcctctctcaatcaagtcctactctcttctctcgctccttccaaatttgactcgatcctgattgatccgcctccgtctcttttgtgggaggaaattgtctctcttcccatccgccagttatcggccgatccttcctttgtctttctctgggttggctccggaaatcaggatggactcgagaaaggcagagaggctctcgccacttgggggttcagaagatgcgaagagattgtctgggtaaagtcaaataggtgtcaggcacccggttccggggtgagattttctctaataatatatggctcctaatttatctacttgttccttcctgatggctaaatcgtattcatcacctgaaccacaatttcaagcacgatccgcctacgtcgtccattttcgtcaacacaaaagagcatattctaatgggcatcaaaggtactgttcgtagagcaacggacggttggtatgttcacaccaacgtatgttcattgtcagttgtttatcccaatcttcttggtcttctttgtcttgttgaatcaactacgtcccttctttgtttcaggtggacacagacgtcattgtttgggagcctctgcaggtcaattcatctacgaaaccacctgagatacataccctggtagaaaacttctgtatgggcaccaggaggttggatctgtttggtaccgaatcccaagcaaggccaggctgggttgtcgccggctttgacacccctgggattgaaaaaactatctcggcctttgatagagaaacgtgggagacagccgccaaaattgatggcaagtttgttgtacccaccacagctggtgcgtctctctgcgctgcatttctgagaggatattgtgtagattcacaagaaccagtgtctcatcttgtttctttgatatttttctacaaatagaggttgaaaatctacgtccaaaatcgccaacccggacaaacaacagagataaaggcgctccgtctgggacgaattcgcagcaaccctggtactctcaatcaagaacggggataccaaacgccggatgtatccgaccgatagataatacaggtatcatctatcagccaggtggaacggcatcaattggattctttccggaccaaccaatgccatctaacataagtgggctccccaatatggctatgagtccaggtgaccatatgaggatggacatgaatatgggtatgccaggcatgggattggacacggcgatcggatcatcgggcatgaacatcagaatgaactcaggaagtcagcaagggttctctcaccctctctaccttcaacaacaacaacagcagttggcctttccttcagcaccttttcaccagtcgctcggcttcaatccactatacgccacttctctaggccagggtggaggtatatatggtagcgtagtgccaggtttagcattcagccagaatagagacttaagctctgaccagactcagcaaacgcaactgatgatgatgctcatgttgcagcaacaacaacaacaacaacaacgatgatagatgagtgcgttgctctatttcgtctatctttcgattgaacagataagctgattttcttctttcttgcctaattgtttgttatcgtggcactgttgggaaaactataacgacatttttggatttgttcgaagagatgcgctatcccagctgatcagacgatgacctcgaagacggataacttatatctcaatttattcgtatgaactcatcatcgtgagcgtataagcgacgaatagtttgttcatctcaaaattctaaaccgaaaccgacacactctcatcgatgttctacattgtcgtggcaatcaaagaatcatttaatatgatagtgaaagataagaaatctataagaatatatggaggacgcaagacgtgttgagacataaataaccgccacagcgagtgtcgctcgagaaatcgtgtggtcgatgatgatgtagatggctgtgtacctgcaaaacagataccttgaaatcaccaagctgacctatctctgcagtttttccggtcccttccttctttatactaaatatcactgaacaagcttcatttgacaaagaaagaatgactgagtactgcgctggctgtcagaccgctgtgtattttgcagagaagatcacaggtccaggtcgaagggtgagtattcaaagaaccatgttatctatcgctcgcccctaaaatcactatcttaccacatccgatccgcatccacatgctcatacctgaatttgatcattctctttgaggagtctagtcttatcataagccttgtttgaaatgtatgagctgcaagaaacgactggactcgcatctgctggttgaacacgacgaagaggtgaggttctacacttttcatttccctaaattgtctttctcttccttttgcactcttgtattgacctgatgtcaattgagggacttgaagccctactgcaaaggatgccacgttaaactgttcgggtgcgtgattagtatttggattgctggggctaactctgatcttgaatactccatcctgctgattcagttacatttttctatattggccgtcaactagaactcgagatcttcgacaagcaaaccatccttatactactgccccttctcccttgtcctcgcccattaagcctgcttctatgaaaaccccttctatctcatccgccccacctcctttttctcactcgtacttgccttccacacaacctcagcctagacctcctcttcccagcacgccaaaacctacgtcctatacttcctatctttcttctcgaacctcacctgttattcaacaaacgacagaaactaaactggagactggggcatctcttcatatggattcataccgaagagagtttcagccagctaaggagcggagtacagctagcttggcagtcagcagtcagacaaatagtccggggatggcaagaagagaatggagagtagaaagtgcaacggacaaatgcgcaggttgtagtaaggctgtggtaagtaatctcattactctcgagtgaacaatcggccaagtacttatacagtcaaatcctaactcatcttcggggattctggcattccttttcttctcgttttcttagtactttgctgaacaggtgaatgaattggtcaaattttggagagacatggtgacgacctatctgaccatcctgctcatctgccctatctataactaggttgtagcgctgggttcgaagtttgtctgtccatattgattttttgcgatggctaaggaatggttaaagttgacattttaccgcgtctttctcgttcctttcaggtggcacaaaggctgcttgcgttgcgtacgtcgattctcttccggttagaactaggttcagaattatggtcaactcactctcgctccctatcacagttcaaatgctccactacgcttcctccgtcaaaggtcgctgatcatgagggacaggttgtttgcgcaaaatgccatgcctcagtcagtgcccgtgatttattagcatttgctctttctatgttcattaagcgtcttacttatcttcacgcttgtctggttgtcggtgattactttagaactttggaggaggatatgctatcaagtgagggattgggttacgccgtttcgaaggtccattctggcgcccatgtgttgatctgtggatatccatctacacatgtctgcttgtttgtgttgaaaatctgtctacatgttgtccatgcaacccaacgacaaatgaggttgtgtttatacatatggataatgtcgaacgtactctgcgagtatcttgtgcagaatagtactcttccaaattattgaagaatcactttaaggtcttgtgttcaagtcttcaaatcgatcaatttcacgagctcagaaacccgtattttcttcaaaaacaaactcttcagcctaatgatcttggcgaatgaaccaacatatggagatggtaagtcgcagaacatgcaatgaagagaaaaaaagtaagaacccgacgcgggactcgaacccgcagccttcagattagaagtctgacgccctaccattgagctagccaggctgttgatactgaaacttggccttgttttttattacgttgattgtgcttagcaatttttgggatttcagcagtcttgacataatttcatctgtcatttgatgtttcttcttgagacatcatctgcctgcctctatttgcgcggagtcccaagcctctctctccgaagagctataaattttctagcaggttccctttctgttttcctggtttctcaatccattttactgaaacacctgggtggtgtgtattgaatatagcagtctataataaaatggggagctctttgggatatattatcggtgaagtcacttgaacgagagtccggttcttctctcagactatattttctggtctctggccctctcaaactgatatctatcctgatcctctcgattgtttctttgagacgatcgattctccttaaataaacctaactctaattctaattctaattctctcaatcaacttgctcactttgtgtgtgtatcagtttgagggaatcagtttgagagaactagtaatcgggtctatctattgagaaaacctttctag

SEQ ID NO: 2581 - DNA, 336 bp, Xanthophyllomyces dendrorhous
tcaacgagagaaacaccattgaggcattcggaaactggaagtacattgttgtctgtatgactccaccattagaatatcacaaagtgctccctaattttatcatttcttgttacttagtttcatttatttctagtttcatacaacatcatatattcaatcaacttgctcactgtgtgtgtgtacaattgtttgagggaatcagggaatcagaattagagaattagaactaggatcagtcttatccaaggagaatcagttgtctcaaacaaacaatcaagaagatcaggatagattccaatctcagagaactagagatcagaaacttagtctgagaga

SEQ ID NO: 2582 - DNA, 301 bp, Xanthophyllomyces dendrorhous
tagtctgagagaagaatcggttggcattcaagtgtttttcaacaagtcggtttccccaccaagtgctccctattttattatacacgacgtcgttcgaccggttgcgcgcccttcgctcggtccacctgctcgaaggacccggcggcgagctcaagctgttccagaagctgatggccactcggatcgatgtcacgaaggatatccagccccagcttgacgtgtttgtcaagatcgtcagcgacatcagaaggatcggaggtgagctcaagcagtttgaccagatcggcggcttcatgcttct

SEQ ID NO: 2583 - DNA, 483 bp, Xanthophyllomyces dendrorhous
  misc_feature (88)..(97): n is a, c, g, or t
ttactttattttagtttctcaggttcgtttataaatgtagcatttaccataactgtttcgttggtgctgagattactttatcttaatnnnnnnnnnnttgtcattagattactttattttagtttctcaggttcgtttataaatgtagcgtttaccataactgtctcgttggtgctgagattactttatcttaatttctcagcaatacgaaaccgtgtttgccgttagattaagagtatgactaactctactgctacagatatgtcttccgatgtcaagccagccgagcccactgatgcagagccgtcgagtgtgccgctatacaccaagctgtccgaggcgtcgtttgccaacttcgagaaccttcaccctccgaaccatcctgccaacgactacggtgtctgggagagccgactccggtttgctcttcgagacatgaagctctggacgatcgtcactggtgagaggccacggccatctgcc

SEQ ID NO: 2584 - DNA, 1244 bp, Xanthophyllomyces dendrorhous
attactttatcttaatttctcagcaacacgaaaccgtatttgccgttaggtgcagctggccgctcttgacagaggcgatggcgccttggttgtctgagcgtgtgagaacagtgggcacggtgaagccgagctgttcgagaagctgccggacccagatgagctgagatgcaccgttggacaaggcaatgtactcggactcccaggacgacttggtgatcgaggggatcttctttgacttccagtacacgaccaagccaaagacatagatgagaacaccggtgacagacttccggttctccttgtcgccaacatgatcagagtccgtgtagagctcgatgatgggcctctctcgttcgaatccaatggtgagggtgaaatgcttggtgcatgccaagtaggcaagtactcgaagagcggcctccatatggacttgtccaggattggagcagaagcgagcgagtactcccactgagtaggcgagatcgtaccgggtgcacgccacaaggtatgtgaggcagccgacgagttcttggtatcgcttcctgagcttctcgtctggtgtcgacggcatgtctgactcccacagctggagatcaggcggcatcgggatccggcggggtgcgatcgaagtggatccgaaccggtcgagtacctcatcgatgtaggcctgctgggagatggatatgatgtgttgtttgcggttcctagtgaactgcatgccgagcagctggcctgggttgagatcgcctcggtcgtcgacttcgaactcgcgcttgatgtcttcgaacacatcggccacatcgtcggcagcaccggcgactacaaagtcgtcagcatagatcatgagcatcactcgtctgttccgacgtttgccgaggaagatgcacttgtcggcctcgatagggatgagtccgatggtagcaagatgggcggcgatccggtcgtagaaggctttgggcgactgacgaaggccgtagatggcgttcgtaacgtagcacaggtcgtctgggtctggtgtgtagcctggtggaggcttcatccagatgggatcgtccagtttggcatagaggaacgcggtattgacgtcgccttgacggatcgtcaggttctcgtgtgcgacaatggaaaggaagatgcgccgggatgtgccgtcagccacgggagagtatgtgtctccgaacgtgccttcgcgctgctcgaaccaccgggcgacccatctggccttgaacttggcctcgtgactg

SEQ ID NO: 2585 - DNA, 504 bp, Xanthophyllomyces dendrorhous
taccagcagcaggaagtgtcttggactgactgtagttgtcctggccgtactgatgtgcagttcgcatggtccagtcctctgcgaagatgacgttccgggagtatatgaccttctggacgttccgcttatggacgagacggtaggcctgcttgccaaagctatcctcggacgggctgatgaaccagcacggggtcgactttgactggtgcttcttgtgttttggattgtgtgcaaaagcagtgcagccaaagacatggatccgatcgtatgttgcaggtcggccatgccagtgttcatagcgggtcttgccagtcgatggtcgcacggtccgagcgagaacatagagtgcatatgtcaacgcttcggcccagaacgagccaggaaggccgtactccatgagaagggcggtgatcttctcctcgatcgtccggttcgtccgttcggccttaccattctgctggggagtgtcagggatggacggctgctgagtgatgccgagagagg

SEQ ID NO: 2586 - DNA, 553 bp, Xanthophyllomyces dendrorhous
ctgttcgaccgagtcttgccttcggttgccttggggttgtatgatcgaggttgtttcgggcagtcagccgcgtagtgagacgactggccgcagtacagacaatggaccatcggtggagtcactgccatggccgagtgaggctgctggttctggcagctcgccatcgctgttgactgtatgtccttgttgtccaggattcgatcggccacaaagtcaagagtgagcggcctggggttccgtgagcgtctgtgccgacctgggcctgtatattggataccagagtctcgccgtggatggtcttcggtaataaaattagggagcactttgtgatattctaatggtggagtcatacagacaacaatgtacttccagtttccgaatgcctcaatggtgtttctctcgttgaactagaaaggttttctcaatagatagacccgattactagttctctcaaactgattccctcaaactgatacacacacaaagtgagcaagttgattgagagaaccagaaagaagaaggaaaaagaaaataaactagctactgtatatac

SEQ ID NO: 2587 - DNA, 917 bp, Xanthophyllomyces dendrorhous
atgttgaaggagaaagcaaagagatagaaaagtgaaccaactcgcatcactttacggttgatgtctagactgctatatccaatactcccactcagtcgacgatatcaaacggaaaaaggaacgaaaggaaacgaaaaagaatgaaaagaaacgagaaagaaacgaaagagatcggaggaacgacgcaagagatgtcgaggaataagttcgagaccaatcgcggaaaataaacgagtgaataaaatcaaaaaatcaagcaagaaagagatgaggaaataaaccaggacgaaaacaagaacaggaagatgagaatttagtagtaaaaagaacagaaagaacagaaagaaccggatggaatcggaaagagaacaccaaaagatccttgtctggtcgacaaagagcaaagattgaggatgcaaagtggtgagcttttctggactgggctggaaaacaaacaaaaattgacttggagaatatcttcccttttcaccctgtttcctttcttccctcagatcaacacaagtcccccaccgacatcttatctcccaccgtctcccactatctcccactatctcccactgtctcccgccacctttccagctgcctgcctcatcatcttcttctcccgtctcctttcagccctcagcctcaggatctcctctcggtctctctcggtgtcggtctcggtctctcccatctgatgaggtatgtcttctcccactggaacggctatctcgccgtcgaggcccatcgctgacctgaacttctcgtgtttctcccgtggcagtgcttttgtcccgatgtcggccaccatgtcgtccgttcggatcccgacgactcggatggtcccttcctcgaccttctctcggataaagtgatagcgtacgtggatgtgtttcgatctggaatgggtgtct

SEQ ID NO: 2588 - DNA, 490 bp, Xanthophyllomyces dendrorhous
tcgatctggaatgggtgtctggattgttggctaacgcgatcgctccctgattgtcttcgtagatccgagtcggctccatcgtcgtcacgtcgagtgttcctgtcggatcggccatgaaagcaagcacttcccgcaaccagccgacttccttcgctgccatagtaagtgccacgtattccgcttcgcatgtcgatagcactaccatcgcttgcttctttgacgcccagctgaccgctcctccgtttaccatcgccacataggacgagtgacaccttctatcatccacaactgaagcatagtctgcatcggaatacacagcaagtgagtgtacggctgttccataggtcagcgaaagagctttggtggacttagcataggtcagtactctctgcagagctttccagtgtcttggtcctgggttggacgagaacgatgccagtctggacacggagtatgcgaggtccggcctggtgaccatggtgagccaaag

SEQ ID NO: 2589 - DNA, 1817 bp, Xanthophyllomyces dendrorhous
agtgagccgagaaggctgacatacggcttgtccttcatttcttcctcctcctcagcgttcttcggtgacatctcctttgagagatcgacagacaccatgccgggtgtccacacagggtatgtctccctgtcttcgaacttcttgaccatctcttcgatgtatggtagctgatcgatgctgaccgtgcgtttggttctgtccctggtgactctgagtcccaaacagaaggccatctcgcccatgtccttcatggtgaagtgagactcgagttccttctttacatttcccaacaatcggccacccttttcggcaaacaaaccgagatcaacaacatatactgctagatgaagttgttctccatcttttcgaagcacatagtgtccgtgttgaaattacacagccgcgttcaacgacaccgcatccaggtcacgtctcatgtggcgggcctggccacactgcccggctcactgcccaactcactgcctagtccgtcaagtgaccatactttgccgaccacatttctttctttcctgttcatcgtcaagtccatgtgttttgcacagcttgccgatggtccgtttctcaccgaatgtcgccgttcacatgatcgctttcggccggaataactccgcccatccttcccggagtgcactcagacctgcaccatcatgaccgcacagctgtgctctatcgtcccatatcgttatctcatatcctgtactttttcggctttccttcgcattgactcggctccaccagccagcttgctgtatatgacttcttccttcttcctatctccttcttgcacctcagtcgtcaccagaactacagtctggtatactgagtcattcgttctgtatttactctcgacagaactcttaatcatattagattaagagtctgagtactctacgagctaacatgccagatcccattctttccacagtgggagtggaatcgacaccttctgaggtctcactttatcgagaactcagaagcaacacactcagtaatattatccccctaccagccccacatacttcacaagtcaactacaagatgtgggaacgccgcctggaatcggctctgttcgagatgcgtttgtgggatctcgtttctggagtacgatccagaccaaacgtggcgtatcccaaggcacaagctgcctgggatcttgacgaccaaatcgcacgcaacttcatcatatctgttctcacagactcggagggagagcgcataagtgagtgtctaacagctcacaaacagatcgaagtccttcgatctgttcatatgcaacaaggcaccgtcggtgtttttcaggttctcagctccgtctggaatatacgctccgagacggctccgagtcttcaaagccatgtcgaccatatcggtcgacaacttcatttgactgaacagatcgccggcaaaaccatgacatacaatgaactctatgctctcattcttatccgatctttacccactaccgctcacggacaatccttcgtggccagcttacctgctttggcaggcaatgatgctttgggtcatcccaacccattaacatatgaattcgtttctggagccatcctccgcgacaagcaacttcggaacacaaccagggcacttcacaatagccgtgagtcaacctctgcacttgctgtcactccttccagtccacaatgttcgtactgtggggactttggccactttgccaaagcctgcccagacaatcccatctcacagactggaaggaagagtgacagtaagtacaaagccaagaaattctgcgacttccacaagtcttccggtcacaatac

SEQ ID NO: 2590 - DNA, 1061 bp, Xanthophyllomyces dendrorhous
tcagaatgttacgcaagagatcgacttggttcaggcaaagggacacctcgtccccaagcaaactccttgtcggctcgagatcctgacgagaatgaccaaacgtacgctcattctatcattccacagaatttgtatccctcgttcaccttccttcttgactctggttgcacacagacttgtgtcagcgacagatccctcttcagcacttacgagacctactccgacgagctcttcgtcgcgaacggtgcttctctgagtgtcgtcgggaaaggaacggtgaaggtggttagcaagtcctctgtggatggtcaggatatcgatgttttattgagtaatgtttggcatgttccaaaactatcatctaccattctcgtttcgcttggtcagatatgcgacgttgatggtatcaccttcagtggaaacaagaaatagatcttgatcagtaatcgttctggtgtcattctcactgcctctgcgtacagcaagaatctttgggctttggatgtcacagtccgaaccccgaatcttgctgcctcgctggtttcagaacgaactgagaaagaaatcgacttgttacaccggaggatgggacatgcttctcttacttctatgaaatctctcatgacatgttctggtttctacaagacaaaggtgacaccggaagatctgaaacactactttgatagaggcatatgtgcaccctgtgtcgaatccaggcagcacaaaacaccctatccgacatcaaacacagtccatctctcaaccactccaactcattcacaccgatattgatggtcccatgcctcatgtgtccttcggtggagcacgctacatgctcaccatcatcgacgagttcactgcttaccattgggcctggtcggtccatcaagctcaaaagcgatacggcatccatcatcaaagattggatcgcaaaagtggaaagagagaccgtttacaaggtcaagacaattcgtagtgacaatggaggtgaatatctttcaaacgactttgtctcgtggctcgaaaccaaaggtatcaaacaagaaacatcgatagcagga

SEQ ID NO: 2591 - DNA, 709 bp, Xanthophyllomyces dendrorhous
ctccccaacagaacggaaaagcagagagagcaaacagaacgatcgaagaaaagatcactgctcttcttgtcgagtccggtttgccaggttctttctgggcagaagctcttgtctatgctatctacatacttgcccgcaccgttcgcaaggcgagcgggcggacaagatatgaagagtggtttggaaaaccacctacctttgaccgacttcgtgtttttggctgtactgcatatgcgcacaacccgaaacatagaaaacacgagtcaaagtcagtttcttgtttgttccttgccccatcagaagacacatttggaaagaaggcttaccgcttagttgacaagcagacccttcgaaaaatcatctactcccgagacgtcgtcttcgacgaagcttggacaaaacgatcagaagcggaagctcatcacagttcccagtcagacaaagatgtcgattgcaagtccaatcgaacgtcgtccaatccatatgagaaacacagtgcctgactcatatctgactcaggatacactcgatgatgagcaatcgcctatgacggatgagatccaagcagacacggaagtagaaactattgaacaagacgcagaacatcagtttgtgcagtctgaagatgaagaagaaattccagaacaagaatgtcaagaaatgcgagacttacgccgatcacctgtacatgaacgagtttctccgccgc

SEQ ID NO: 2592 - DNA, 3747 bp, Xanthophyllomyces dendrorhous
gtcaatgcgaaggaaagccgaaaaagcacaggatatgagataacgatatgggacgatagagcacagctgtgcggtcatgatggtgcaggtctgagtgcactccgggaaggatgggcggagttattccggccgaaagcgatcatgtgaacggcgacattcggcgagaaacggaccatcggcaagctgtgcagatttgtggatgtagcagtctaatcatcaaccaccgagttttgcgagttggttcacttttctatcttgtcggtttctccttcagcatgttatttcacttccctctcgtcctatttcttgtccgttcagttttatttccattctactttatttctatctcatttctgtattggtgatgttgtatatacaggacttgatttgtttttttatattcatttattccttctggtttgtctctatcaagatactcactttatgtgtgtacatttggtcgaaaaatcagttgttcaaaaatatcaggattgatcaattgtatcgtcaacttcagaaaccaaggaatgatgtttgtgtcgtgcatacaccgtcttccccaaattcgatatcatcatgtggtttgtgattccagcattatccctcgagcgtctctattgtcgtataccttttcattatttgcttcactgaatgatcgtgctctgcttttttttgaccagttcatctctgacggacactttttctttaatttttctttttctattctaactttgtacttccgttatcctggcctttgagtcctttttttaaacctggaatatagtcattacatacatatcgtgaatgtggggaaaatcttctaaagatgcaaaccgacttcaaataaggttctgtctgaagcaggtttttcaatcttccactcaaaatgaattgcggcgtgtgtcaagatcaaaacttcaaaagaaatgtcatcaatcaagtgatctgtcaggactgcgaattcatcatatcgtgaagagagtcataagaacaaaatttccgaatgcttttctcgatgtggagttttcaagaaggtatcatcgaattgtcaagatcttcaactctttttacaatgtttgtgtttatgagatataatttctttctcagaccttgagcttttctttatgaaccggcttgatccgcatccgtcaccatttcgtagtccaagagtcatgttttcatcaactcgatagaaagtatttcgttttgaagctttgttcattgtattgagttcaggattaacacgcacaacgatatcatttttacaagttctattatcaacactaatcccatgtggtatgtgttttttaaacgagatatgtgtcatgattctctgattctagttgcttaattatgaagtcggacgtcagtgggcagtgatttatccgttttcatgttttcttcccattgcatattcatcaatcttttaatttctatgaaatttgccatccgaacatcagtcggctctgttcatgtggactcggcagaaaactttcagctcaatgaactgttaaaaactgaacgatgtcgtctatcaatctgatttattggcattttgttgtaaatgtgtgaatacagattgaattccaaaactaatattctctataagttcactccttgatctacatgcctcattgctgttcaaatcttgcctccagataaaaatgataagctcatatttgaaatttattcatctcgtttatatgtcaatatctattttgtgacaccaactgggaattcgtcaaatgtatatttcaattttgatcataggtgaaacttgaggtcgatcaacagcttgatgtcataaaaccatgcaattatcatgctcttattatacaggctgaatcagatgtgctgaatttgacgtagctagttggacttctatcactccaactcattccgtatacgggaaatcagctacattccattgatgtcagacattgtgtgatttgtggacccagtactcattcagagcagatgtccagcagcactcatgctctataagtggtgcaaaattttcgattcaatttaagggcttacaacaggagagactgacgactcggttcccaatctttgtttgtcaatctgacaaactgcatctcaattgagctaatgtgtaaccaaatgaacttgacaaactcttcgtggactgtgtagctttttaagctaaattgaccacaactaatcaccgaagtgtaacaattgacgaggctaagagcttcaatcaaatgactgggctgagtactgcattttgtttatcacaaaaaaaaaataatcagcacgaggtgcataaacttctatccttgttttcaattgtttcacctatcaaaaaacaggattgttcgcaacagtcctttttaatcgtctctgaagtattctgctgttatgtacaaattgatggagtaaatgtgattctaatatatccaaaattgatttgagagtcaacgactgcccagagtgtgattgacgtagaataaaggcttagcattgtctttcgttcatacttaaaccaagacttcgatatcattgacacacttttgatacaaaacatgtctagaacgactccatgtcgatcgagatatgtttggaaaatttcacaaaactgtgtatactcatgtcatcacatactccgtatatatcacttcccatacagtatcttcaatgagtaaaaatacacatctaagattacaaacacccgtagatcgacttgaaaaaaaatgtatgagcttatttgttcttacagcagtaaacccattgatatcaaaggcattataacacaatcatatcagacaatatgaagatgtggaagaacgggaaaagggacaatagtagcattttatttcttcgtccaaaaccttcatgtgaggatacttggttggtcgggaagttcagcgactaactcccaacgcagaatatccatcagttgtaaaagctgatacttctgagatcaaggataaaatatgcatgcatttgagatgtaagtacattatcaattagctatgataaactgtgtaattacaaccgtgtaaaaagaaccctcaatcgaaaaaaaaattgcagaaaaaagcgatatatactgggtcaaaattagacaaggtgactacgaaattcagtcaaagttgatgttacgccaaaataaacatttttcctcacgactgagatatctatatgagcaaacctgagttcatgtttgtcgttatgttgaaagcttcctttttctcgaacgttatacatcaaggtcagccttatcagaccttcaaaagttcaaaacgcggagtataaaaagacaattttaccttttggtgtattcttcactttaagataaaattcacatgtccaaacacatataaatctcgatttttgctgatcttcggtgtttagatcatgtatgagaagtcgttgtgttagatggtttgggtcaacgatttcacaacaaaagtaaaagagaatcgtatgcagagtgctaagtatgtatcgggtctgaagaattaatcttttagtcaataaaagatgtagtataaacagacctcaaacattctgagtactatatatttcgaccattatggacaattttttctcctggccagatggtgagacaataagaatgtaccatgagcttcgggatgattcaatgataggagacagcagaacatgctacttgtgttcatcaaggtcttatacgcaaatgaagattgataacacaaggagaattgtttttgttcgaaacaatcgaacataatactcatt

SEQ ID NO: 2593 - DNA, 4123 bp, Xanthophyllomyces dendrorhous
atcgaacataatactcatttgatggcagctgctgtagatattttgtttagcatacttttgatcatgaacttgaagctgcaaataaaactccaaaccttagaatatccgtatatgaaacactgatacccaagacgttgtgtctactcacagattatgattcaaatacggaacagatcaaattttttacaagaatgctacaaaaacaaagcatctggaagcaaaatcgggggttagcccttgctcaaaagaaaataacgtcacgcatgatcaatcaaaaattgggatcaaactcaggttttataacgctgatgaaccacacagtttgcttaaacaaaatggacattttagatatatagtagatttttacatcatgatgaatcagaatattaccaatctaaaaacacaaactgtgcatgaggaaactcttggaacatgacatatcaggtctgccgtctgataatgaccgttgcaagtcggtaggtgatttcttcttttcgttttctttttcaaaccattttcaaagtttcacttcaaccttccttccaattcattctgatctaatcttgcccggttatgggaatgtacccaccgctacggtactttatatatcgaagccttgcaattatttaatatatttctttgttgtcgaatcaacttgttttgctctccactttgttgagtctatttgctttgcctctacagtaatggttgatctaaatgattacattcctttgtcttgagactatcaattgattgcagaaaatgaaccgaactgtcaacaagacaattgaattaagcgaaccagaaaagaaagacgtactacacgagtaaaatgagcatatcgcccaaacattcaaaaccatgaactgtaaaatgaggtcattcttgattagatcaaagatactatgtatcattgaaagttctgttcttcagagaattcggcaagaccaacacagtgaagtatggttttccagggcaggcgatatttttgtttgaatcatcagcattgttgaattccactgaacaggaactttagacaacgagctttcaaggtagataagggactttgtatttgttcacttcactgactttacaatatcgtttaacttttggcttgagtgtgaatagtgatgagttttgtgtttgcagtataatgattcggctcatgaaatgtgatttgagcatagaacttgatcttcattgtttacaattttgatacctacaacttagagagatatgctcagatcaatatcgcagatcaaaaacatcattctttcaagcattatcagaatgtgcatattcatttcgttgaaaatgttaatgaaacaatctgccggcaaagacgaagaaaggttaaacatggtgtaaattactcatattgtcatgggacgtgtgaccatgaatcgatagaatttggagtcagcagcagtatttacttgaatcaacctattctacttcaagtttgtgatatagcgtacatatgttcattcagaaactcagcgatcattctcatatcaaaacaggctctgtattatcatacattctcctttgtttatttaaactcaaaagcaagttgagcaaagccacgcatttgacatatccttttaaatcagtcgaaatccgatacatttgcataaactcatcgcttgatttgagatcgcttcatacctcgtcagacctgagcttcaattacatgttagaatgcagtaaggacatagaaatcatttgcagatatgatgttcagctttgattcattaggaggaacgccgtgttccgcatcgttttgattatattgatttcgctcaagtcaccatcgtcaaccatgttttttatgcatgaagaaaacaacacatggaaatctgctcagaggaactcttccttctcatgtgctatcctttcgaagtagacccaaactcagtagcttaacaagtgacctgtctgccatgtaagtaaaaatttcactaaccatttcatttgcagtatattgttagatgtgcctgatctcgggcactgaacttgatagaagagaggtatgatcgaaggcaagtgttatatatatatataattgattggacaagccctctttgatgtacaattgagtgtggagtatatagtttttctcattcaaaccaaatcctcttcgactgccttattgagcagatcacactaaatgatatcgttcgcgtttcacaacatgatgataactcacgattctcaacattacaactttgttagactttcgacaagagcactatggagtttcgacttttagaagtttttgaacagttatcgaatggtggtacgagtttatgaatcaaattcgaggagtaactagattcaaaaatacataaaagtccacagaccaaggacaattatgatgaattttcaataagcagtttgaccatactgtggaaaggaacataatgaacttgactgaaggagttatataaaggtttaagacaaaagataatcatcaaaaagtacaaagaaaaacagcagtacagtaattgtttctccttgctcaccaggcagagatgaaacaaagaaaagggggggaagaagcacaatgaaggtgcatataagatcttgaagctcggacagtagaagaactatttgtgaacatagcatgcagacgcatgaaacgttgacaattctcgaaaatgatacattggcttctgctgatcatatatgtatttaagacgtagctaatgaactctacaagtaggtttcctccctttcttttattctttacattctatcctttccttaacatcatcggccaaatctatttttaacctactgatgtcgagaagacttgaatatggtgcattggtttctgcttaatgcctatgtacctcagccttagctagcgcactctgccagctggcatgcttcttttcttctccatccttttcttcttttgacttttctttctctttttctttctcatattcctccttccttagcatttaccctgattgtttcgccgatgctgaggctggtttatacctgtcttcatgttgttgatgtctcccataaaatatgcttacaaatcgactgtcattggatcatttcatcttcatttctgaggttcgtttataaatgaaagcattgaccataactgtttcgttagtgctgagattatttcatcgtaatttctcagcaatactaaactgtatttgcaaataagtccgtcgaccgccgtttctgtctgtctgattgcgccaatgttgatgtgtctcatctgtcggtatgcaatcatcaattccagaggagatccttcatttgtttgtcttttgtttatttgtgttgtacctgtgtttgttgtttgtgtccccactacttccgtcatttcattcattactttggtttgttttgagggttttgttggtttcattttttttgtttgtgtgggtttcggtacttctttgatctccggtgatccttttcgctcgagcgcaaccgcatacatctggtgtttcttcggcacggtgagtatgtacctattgtttcgtctgatggtgcatacgctgttgccaaagtcggtgtgagggcgaaagggctcggcaaccgtttgttgagacttggttggttttaacattttcagatgaggatgtatgtggaaagctcaggctctcgaggatttaggaagatgccaaagtcataggcataggtgtaatgatagacaggacgaagacacttcgaacgaagatgacagagtccaaacctgacaggagtgaagagagaaaagagggaaaaaactatggggaaagggaaagcgacgaagtacttgtatctccccgtcgctcggcatgtatgcaagcccgaagggatgcaagacggaaaggatgcatacaggtatcgaagtgtgaaaactacagagggtagcaaatacgtattgttgagatggtatgcagatacatacaagcatatactactcggtctgatccctgacagtatccccctttctaggcggagagaacggagagcaaagagatcacgacgacgaacgacgcatctgattctgcaatccgaaagcgtgttgttggacggcagcgcgtttagcagcattgatggcagacgtgggatacttagcatagaattccaagacggtagggtcatc

SEQ ID NO: 2594 - DNA, 657 bp, Xanthophyllomyces dendrorhous
aatgtagtctctgacaaacctggatatgttcggccagtaaaagttgcgggacaacagttcgagcgtcttgtaccgaccgtagtgacccgctgaggggtggtcatgacactgtttaagaatgtcagtctataagtcttggtcatctggaacatagaccaagccttgatataaaattagtccgtcaggctcaagagtgagtttcttgagttgttttgtcaactggacgggagcttgacgagaggggttcttgagaaaagggaggagttcggtcagatagttgtcagtctgataacctgctttcacgcgagtcgcaatatccgacgttgcgctatccgtaatattttccaaggcattttctgggttattgtctgctgagtcttccatggccccgtccgtctcgaaaggtgatacctcgactggtcgtagcagcaactggggagcctcgtcagatgctcgagcgttacccccctctgtatagtcgtgccgtcgagtgaaagcacttactttggtgtttttcttcccaggacgaaagttaaagacatacttgtacgagttcagcaccatcgaccatcgtacttgtcgtctgttgagcattttggtcgagtggaagtactgcaggtttttgtggtcagaatagatctggataggatgctgtga

SEQ ID NO: 2595 - DNA, 475 bp, Xanthophyllomyces dendrorhous; identical to SEQ ID NO: 1087

SEQ ID NO: 2596 - DNA, 1344 bp, Xanthophyllomyces dendrorhous
  misc_feature (310)..(319): n is a, c, g, or t
  misc_feature (601)..(610): n is a, c, g, or t
  misc_feature (825)..(844): n is a, c, g, or t
ttcgagtgagatcggcttctctgggtcaaagtgtgctagcacagaggccgaggcaaacgagttcttgagtgtctcgaacgcctttcttgcactttggtcgaatgaaaaccgcacatccttcttccgcagtcgagtcagtgcgacacaagtacgagagtagcaaggaatgaaccgcctgtaaaagttggcgaagcccaggaaggcttgtagttgtttgatcgacgtcggctccggccagtcaagcacggtttgtactttacccttgtccatcgtgacgccgtggtcagacaccacaaagccgagaaactcnnnnnnnnnngcacttttcgagcttggcgtacagtttatgatcccgcaggcgagacagcacttctttgacatgttcttcatgctgagaagggtcagcagaaaagatcaggatatcgtccagatatatgatgacaaagtcgtctagtagatcccggaagatgtcgttcataaactcctgaaacgttgcaggcgcattggtaagaccaaagggcatgacgagcgactcaaagtgtccatagcgagtgcgaaacgccgtcttccactcgtctccctccttgattcttaccagatnnnnnnnnnngcacttttcgagcttggcgtacagtttatgatcccgcaggcgagacagcacttctttgacatgttcttcatgctgagaagggtcagcagaaaagatcaggatatcgtccagatatatgatgacaaagtcgtctagtagatcccggaagatgtcgttcataaactcctgaaacgttgcaggcgcattggtaagaccaaagggcatgacgagcgacnnnnnnnnnnnnnnnnnnnncacttttcgagcttggcgtacagtttatgatcccgcaggcgagacagcacttctttgacatgttcttcatgctgagaagggtcagcagaaaagatcaggatatcgtccagatatatgatgacaaagtcgtctagtagatcccggaagatgtcgttcataaactcctgaaacgttgcaggcgcattggtaagaccaaagggcatgacgagcgactcaaagtgtccatagcgagtgcgaaacgccgtcttccactcgtctccctccttgattcttaccagattgtatgcgcctcgcaagtcgagtttggtgaagatacgagcttgacggagacgatcgattgattcaccgatcaacggcaaagccgcatggttcttgatggtgatactattcagctttctataatccacacagagacgcagactgccatctttctttttcacaaacaagatcggtgatccggcaggcgacttcgaggaccggataaagccttttgcaaggtt

SEQ ID NO: 2597 - DNA, 40384 bp, Xanthophyllomyces dendrorhous
  misc_feature (13104)..(13113): n is a, c, g, or t
cgatctcactgtgtatctaggattaatgcaatgactcattcattggactgtctcgagacagtttggtgtttatgtgatgatatttgtatagaggaggttttcttgaaggattggagataagtgaaactcgaagaaagacgatggtaataattcgatgacgcaacctcgatgaaaggaaggagaagatcgatacaacatcagaatccgtaaagaaacctctgaagagactttttgaagcagaagtataggtcgatcccgaactcgcacagatcacactcaatgacatttgatttgagttcacagacctatcatcaacatgtcttctcatccacttcagcccttcgttctgacgctgtcgctagattcacgaacagccagttctctcaccgcccttcgaacaaagtactttccagcccatcggaaccacctttcctcgcacctgacatactttcatgcccttccagcagctcggaagtcagatattgtagccgatctgttgcatcttgcctcggtcaccaaacccttcgagatcataatcggacctccatttatgatgggagctggagtaggaattaacatcaaatcaacccaagataaacgtatcgaggcggttcatgacaagctccttcggagatggaccacaacagaaatcgcgctgacagggcaagataagagaaagctaggcagtcctcatgccacagtgatgaacaaatgttcaaaagaagaagccgatgcttgttatgaacaggtcactaaaacttggaaggatcggaaaggacaagccgttggattgcaactctgggagtatcagaaagatggaagttggaaatttcttcacgacttcaactttcgtaagccttgtctaagttacgttgtgccgatcattctctgaagtgatgtaccctgatttatatgtgatatcaacttggcgttcctctctgcagaagttgactcgagcaatgagaccaaagaagatccctcagcggacatgaacaagctcgacatatcgactccttctccgaaagaacattgtaaatcggagaaacagaatgattcctcgtcttctaaccgccataggaagatcaacgagcccaggtttaataacgagccatctcggaagaagaaccatacttataatgaccggcatcaaccactagatgacaatggacccaaaaattcgaccgatgaaggacactgtggtaatctatccaaaaaatagcaactgtctcatgaagtcccactagaaaaaagaggtgcttggttcgacagttctgcaccagctctcaaaccgttggacaggtcctggatcattttgccttagatcagtctcatgagaacgatgttgatctgaaaagaagcgttggctatgtgaagtttggaagcaggttgtctaacctatccgagtcatgttgaggtcttggctcacaaagctaccatatgtctttcgtcacaatcatgatccttcatatatacatttttggtcatttagtcaaggactccacaaatcgatcagggtctgatcgtggttttgagcagccagcagagccatggcccgtcgttttcctaagtcaaaatatccctcgtcgacgtcacttccagcaaagagcgcaccagccgccttcagaagagcaacacattgcttatgagcttgtcgggcagcgtaatacaagggggtatgactataattggatgaaatgacacatccaagaattgataagtcaccaaattgttcgagcctaggaatcatcgctttcatgttatgcaaggggaaaaaaattacgaaccccagcaaatccctacaatgcacaatagctcctctcttcaacagtacttcgaccgctttttcgctcccatgcaacgcagctacatgaagcagactcattccgacctcgttggtcgtgtttgccggattgacaggtggaggcgacctgcgatcttcaggccgagcgtacttcctcagcagatcctcaagcacctcaggatcattagacatggtggctcggagaagaaggtgaggtaagattgcggattcaaggataacagatgaatccggcgcgcgggaccaagacgcaacgggatcttttccatctaagagggaggtttccatcgtggctgagtcactcgtcaatttgggaaggccaaccgatttgagggaagtattggacgaagcaagttgggtagcatgtgtaagaagctcctggagtctctcgagcgaatgaaactcagagggaaccgttgtatcatcctgcgggatagatatttcgcctcgaaggggaatactgataagtcgacgaacttgttcgactgtaagatctggttttgatagtagataggacaactttgcgagagcacactaaaggaaggaaactcaaaaaggagattgagattagctagattgaaccctgttgtcttgaaacaatatggagattataaggctcacttcagttgtcatgtctagtctcaacatttatacaacgtgtgaaatttgaagaggttagaaatttgatgtatgtcgtgccactcgtgactcaatgatgtgaagcgtaatataaacttacctcctccagcaacaacgcctgcgcgctccaaagcgtatcctccagaatagattttgctaacaaaacccttagcgcattgtgtaacgtttactacaacaattccgttcttcttcgtagcaattctcaactcgttcaatatgtctgtcaatacattgagtgaagaattcgaatttcagatacaaaatttcaacaaacgagatgaggatatcacaagacaatgtaccttctcgttcaggagcatttccagcaccaaatgtctccatgacaactcctctcagtttgggtgtgtgtcccgaattaaggaaagaatggaaaaaggaggctgatattcctggaaagattgtcaatatagctgatagcgaaagagagatgccgatgctgatgagcacatcatacgagaatgtttacttgtttgtgccaactcggcaggttattacagatcacttaccgacctcggaacacatatctgaatcgttgaaggatttcgtcccatacaggaaaacacgacacgtcaagcgatggcacggcaacatcacaggatgatgcgaatgcttacctctatggactctaaatggagcaagagctttaggcctcaaaaccgcattccagttgacttccaaattgataccaactttttaatcaacccagagacgaaaaagagaggattaaatatcaagtaaagctctagaattgattgacattcatcttgcctacctttgactaaagctccaggactaccctcgctagcgaatgcatcgaagccatcgttggagaccttgaatgttcggtttcctctccaaacattaccgttgaaaaacaatcctacctccgggatagtgggaaatgttccagagacgattagtcctccgagcagattttcgtatgcatcgtttcttagctgagagataggaactatgatgattgtgcagatcgtaagagccatcagtcgcagataatcgaaacggactagagaaatggttgttactttgagccccggtgatgatgacaggtttgccctggagaaagatgtattgatgcaagtcaggaacagattgttacgacagacagtaaattttggcgcacttactagatcttctaataggaaactcagagcggacgccgtgtaggacatggtatccgttccgtggagaagaagaaacccatcgaagttggcgtaattgagagagatgtccgtagccaatcgaatccagtctgtatggatttaaaagaacaactgaaggtcagttacaatatgagacgagcaaaatatgttttacttgcctttgttggatacgttggacgagtcaattaatggtgaatactgtgttgagaagcattgcgatcagacacaaatgccgtacttgattttgccgcacacaaatatgttttcatctttatgccgacggtgagaaacctacctcgaggatacagtatcgaatccttcgtccactcttgtcgacaggcggagtgaccaagctatctacccacctctcttcgaacctcacgccgtctttgtccacaccatctgcctcgttccctggttgattggtcgtgatgccctcaggactgtcggcaagagagcttctaacgaggaaggagtgctgcaaaggaggcggggaagcaatggtgctggctttcgaagcggaagcagcagaagaccagtgttgaaaagcagttgaggatccagtgtgggagagaagctgtgagagtataattgaaggcatcatctcagtgggtcgtatcagcttgacaattgaggagtatggattggacaaacggagtctcctgagggatcatgaaatcgactttgagctcgaagagttgcctaaagatcgttggagactgaaggtgaggtttgtcgtacaaaaactcgaaaggatatgatgagagtaactcaaacgatcaacttacagtcaaaaacccgggctccggaacatatcttcgtttgattcgttccaattttgagaagcaagatgtgaggacagttgagtttcaaatatatctcatcaagggagtgaacaagtgaggtagacggaagcctaaccagatagtcaagatagaaactaacccattagcagaatgaagcattccgatggttccaccggtatacaaaatcagaacagttgattcctcaatcatttttttttgtcttctaagctgaagaatagaattgtgtgaagatggagagggacagattgacgttgaggaagagaatgagaccaccgcaaatattatttcaagtagaagagtgaaaagagaagaaaataagaaataattcgatgttagttttcgaacgcgaccgttacgctaaagcagataagattaagattaatctaaatcaccatgcacagagtagtttggacaacaaccagcattactatcaataatgtaccagagaactattatacattcgaagctcaatgggacaaattcaaagcaaacgaattcaagaaactagaaacacccaaggcaagaagagaggtcattgaatgtccgattatttgtactacttgatagaaaaaaagaaagaaagaagattaaaggattaaacgttaagatgcatatcaaacagaacgagtcaagatcataaaggaaaaagaatggaagaggacgacacaagaatgaacaatcaaatgccggaagagacgtgacgtaaggtccgagtgttttcgctacagaggaaagaagaggaggatgaggaagattgttttcaaaaatggaggaatgtcaggtggcagcgtgagtatgttgggaaaatgattaattaagtggaacagaaactatgcgagacatgcgaagcacaatatactgcgttacgcaaagagtagatataagacgggaggtcgaaagactcgaagaaaaatgcgccacgacacccgatcagatgggtctttcagggcggtgaacgatgaacgagcttttgattggaggagatccagcagcgtcgaccggcaagatatccccatagcctatcgatgcctgctttccaagtgatatgtctgtgggtgtccgagacagtgatgtggaagcagtctgggattgaaaggtttgcctcttgggccggatcaccttgaagcttcttaccaccggctgaccttcagaagtagtcgatggtgaagtctcagcaacacttagcccaacggcattaggtcctgaaggcatcttgatcgattcctctctattcaagtgggctcgttccttcgtttttcggctaccaaagggccatttagaggttgcggcttgtccaggtggaggggaacccagctcagagtcgaaatcagagtcagagatctcgtccttggggttgccggggttttttacgaaccatgaagaacgctttggtttctggaaggattctgcatcttcttcctcatcgtctgcttcatttggaacaggcatagatgatatgggtaaaggtctgatagcgaagccgctttgagaaaatgatggatttgatccgggttgatatgacgtattgaaagttcgggacaattgattgttacctgaaagagccggctcgctcttttttcgataatgatctgatgggcgagagtacagaccatgcgttcctgaactatccggaaggaacatcatagaggacggtgtgcccgagtcggatgcggtggcagactcgttatagtactgttggtggcttgtcgaggtatcaagagtttcttgtccgtacaataacccctggtaggggccaggagaagcaggaggagaagtctgcttcaaagagtatggtgtctcataagctgctcttcctcctctcaccatagagaaccctcgctgaggaagttgtgtggagggcgaaggagaatctggcggaacagctgtcgaatactgcctctgatgtcgcaaaggtgagtactccgacgaaggttccgtcgttcctccatagtcgatcaagggcggcggtctccagccacccatgatgaaacctgtctcggtttcgttcgagaaatcctgaaccaatctaggaaagtagctcgagtcatcggttccatcaaaattggtggccggggtacgggcgggggtcatactcatgctcgaacggctaaggtcgagcataccttgctggctgggcgcttgtgaatgttgactgaagttgtctccagctcgaggtcggaaaccctgacgccggttctgacgtcttctaccggaagaacggatcagactgtcaccgcaacagctggctttgctaaaagcaccgaggataccactatcgtaagggtcggccgaatcatcaaaacgcgcgcgaacgataagtcggacgagagcttcgataagtttgatgatgagggcgaggagatataacaaaaacacaacggcttgaatgaccaccacagcgtaagcaatccaagtggaagcgagatttccgatattaatctaagaacagttaacgttgcaatgaagaaaagtggcggatagaatgagctcgttgattagaccgatcttttcgctacttggaagaatggtgaactcacagcttgacacaagataagtactaaaatcatagtgattgttctgagcacaccaaacataaaactcatagcccccatactagctcccagcccccatggtaaccaaacagccgtcatgagacctaccgtgatttcttgaacaagcaagataatcacctgtgttgtgccgctcttctgtccagccccaatgacaacacctgctataaagctggcggccatgagaacggtcgcatatagctgggaaccttctccaaatacgttgtaaagtggacccaaggcaagaagagtccgagtagcatcataaagctttggcgaaggcgtggtagccaaacgatagctgaggtagactgggatcgcaattagaatcaagatgaagaatacggctgccagggcaatcgaggtagtggatggagaatttgctgtggaagcgaggtaaaagtggtatgtagtgaacgccgtaagaggaccttggaagaggaggaagactctgatgaggttgcctgtcgacgaaagccacagccaacagttcatagtcaagtcagcttgctgtgcttaacagacttgttctgccctttgcaaaagggaaaatgatcaatgaacgagccttgtagagagctagcataaaacgcgcccacatcccccttgacgctgaacttccaccactgcctccttgctggagacgctacagcccgatccatcctcccgccccctattttgactggcgactttcctcttcctttatgttcgtacgctcctgcttccccatcaccgagctctctcaacggccgtccgaacattccgggagacgtaggcggactcccaacacctacagacatccctcctccctttcttgccatgcttgaattcaagaacgcgcccacgccatgtacgacccagacggccaaggagattacgatgatcgtcgcaattgcaagcagaaacaaagctgcgctcatcgggaacagatcggttggccgaatcccgaccagaaacgcgtacttgtccattccaggcgaatggcctctcatgttgagaaacacattaggtaggcttggatcgagatacaacgctgaagatgaattgttcatagtggaggcaaatgtcgacggagggtcgtatggtgagctaagatcaaatgggtcaacaagtttcgagaaggcatcggtgccttgagtgaaagttacatttccaaccaaagacgcccaggaccctcgagttgctatcgggtagacaaagtccggccagagaacagcgatctggctgaggaacgaacaatactggatgtgatatattatatctctgaacccaggcgtgactatcaggatgaagagaccgtggacgaagttagacatatagacggatttcctcgtatagagctcttatggacatagctaatagactcaccaaatcgaagcagcgacggactcgtcactagtacgtccccactaaccgcactcatcacagccgtccccaacactcgactccacttccgcttgaccccggcggacacagctgccgagcttgaccctcttctgtcacgtccgtggcctgtaccggtctgatgggccgcacttttgccgacccgctcactttcactcgttgaagcagcacaccaacttgcgaacgctcttccgccccataggaccgcccagtagcctacggctattccgacggggatccagagtacgagcctgtagtaccacccgtcaggatagtacggtgtcatctccaactctacacaggcgagctcatttgggttagggtatgcagtatcgacaattcggacttgagttcggagggtggtgagcggatagatagagttgaacggtaaactcaggttgagtgcgaccgggccagagggaattatacaagtctccacgtcgtctgtagatgttgtaggtgcaggagaaggatgaagagagtagcacaacgaagaggctgaggtcaagaccggggacgataagaaggtcgtggaggtgaacagagtggccagcttgtcagtggtgttatcgaatccactgacgacctgttcgaaagaacgaggtatggagagagggtaagtatgaggaccccattgatgtgataggaaacatatacaccagagggggaacagccacgggcttgattccatcctgtccttgtttcttgaatctcgaaagtgaaagcgtgacagactgacctctgaagaggacccaatgagatcgactcgaagaagctcactccctgactccctttgagggcccaacaagccatcagagttcttcccaaactgaaaataaccctgagtgaactgaataggagaagagttgatggacgtatgaccaacacatgatgtgagcgatagttccagcggagccgctaccactacccgagggacaccgttcaacagatagatggaaacgatcactaggaatgcatgcaggaatcgaaagatgctggacgacgaggcgaagtgtggttgaggttgagaggaatttaaacggaaggaggaagaacccgatcgagccataactttgttggatcgactggagggggaacaagaaagacaatatgttcttctagacgagcttggcctggtacgttctacaagaaacggtggctggccggcatggaaaagcagagacagacgaaagctagtttctagctgggtgagaaggaggcgatgtcggggcaaattatgggtcgagttaggctcgttagctggtcggaagaatacaagctacgactaactttcgcgtaacatatatacacaaaccacgtcatacaaatcggtattcagaaagcaactcatggcatcagtttgagaaaccagtaaactttcgagcagacttacacctatatagatagaacttggaaaagaagaacaagaagaagagatagaacggaagagtaaagagacagaagagaaaggcagaaaggagaaaggagaaaggagaaaagaaaaagaagagagaaggaagcatagatctcgggtcatgagaaaatatatgcatacgacggagggcgagcacaacggcaagagaggcaaaatagagaagaacgcgcgaaggatagaagacacaacaaagaaagcagggaaatcgaaaaggaaaataaggatacgtggcacatctcgaaaggtattcaatttgaaatgtaaaccagacaggaggaaggcttttcttccctctctcaagcacaccccatctcccatctagctcgtttccactctgcctcgatctcattatccggggctctccttttgccggcacattttcctctcggccacgtggcaccaccaccacctcgtcgaggaccgtcaatgaaggtctgtccgctgctgggagttcgcaagagctcatcctcggaagagcttgaaccatccccagtcgacaagctcggagcatcctcatcttcgtccgaatcttgtgaatccacttccgaggccttgatctcgagcgaaatgagtggaggggcagcgatggcatataaagcgtcttggatgttagcaggcgaaacgcaatccacaacctgggtggattgagacacagaatctcgtccaacccaaagcgaccacgagagtaggttgcccaactcggtctcacccgtagaaatctcttgaatctgaggtttcattcggattcgacagtgattcttgatagatcagtcacaagcaaggagcagatggatcgaaagtaaagcaagatagacatacttctaggccagagagcttcttccaagctttgttggagtacacccggtcgtgcaagaacttttgggcgagaacaagcgaggacaaaaaggtccgtcttgggcagccgagagtaccttgcttcgcaccgggagtagacaacaaactttgagctcgctgagatttcaaccgtagatccgtctgttagaccaaaacgacatactatccaaccgaggtaacgccatgaagggtcgaaacatacctcgagataccagcgagcagcccgaagcgttccacagttggaacggcttcggcgaaggatctcattaacaaacgttcggagaggaattgcctcgttgtcttccgaagaagaaacggagcactcggacgaggctggccagatggaaagaagaaggtcgatagtagaatctaaagaccaggaattggtcagaaagatcaataataatcaacctctgcaaaaattcaagcgatccatctggcacgagcatcacacagatccccatctccaccagacacagagtcgacgaagagaaagatactcaccaacaagcctgtcagcctcttccttctttccacatcgctcgtggaccgcggctgatccagctgatccttcagacggactctttctcaggtcttgtgaatcgactgaggaaaaggacgagtgagaggcgagcgcggtaagctgtcgaggccggtaaggtcgctgctgcagggattgcacaggttgagcgagggggataggttgtcgatgtttgggccactgacactttgggggttgatcaagtgcagaaggcaaagactgggtgataaaggggactgagttcgaagaagaagaagaagacgacaaaagagcgcgattggcctcgtccccagaaagggtcaaggccggtacggtggatcgccactgatcgatatcaatccgatgctgggacgacgtagaagataaggggcgaaaggccgtcatctttgaagggagaagaaagaagggatggaaggttcttcttctcttgaggggatgcgactataaaagagaccttcttctaagccgagcgaggctagggctgaggtggaaggggtttgtttgaaggggggagggtgtttagtggggagaatcaggatggcgaaagtagggcggagaagatatgttgaaagttttaaggagaagagtgtgaacgagagggacggatgggttgcgaaaaaagtgtttgttagcaaagagctttgtgtgaacaaaaagttggattgaagagtgtagaattgattggccagtggcgtcggtttagagtcaggtggtgttttggttgtagtgatagtagtagtagtggcgttcgataaggcagcagcagttgtcaagacggattggttgttcaataatctaatggaagaaagacgcaacaatggtgaaagaggtagagttgagctgaacgatagacttcttgacggtggcaacggcgacggtagcaggggcaaaagcggtagtatcccgatgggcaaacatgttgggcgataagcgaacggtggtggtgggaagtgtggaggtgggatctgtcggaccgtcacttccaatagaaagaagatgtggatggcctgagagaattcttaggagtagaagagatgataggagaagacagtagagaggatgtattgtctgtcgtcgtcgtcgtcttttattcgtccgacgtcttctacaacgagggagagaaaggaaagaagaagaaagacaggcaacaaggtggtggctgggatgtaggtggggtctgtcgttatatttaaatacttgaattctatataagtgtacttaggtaggaatagcaaggggcaaacaagggtctagcctctgaatgactcccatcgcggaatattcttttccttctctccttgcgcgcggcacttgcgcaggagaaacccaagtcatttctctccccatggcgttatcctttaaccctcagcggttagatctgggttgtggactcgtttggtctatttgatgtccagatccatctcatccaacgattcatccatcggccgaatggaatatactcaggtctgtacataatgacttgccttgggttgctcattcttcagtcaagtcatacaatacgcacatctgctctcgtctcggtgtctcttcttcctctaaattgagttcattcatagccgtgcaatcgtatgtcacgttcactacaggtctcggttgattgtcgaatattcttgcaagttcatgtactgtacattcgacatatgacgtgcacacatacacataaacatatgccctctttctatccaatctttctttttttcttccttacttttcagatgagacacagtcatcgagaatttcttcttcttcttcttcttcttcttcttcttnnnnnnnnnncttcttcttcttcttcttcatttgatacttcctgattaaacctacagtttacttctccaagtatgcaccgtcctgtacgaggaagataaaagacacgacagaatacgagaagagggaggaagttcagtcataagcttgaaacccgtcgggtcatggccgaccccaagacacaaacacacataccgggccacttttcaagccctccgcattctcgaccgcaggcaccaaaatcggctctcgtcgtttttttaccgaagcggtctggttatgagctcccggtcggctcgcactatgggcgtcctcggaaaatatctccttcatcttctccactccaagccgttgaacctgagttgataccattttttgagccaaagtgtcagccacgccatccctttacgttgttcgccatacccaaagtggaatacaaagaaacctgcgaacctccttgtacacggccgtcacaacctgaacgagaggtccagagagtccaaacttatgcacaaagtatgcagacacgatcaatatgagcaacgtcgagaagtacaacggatttgtgatcaccgccatgaactcgttgaatctgttcatgtttttaataaaagatatatatacgccacacaagtcagaacgtttgacgttgtcaaaaatcgaaacagatgaacgtacccaaggaaacacaacgctccccaaacccaaactgggatcatcgctcggctcaccaccatactcctcttggcttccacatacagcgcatccgcctcccgccggaactttgtctctaagtcggcctccttcgtcggtgtcaaaatcgagagcgagttctcaaaatcaaattctgcgtccggatcagacagcgatgacgccggactgtccgacgagatgttagaaggtaacagcgacggtgccgtcggcaatatccgggcatacaatggaagcaaaacaagcgtctgaacagtcatccagcttcagtcccgggtatctatcgagagatctagctattgccctagtgaacggtcaaaggagagaaaagactgacctcttcctttgctttcttgaacgcgtcatctatgtcatcctcaggtttccaaaccctcggcacaccagcggcgtcgtatctgaatcgttcctcgaacgccacccggagcttactcaaaagaacagtctcgctcgtctgttcgtccaccttggaccgaagcgcttgccatgcgcgccggcgaagcgtcgataacgatgccgtattctcagatgatgtgcaattgaagcctatgaggatgtaaaacgaaagcagtgagcgactgatgttcagacagctatttgatgaaaccgtgcttactctttgccttggtcaggtaggttgattcagcccgctcgagtgtttcagaaaattgagaaagaatcttgtcccacatctggggagtgggcttattgagcaaaaattcgattggctcggctaattgctttttgatatttctctatattaatccattggatgacaagggattaacaaggatatgcactcaaatcggctatacgtttgagtttcaccaaggggcataaacagagtggacatacctcaatcgaattgaccatcctctttgtctcatcaaatcggcattggtctccgattagagtaatgtcctcctttagcaacgcaaactcgtcgtcgtactgccaatcagtatcatctagcctgacctctgtatcattagcgcacacgtatacaaggaccatctgtcagcgctgaattggattctgcaagctgaagtatgaggtgtgagtattcagactgaccttcggctccttctcggaaagtattttctgcccgctctctgcttgtctggacgaccgcaccaaaatcgtactctttacccttgagcgcttcttcaatcccctgcttgaagtcgcggacgaccactttgtgcaaattcttaacgtgcccaaggaacaaaggtgaaagactagagtcgagcgactggatgagatcgatccgcttgcgttgatagactccaacgtggtatcgagacgcgtctcggtcgaaatgcgctgattatacgacgaacaatggccaacgaaacaatcagcttactgaactgacagatgatgaagacaacatcaagcagttttaggaactaacccaatgcagcttgcttccagcttgacatcaataatcctaacccatcgaccacattaccactctcaacctgccttcggatagtctttactgatgacagaaacgcctcggttgccaccgcagcgatttcgtcgcaccggaactgggcgagtagctcttgctgtgtagggatatctaaatccgcattcgattggacttgatcctgttgagcaagagaggacaaaaagcaacatgcggtccgcttgatgagtaaatcccggccataacaagtttgtcacgatcgtataagacgaatggctcacccaaataccctccatgtagaacgccacaccatccgccgggatccgcttatggtaaataggtttaaagacatagtcctctctagattggtctaggaatcggcctcgaagatcggacacggcctcctcaaattgagtgggcataagtactttgtggggaagggtagtgaatgctagatcaaagtaatcggtcagaaggctagactcgagagcttcgggctgaatatcaaggatgatgatagaccacagaatatcagttataggctagttaagtgaatagatgcaaaaactgaccttggataaagagtgccagatcttctccatatcttgtcggagtgtggcctccaagttgagcaatggagtggagccaacgtggtctcgaatgacgaacataagcaatgtcttttctttgccactacagcgatgatcatatgaagccacatgttaatgaggctgattttctttctagaccatgcaggatgtacataaccttgcttaccttcctcgagaagtaccaaacaagccaagattgacttcgaacactgtcttgagaagtcccatgtttgccccttgataaagaccgctgtttgtgaaatagagtaagttccattaacaccttcttaatctttcgagaacggataaaaggatacgttgacgcacacttggtgttcccacagattgatgaggagaacttcggaggatgccaacgagaagagagcagacttgcgctcgaagtcctacaagagtagtgtacgaattgttagggccctctcgattagacaggaaagagaacaactgacctgatcttctcctctttctctgccatctgttccctcgacatccatcaccatgattggtccgtctttcgccttgcacatccagatgccttgaaggattattcaaagagagaaaaaagacaagatgagaaaacttcagaagccaggaaatctcaaagtcgcgcgcgcgaaatgagcgcgcgtacctttcgtggtttgttttctcgccttctcgtccattacatcgaacgttgtgccaaacagtctgtttagtagtgtgcctgaaagtttttccccaagatttggaagcaagtttcaaatcaggatgatgttatgaatcagtcttacttagacagagccagatgtattccatgagttgtggtccaaccagatacgaactctttccagttgactgagatccaaagacggagacaacgtcataaccaaaccctttgttgaccagaccccatcggctgatagcaggcgtcagttccttactgtataacagaagtttggggtcgtcaggatgtatgagatatggacaagaggatggtcaatataagtacgagacgatgaataagatgaacgtgggattatgaacgtcgagttcgcactcgagtccaattcaatatacaagacggtatccgatcttagacttgagtagtgaacttgcctaaacactttatcttcgtcgatgatctgtattctttctttgctgctcttctcttccatgaacggcttggtatcggtcgatagtgatgctgatgactgtgttgatggtggagtaccatcctccccggtcagggacgctttagcttgctgaatggcctctttagcttctgcagatgcgtttgaaaggacgttctggagttcttgagatccctctgagagaatttgttgagaggacgagatgttcatctccatgtcgggcgatgaaaaggacgaaatgtttggaatttgatgaagaaaaagagaagaagttcagatagaattgtcgatgggggagagaaagtaagagaagatagatggaggaaggcgtatggttacgcgtgtgatcacgcgtgtggtaaccgatatgaataaacacgtgatctgtgttaccgtgttcataggctacttccaaatctgggacttgacccaagagaatggtgactaaccggcgtatccacttaccgctcgttttttttctactctcatttcgacaactttcttgatcagccactccttacagtttcgttgtcggtctctcctctctttcgtttttcttttctcttcctacacccaggaaggtttctttcagggatgcggatgattttacgctccgttcctcggattcctccacctagactgtgcattccgtcgctccgatcgggctattccatcgtcccttctctctcctctccgcttacttccgttgctgatcccatcccgccatcatccacttacgacgtgctcgtcatcggcgctggacatgcaggatgtgaagctgcggcaggtgctgccagatcaggtgccaagaccgtcctcatgacccaaagactggatactgttggcgaaatgagctgcaaccctagtctcggtggcgtaggaaagggcacgcttgtccgagaggttgatgcactaggcggactgatgggccaagttggaggtgtgtcccaaaattccttttccttagacgcgcttatataaaggctgactgttgttcttcattctttcttttagataaatcggccatcacatttcatcttctaaacacgtcgagaggaccggccgcttggggctaccgcgcgcaaatgtctagaattcaatacaagcgccatatgcaggttgccttatccaaagtcaacaacttggatctcaggcaaggctcagttcaaaatattctctgggaagatgatggagatcaagggaagaagaaaatcacaggtgttgtactaggtaagccttagagtcagggccatacgatgttctgacaattatattatggctaacctgaatgcaaccgtccattacgcagagtcgggtcaaacaatcaactgttctcaggtggtcatatgtactggcacatttcttggtggagagttcgtcgcacacacactttttctctaacgatatcaatatagaagggcgatcttgttcacgttgtatctgatctctacatttatagaatccacctgggtctcgattcctatccagctggtcgaatatctgaacccccttcgtccccgtccctttctcagtctctccgatcaatggacttctcattgggtcgactgaaaactggtacaccgcctcgtctggacgggaagaccatcaactattctactttggatacacaacaacctgacggattgaatagtcgcgcgtttagcttcttgcacgaaggtagaaatggacttgcagaagctggggtaaatttggaaaatcaaattccgtgccatctgacgtatacctccgaggaaaccagtcggatcgtccgcgacaatcttcacttgtctatacatatcaaagaaacagtccgtggaccgaggtactgtccttctatagagtccaaagtgatcaaacaccccgagcttagctcgcatcgaatttggctcgagcctgagggttaccccgaagaaactggtacttgctcgtttcaaagaatgtggcttatagatggacaagtactgatatctataccaacccatctattcgacacttgtagatttagtatacccagcaggtttatcggttaccatgcctgctgacatccaggaacgagtgcttaagaccatcaagggacttgaggaggtcaagatggtcagccctggctatggtgttgaggtgtgctcacctttcgttccttttttatttgcaagtgcgcaagaaaccctaattttgattcatcttttttctttattagtacgattatgttgatcctagagaattgaacacaacacttgaaactaaacgggtcacggtatgtcttctagcctctgtttaggcatatcttatagaatctaaaccggaaatgtcttgtttggtttgtttggatgccaatatagggcctcttcctagctggccaaatcaatggaacgactggatacgaggaagccggcgctcagggcttagtggctggagtgaatgcaggcttggcagctcaaggtatcactttctaatctttccttacgacatcatgtatgtatcatctcttggaacgttatttctgatcccatacatttgaattcactgttcgtgtaggcaaacctccgatggttctcagccgttccgatgggttcactggggtgatgattgatgatctaactttaagaggagcgaccgaaccttgtatgtatcttaacatgtcgtctcggcggctctgtatagattgaatctctgatgtccttggtcctcgtgatgcttttatagatcgagtgtttacgtctcgatcagaattcagaatctctcatagggctgataacgctgatcttcgtttgacacccaagggtatgtgttttcagccgtgttctgcgacgctcaactgagacagcctagagatcaggattatttaatagcatatgcgtgtgtttgttacttaatcacaggttacgcacatggagttgtgtctgaagaacgatgggaacggtttttgaccctacgatcggagatggaagtcactaaacgactcttgaaggagaccacatttgctagccgagagactgatgttcagcccaacatatccacaggcaagaagacgtacgtttgttccgtattctctataccttcacaccggagacttgtgatagcattcatgtgggaatgcttcgcttatcgaaccatgtgctttattctggttggcgataaatccagtgcatgggagctgctagggccggcagactcctctcgctcagacgagagtatttatacttccttccctgagctggcctcaatggagcctatcgtgcgggatcgagtaggaatagagagtgagttcgatgaatacccattggtcttacggaagtcccttacttcaggacatgttcaatttgattttaatctcgccaatatatctactctattctccgaaacaaagaactatacgagaatactctattgagacaagcagaagaaatcagcaatttcaatagcgaagaagactatctgattccctctgaactggactacacctctatccgtggtctgtcggacgaggtcaaagaaattttcattcgatcgaatccaaaatcgatagtaagaaaatttcatgtagcactcttgttcaacgtatcatcatcttaccgctgtctcttatgaatcttattttacaaacagggagttgcaaagaggacgcaaggcgttactcctatgtccatcctgcttctgatgagtgaaattatgaaacttcgagccgtatcctcgtcaagaatctctatacccgaccattcattcaagtctacgacttcatcttcattcacaacaaatcgaccgtcctttatcggcaattcctcttcgcatctcaagactgcaccgtcagttcgtgccttctcgacgtccctaccgcttgcttcaaaacaccgaaaacgttcttctgatcaaggagggagaaagaaatataacccatatccttcacgataccaaggcagtttccgagttccgccggtcgaagttgcaccaaggcatgcaccatccaccaaacccgaggatatgcgggctttgctgctagatgctcttcaagatatcgacgatccggatagtcgactggtcaggcggcttaaagaactacaactttcttcggcagatgctgttactattgccaaaaagtttgccgaagaagtcaaaccagagctggaagaggacgcttacattgatacttggcagtcgacttgggagattcaatcgcttcgtctggattttgagaatttttatatcgattctcgtggccagtcttgggataaggctatccaaatctgcttgatgcatcgattattagactgggcatctgcaatccatttaggcgtcaccgtcaccactcactctggagtttcactcgccgccatccagcagttgtaccgagttgctgttgcgaccgactttcgaaacccagctgatcgatatccggaggcccgagctttgaaacgacagatccatcttcatgtgggaccaacaaatagtggaaagacgtataatgcccttcaagcgcttatcaagagtaatcgaggattctacgctggtccactgagactgttagcccacgaggtttgggaaagagtcaaccgaggggatattgctgggatgaatggtgtcggccggtcgtgtaacctaaaaacgggtgaagaacttcgaattgtcgatccgcttagcacattgtcgagttgtacggtagagatgattaatcttggaaccgagatctcggatgtaggtgtattagacgagatccaactcatcggagatgtcaatcgaggaggagcctggacttctgctgttcttggctgttgctctagggagcttcatctttgtggagaagacaccacggtcgatcttatcaagaggataggggccgaaactggagacgatgtcattgttcatcggtacaagcgattggcgcctcttacgatcagcgacaaagagcttggtggctggaagaacatcaggaagggagactgtgtcattgttcttagccgaaacggtattttcaagactaaggatgagattgaggcggagaccgggttgaagtgtgtggttgcgtacgggatgttgcctccagaagttcgatccgctcaggctaaaatcttcaacgatccggacagcgattatgatgtgttagtggcaagtgatgcgattggtatgggactaaacctgtaagttccatcaacctgactctaaaaaagaaaccgtagttgtacatccctcaccctgagcgaatatatttgggcatttctcttgtttgaacagtgttatcaaacgagttatctttacttcattaactaattaccttggggagcctcttcgaacgtctcaagttaagcaactcggtggacgagccggtcgattcggtcttcatgggaagggggtcagtggcgaggttactactctaaacgctgaagatttgccgatcctgcatgaggtcttcccttccgagattcctcctatagagcgagctcgacttgggttccaagcttccgatatagcgaagctttaccgagtgctaggtcatgatgttcctctggagaggatcgtcacgctgatctccgaactcgcacgaacagggccaaactacatcattgaagaccccaagactatccaaaaagttgcgcccattatcgatcgatacggggcggatctcagcttggagcagaaattgctgatcgctgatgctccggtgaacctgagagatccgctggtggagtactggtttgcccagtttatcaccgcgcatgcggtgggcaagcgaatttctgatctcaaaggtctgcttcagacgggcacgttgatcgagacgtttgagcgacttaaagtacgacacgctacgttcctcaatgatcagtatatcctcgctgaaggttcggccaaaccgaaatcgagaactgtagagattacgtcgaatgaggttgctcagttggaacttcttcacaacatcactaccgcttataactggctctccttccgactaccgttaacgttttgtaagccgcaggaggcgagagcgcttcaggcagagctagagattttgttggactttgcgcttgagctcgttggcggtcctctttctaacgctggtaagaaaggtcaaggcggcagaggagtgaagaagggcttgatggcgaagttgtcgatgagacagttggaagcaaagcagctggcaaaggatttggccgaagagaacaagatcaagttctatcgacccggtgacgaggaagatttgaagaaccgggcccagttaaaccagcttcctatctctagtgcagaagtggagaagctttcgagcttgatgtgattagattagttgagtatatgacatgtataactagcgttttcgcacaccctcaatatgtttttctgcaagaatactctgaaaagaacaggtcattttatcaacatttttaatttatttttatgaacaagattcgtcccttgagaaaatataggcaaaaaacaacctccaaagacaagtgtcaacactaaaacggagaaattaacaaggaaaaatgtcacaagccagtggtctagaaagcaaaataggagaggtaaaagctctgattccatcttctttccttttccctcacactgcagcggcctttacctgtcggactaagttaagagccgatccggcccggagccagtcgacctgatccttactcatggtgtgtttggtaggaatttcgagaacctgaccgtccggcttggtaaccttcaaagaaatgaccgttgaaaggtctccagcgacaagcgaggaaacaccgatggtctcgacctgatcaccagcagagatgagagaataatcggccttgtcggcgaaccagagtgggagaacaccttgcttcttcaagttggtctcgtggattcgagcgaacgatcgagcaacgatcaacgatccaccatagaacctaggctgtaaagcggcgtgctctcgagcagaaccctctccgtagttatcgtctacaacgagcatccaaggttggttcttcgacttatatcgtttggcaatattcgggatggtgtcttgtccatcctcatcacgggcaacgttaacttctccaccctcatcgttgacagcggtgatcaagagattttccgagatcagacgcaagtgtcccttgtactttaaccaaggaccggcagcgctgatgtgatcagtggtgcactttccccggacacgcatcaggcacttcatggtcggcaactcggaaggtccagcctcgaagaacgaagggaaaggggcgaggacctcaagtcgggttgaatcaggagcgatggcgatcggagtgtctggctgaggctcgggtgagggtgtgggggagtaggaaagatcaccgggtgtgaaaccaccactaggcagcttgatacccgaaggagcatcaaacttgaagggctgtccgttcttgtcgagcaaactgtcggtcatagggttgaaggacagactgccggagaaggccatggcggtaacaacctcgggagaggcgaggaagttcatcgtcttcaagtttccatcgtttcgagccttgaagttcctgttgaacgaagtcagaatagcgttgtcctctcctttcttttccgttcggttccattgtccgatacaaggcccacaggcgttagccaagacagtggcacccacgctctccagcttctgctgcaggccgtccttctcgatcgtcgccctgatgagctcacttcctggagtgaccatgaagggcaccttggtcttgagtccggccttgtgggcctgctcagcaatgctggccactcgggacatgtcctcgtaagaagagttggtgcacgagccgatgagtgcggcagagagctcgtccttccagttgttatcggagatgaagcttccaaactttgaaagcggagtagacaagtcaggagtgaatgggccattcaagtgaggctcgagctcggagaggttctgttggatggcgaagaaaaacagacaaagtcagataatgccagatagggtgagtgtgaaaaaaaagttgaacgcacgatctcaatcagctggtcgtactctgcgttctcatcggccttcaagaatccctgagcagcagccttgtcagcggcagcggcaacacccgctcgaccggtggcttgaaggtaagacctcatgttttcctgtgagtagtggacgaagatatccaccagcatgaaaataaaatgaaacacaatttgttaaaacgcatttggatgtctctagatgacgaagggaaactgacagtgtaggggaaagtggaggtagtagcgccgacttcggctcccatgttggcgatcgtggccagaccagtgcacgactgggcctccactccaggtccaaagtactcgatgattcgaccagttcctccctgagagcaaagaaaaaggatttaccaatcagcaattgcgtaccgaattggaatcaagaaaccttcctaaagacttactcggacagtcaactttccggctaggtggaggataagatccttgggggtggcccaaccattgagctgtccagtcagcttgacaccggtcacattaggtgccttgagctcccaaggagtgtcagtgagggcgtcgacagcgtctgcaccaccaactccaatagcgagcattccgagacctccagcgttaggagtgtgggagtccgttccgagcatcaagagaccaggggcggcgtagttctcgagaacgatctggtgaatgatacctgatccgggtctccagaactttggaaggcgcaggaggagaaataaaagggtcagaatgagcatcagcacaacgtcctatccaaattatgggtatggtgagtattgaagacgagagaaggataccgacctcaattccgtacttcttggcagcactctccaagaagtcgaacacctccttgttgctcacgatggacctctattagagtacgagaaggcgcagaagatatcagccgagtctatccaacagaagagagaacacgacttgctagatcggccgacaaaccttgagatcactctccgctccgtcgtaagctgaccaagagatagaagaagaaaaagaacgatacagtcagatcgatgtatcaaagtgttgcaatttaacgaaagcgcaccttggataagatggtcacaatggatggaggcaggtacggccgttctgctcatcccacaggtcatgaactgcaacaaagccatctgagcggacgcgtcctgcatggctactcgatctggcctcaacctgagatgaggaaaaagaccaggataggtcagtatatttctgataaacagacaaacaagagagcaaaaggaacagacttgaggtatgactgtcctctgacgggagcaccggtggcctcgacgtcgtcaaggtgagaatacaggatcttctcagccaaagtaagcttcgctccatcgggcagcttttgcctgacggccgagagtgttttgagcagtcgttcgtaaggcggtgtgattgagctctgccgagagagtatacatgaagaagaagcttgaacttttccattctctaataaaggtattttctttaaaaaaaagtgaatagtggaatgggatgactcacgcattccttctgagcgagcgtggggaaggcggtaggagtggcgaacgaccgagctgctcggggagtagccagcctggaacccagacgggcggaagagagcatggtgaagatggatatggaggggtgaagagagcagagaaagatcaggaacggatgcaagaagcagggaaagaaccaggatcaggatcaggaacaaggcacggcagccgacaagaaaatggaaaaaacccctcgagaaaatcacaaaaaaattcctcagaattacaaaatcgatcatttttcctccttacagttgtttttactcttctttcttcaatcttttttgcatctaccactttttttattttttccgtagtatattctaatacaccatttttctcctccctaatatccctctccccgcggacaattctctaatcggcctgttttggttggctgattcctcgcatctgtagtcgcgtatgcacgcaaccataaccttcagtatacatatacgcacaggcaaatgcccaagtgtgtcagaacgctgaactctcaaaactcggtgttgtttggttcttatactttcccttaaaaatggacacattttcttccaaaagtcaagaccaagaactatttccctttctcaaacgccaacatgggttaacccgactcagcttaacacatagttatcgtcaatcatgctcgatgacatgatcttatagttgcaagagatttgttgattttagggatccaagcacatccattcttcaatatttctcttatcgagaacagcatgtatacaacaagacactgacagacacatgtatatctgtggaagataaactctggtaacgaccgtctggacgtgaagggaggaagccgatcactctgttgataaaaagcaagagaaaactaccattagtcatcctacgtttctttgtttaatcgaactcggacgaaaacaagaagagaagacggcaaggtagaagaagaggaaaggaggagaaaacacgtacttcggtaaaagtttcgtcggaagttgaagtaaagctgtagcacacctcgatcgaatgaactcctgaaccctctgctcgaatgaagtttacgaacagtggaaaaaaaagaagataacgaggaagaaagatatgtgtcagtgggacaaacttttgcgaatcagtcgctgcctttgtctcattggggcgaacctcttgtgactgtgctcccattccttgttgacaattttgaacgcgatatcctcataaggcggtccagccttgaagatgatggtcgcaatctcgggttcttctttgtctcgaacgataacgtatgtcggagcctcttggttgttgatgagatctggataaaagatactgcaacacaccaaacaacaacagaggaaccgggtgtgaggactggacttaaaagaaacgagtctactccggaaaacacaggagggaagagacgtacttgaatttgtatccctggacaaccttggggggtgggttgtcagaatcataatgcgtttggttatacctgaaagcgcgtgaaagagatagatggacgacaagtggatatcagtttcagtcaatcacagcacaccagcacagaaccactcatgctcttagttctgacgcacttgttccactcgaatccagtgtgaactctgttgaagtatcttggctttcttggcctgtacttgtcttgccaggtgtaactcgtgacgtttccgagtccttcctcgatattgaagatctcctcgtcctcgtccaacttcttggccgcctctgctcggtagagcgcctctgcctgtaaatcggccgccgaggccgaagcatccaaacctgtgttgacgttgggtctggctgaacgaggaacgaacttggtagaagtgatttgccgtcgttgggcaaactgtctcgaggtccacataaatttgagactatcagttcggtatcgtcgagctaaaagtcaggtcaaaagattagcaaaaaacgaaccagcttcttgaacacctcgtcctcttccagcacaacaatcaatcggtcttcgtagctgaattttttagggtcgaccaactcaatctccatctcctcctcatcccagacttcctcgacgttgccctcggcagtctcttcctcaatatcttccagatccgccccaaattcggtctcgccagcggccaatcgactttgagtagaagatacgagcgcggccacatccgattgaactttcagagcatcttctcgctgacgaagtcggagttgctccaatcggttctgaagaaccacctcgtgcatagcatgaagcttagcctgacaaggcgtttcaagagatgaataagacgcgttaaataaacagcaagattgctaaccaaaggaaagcgacgatgaaaaggaagatctatttgacgtactctagccttccagacttgtaagcttctaagaagtccctcccaatagtctgtatcaaccggctctccactcgatagcttggcttggacagagccttcgagttgctcaagctgcacgagggacttgcccgagagcagattactaatctcggcctcgacggctgggttaggtcgggattcttccggaagggtagccgaacgaagctctcgaagacgagcggtacatacggtcagcattgactgaaagtgacattggagagaaaaaagtgagtggttgtcaagacaagaatagatactcgaacgaaagagcacgaacctgccagaactcgatgtttgagggagatttctcaagtgaaagatacatgttgatgtcttctcggagctcttcggtatcggccaatgtcaagttctaccgattgtgtcatgggatgagaagagaattgataactgttaatggagcacaaagtgttttggataaatggaggcgaacagctggcttacatcaaagattttataaggctcctctatatccatttccagaccggcatcgtcccaaccccaaccgctgtcgtccttgtcgagcccgtgtttttcttcttcgacatacggctgggcaaatctcaagttgatcgccaaaaagtcgatggccttggctctgttttctttcattctgattcccgctcgtcggcgggcttgttcgagatggaaatcatcttctttgttaatccagtcctccatcatggcggactcagccaatcgagccattctagactcttcttcctcgcgaagctgcatctcctcctctcgttccgcccgtcgcttgttcagacgctctagctcttcctgtagagattaacaacgatgaatagaggagttttggatcgcacaagtttagaaccatacgcgtcgggaacctgaccatacgtttggctgtctgaatgagagaaggacgaaccttggcctcgacccttctgatggcgtcccgcctggagctttcctccaaactgattccagcctttttgtctttctccgctttttttacccacttgaattgggtacccaaatttgcgtcgtggaatgggttgtctgtcgaggtgtacatcgagagctctgcaatcgctcgagcatcctctgcctctttttctcgccgggcagctgccttagcttccttcttggcagatttggcagaaggagacttggagcgggagcgatgtcgtctgtagaagaaaacgaacgatgttcagacagacaagtgagcaatctagttcaaaagaacagaacggggggggcaaagcaagtagaaatgaaggcagcctcacttcttgtccttcttgtccttcttttcttctcgatctctacttcgatcccgcttcttggaagacttttctctccccctatctgtttcatcatctctatctctatccctgtctcttctcctatcatcgtgataatccctatgcgaagagcttgtacgccggtctctgtcgtcgagatcatcgtacttcctgctagatctctcccgagatctgcttcggtccttcctggaagaagacggccgagaatctctatctctctctctatctctatcccgaggagccggggatggcgagcggggcatggctgagtgattgacgtgagagaatgagaaacagcgtgtgtgtgtatatgtgtgtgtgtgtgtatgtgtgcgaatgcgagaataaagaggtatgagaaatagaaacacgagacgtacgtaagtaaacataaatagatgaattaactgccaatcatctttttctaaaacccggctgattacctaagttgcccaaacgaccgggccgaaacctggacaatcgggcgcagtcatcggctcggcaacttgacgtcagaaccggaggagcctgtttcggattgccacaaacttgggttccttgttagggttaccgaccaagatcaatcatctacttttacgccctctcttttcttcattccgttctgcttcaacaaccatcaccactctcagttaacactcactacgaatatcaatatgggttagttcttccttgccttctgtgtcatactttagttctggctcatcatgtgtctgttctgtctttttcgttctttcttctttcttcttccaattaggacttgcctctaaactcgcagctgctcagtcttccggagctgctcctccagcccagaccggaggtccttccagtcttcctcctattcagactcagcagcctcagtacggccagcagtaccaacagcagcagcagaacaatccgtatggtcagcaatatcagcagccccagtctgcatatcctgcttctccagttggaggggctcccgcggttcctatgggcagaccgttgagctaccaagggtacgtccatacatttcaatctgttcttctccgatcctgcttagtttgactgatcttcagctgtggttttatcttcgtactatatcgtctgattgctctctaactgcacttctgtaatgatgaattaatgaatgaatggatggatggatggatgatccgaaaataaaataaaatataggccacctaggtgagacacgtcgtccgatctgttaccatcggatttcactgctgctgacacactgatcatctacttcttcctcgcagcggccatagccagacgactcaacaaggtcagtacggcgcgccacaaggccctgcccccgggtgagtttcgtatcatttttaattcgttcattctcttcatcatcagccggctcacctgtcgtccttcaatcttcgaaacgcgttttgattcattcagccaatacgcgcctccctctggtcctcctccgtctcatcagtcacacggaaagcagccaccaccccaaggctaccagcctcaatatggtcagcagcctcagtctcagtatggtgctccccctcccgcctatggtgctcctcccgcaagccagtcggcttctatcgctccaggggctgttcctttggatccgcgagtagttgagggcatcttgcaagcttgtgtcgttgaggttagtaaacctatatttctctcttggatttctgtgtgcatcttctatatatacaacaagaatctgacgctcggctatgtgttgatgcttgatatattgtacagcaacacatagaggccttttaccctcctggttcgttagggcccattgccaatcgaatcgctggaaatggagcgatcgatcatcttgcctcgacctggaggatgcccaaagagctagccatggacctggttggttttcgtttacacacgtctagctatgttgcgttcatactgacccaacatcctcttgctctcgtgttgtcttttggattaatagttgaaactctcgctctttgacggttcgttatgactttcagcgtgtcatcgtaagatctagctctatgaattatatcctgacataaagttcgattgtatctacagtcatacttctagttgacgattctgggtctatgttcgtttttcaaatcgtgtatttttgttgagttgatgtactcacacgtcgcgtactcggattggggttctcttcatcttactcgtccacagggccttcgaggaaggaggagaaagaattgatgatttaaaactaattctatctcgagttgctcacgcgtcaaggtttgtgctatatcctatcaaacaccatcatcagcccattggccgatgctgatacttcttatttgatgaatcaacagcttgtttgacacggatggaatccaagtccgattcttgaactcaaacgtggaaggaaacaacagtaggttccctaatatttttttccttcgtgacatattctccggagtctgttcttgacatgttgatgcgcctctctgctggtatatgtgttataaaaaagtcacttccgagcagggcgctactcagcttctctcacagatccgatattcaggattgactcctttgggcacgtcccttgacaagaaggtttgtactttggaaattggtttcagctgttccatcaaccctcctatgaataaacgaaaggtttagaagctaatacgtcgtgatttcatttggtcacttgtgttagatccttcaaccacttgttctgggacccgctcgagccggccgattagagaagcctgtcttgatcatcgttatcgttcgttctaatctaaacggctctggttcagatccttatatcagaataagaagcaaacgtgttcgctggttgacgtgttcggtatctttcacttttttttagactgatggaacacccgctggagagcccaaagacatggtgttccgagtcattaccaatgctagcaacgagctcaaacgaaccagatatggctcggacgcaatcagtttccagtttgcccgtaaacatgctatcatttttccaggaagagttttattttcgagcaagcgctgacgtctaatgtatatggtgaactcgctattttgtagaggttggtaatgatcttaaagcgcaggcctttttgggagagctggatgtcgatcctgctgttggagacctggtcgattgcacctcgaacgtgagggctttctccttgtatcgctgtcctttaatattgagatacagccagttctttactcacatcgagctgccttccttgaaatttcaattcagtacgagtcagaggccgacgagatgatgaggaagtctggcatggaactgtgggtttttgcttccgctgtcttgcgtttcttctgtgacttctggtttgaagcaaaagggtgtctcattttgatctgctcccttaacttttgacagaactccggagctctggttggttaagcttttgatgggaggaatcgatgtttcctacgatggttcgtttttttaacagccaagccgatgactgcttcgcgactgaccacgttttcttactttccctgaaatagaacaagatgaggttcgacgttaagaagagaagatactctgcctacctctcacctcgcgaaacctctaatcttattgatctcaccctccttgccaccatccaatctatcctgtcatgtgcgaactatgtccttgtattatcatcgaccattgccagatcaagtcttatgtgaaatttgccttacatagcatttcctcgtgccctaatcttctcaatgtctatgtttattcccttggtcctatctgttcgcttttgagtcatgatccaatttctgaagctatcgtccgaagaataacatttcttgtctcatatgccactgaatcaatcatgaattgaggacctgaacggcattccacgcttcgacttgactagcacaatctagaggagacgctccatcgttgcttcgcttgtccttctgtgctccgtatcttagaagcagttcgatagcgcgcacacttttatcgaaaagaagatcgtcgtatgagaatttgagaaaaaagatagagaaaaaagatgaagcagtgagtacagtagaggtaacgtacttgttgttgtaagcagctacatgcaaagccgtcaatccaccttcctcgtaagttgagtttgggtcaaccggttccgccccgtcttctcctcgaagcatttcttcagccgtttcaagatcgtcttgggacatcaatgataagaatgcctcggtccgtcgaaggtgcgggttggagtcaaaggcgatttctgatcgaatttcctcacccagatcaaagttggatgttaatctgatcgccagccatatagcaagtaaggaacgaggaggagatatgatcagcttcaaatagactttggtaccattgctctctttcatccataagttcctccttattaacggccgagacaatattgtacggcagaaggcgatcaggcaagaacttaccctccttcgtttcggacgtgaaccaacagcttctcagacccgtcgtccgcgatggtgacagcttgttgtctacagaacaaacagaatctcagcttatccacaggactgatctttgaagcgttcatcaagcaatcccagtggaaatggtccccgcatgggagctcgacatcatcaatcaagtgcgacggagtttcctcgtcctcgtcgtcctcgatgtcggaagatggctcttgagggacgagaagtggaagcgagcatagcgcacagccatcagctggagttgtagtcgctctagattttcctttgaggtcggccatgatgttttggtgtcgtgtgtgtttgtgtatacaatgagcaaaagatagtttttatcaccagacgaaatttctattatttttgcttttagtaaaatgacggtctaaagaaattttgaacatcctataacccaaccatcgtcaccatcatctcgacacatactttccaaacgccatgctctatgttattggcctcggtctctctgatgaggaggacatcaccgtgaagggtctgtcagttcgtccacctcttcttcctctggctccttcgcttattgtcttcataatgtgatgctgatctctccgcccgtattgtgaatgatcttcaggctgtcaagaaatcggaaagaatctacttagaggcttacaccagtatcctcatggtcgacaaggaaagacttgtgcgtccttttatctgtttcctgttcattgttctgtctggctggaggctgatgatgtagctttcttcttgcctcgttcgtaactatgtccgcccatcggctctcattcgaccttgctcttacaggaaaagttttacggaaaggaaatcatcctcgcccctcgagagatggtcgagatggaatctgacgagattcttcgtgatgccgacaaagtggacgtctcgttcctcgtcgttggtgatcctttcggagcgactacccacaccgacctccttctgcgagctgctcatctatcgatccccacccaggtgatccataacgcgtccatcatgaacgccatgggcgcgtgtggactccagttgtacaactttggtcagacagtttcccttgtattcttcactgatacttggaagccgacgagtttctatgatcgagtgaaggagaactgggagaagggaatgcatacgcttgttttgctcgatatcaaggttagagaacagagcgaagaaaatatggccaggtttgttcctttctttctttgcctgcacctttttctttcttcttgcctttgtcgcccggaacctcatcaggctctcatgattctcttcttgtcaattcctgttttggtaaaaggggtcggctgatttacgaaccaccgagatatatgtcacccgcgctcgctgtctctcagctgattgaaaccgaatccatccgtgaagaaggttcattctcttcttctcgctctgctttcacttttctctttatcttcatctctgtatactcaccatgtttctcgatcatttctttgtctctaggcgtccttcctccttcagaaacactggctatcactctctcccgtctcggcacatccacccaatccttccgagcaggtacgcttgaacaattatccacgctcaccgaagaagatttcggtggcccgcttcatagcgtcgtcattgtcggtaagagggttcacccgttggagattgaatacgcgggacagtacgcggttgataaggaggagaagggtagagagggtgaatggtttagagtcgccaaggacgtccttggtgtcgagttggagggtgaacactagatacgtatggggtctctctctcttcatttatcttccccttgttcggagcgtagataccgaacttgaaaaccagatccgtgccgtgcgaaacgtacaatcaaagaagacattcaaaaatatgtagtaagaattagagtacatcttccaacaccattgacaatcaggacaagacacagattaaggaggaaaaacatagaaaggaaccaggaaaagagagggtcggaaatacaacgtttcgatatctttatattctagtgctaggaaaacaaggctttcacttaactaggttcgaagagggctgatggcaaagacagaaatatagaaggaaacgagacaaaaacgaaagggaaagggagagagggcatttaaccacagtctagatggatcaaacgaaggaaaaaacaagcgtcagtagagtgaaagagttagataacaagaaatgagcaagaacagaagcccacgtacattcgttgagaatacatcccacagccgttccgtacttggatccatcgatgttaaggatgacaagcaaagcggtgatgacgcctccaattccttcaccagcaatcataccagcggccagggcaaaaccccaaatttcccaggtggcaggtcgtcgtcgttcccagatcatggcgatgatgcaaccaacagacatagcaatagcatagtagactgttgaaagcgcgatacgtggtaggtagcaagtcaacatacaagtgcttcgcgcgatctgtccacaaggacactagcaatcatctactcaccctgaggcacaacgaaagccagtccaacagcgttccagtttggaatccagatagcatacctggggggagcatagaatcgtccgatgtgacacaatgctgtaagtacgaaaggacgaccgttagtcttgagaacgatccacgattctgatcaatgataaatacaacaagactcgtaccagcaacaacggcaagaccgatagcggtcattccagaagaaagagtgacgggaagtgttggggaggatacagcgatagctactgctttccaggcgctcacggcgggcaaagagaaggggcaggtatcgatagtgggatcgttaatacaagggtaggccttggcaaagaccaagaagagcgcaggagcgaaagcaaaaccagcggtacttccagccaactgagcccagaactgagctcgaggagaagctccaatcaggtgtccggtcttgagatcaccgacacaatcgacagaatgagctgcggattgaccgacgacagatccagcaatgagagaagttcgctaatgaagatgagaggaaaaaagaggcaagttagatagctattgcttcaacacggggaactatcttctgaaacatatgcaagggcgcacctgagccgaagcgacgctgatgccctgtcctttagtaacacctccaatgatcaactgtccagctttggcgatcactccgatagggttggtatcggtgctgtatggatgcaaatgatcaacatttgactttcgcggtcttcccgaaaagaaaagaaaagaaaagaaaaagaaaaagaagaaacttacgttccactagcgttgactccgacgaatgcaaagacaaatcctaggatcaaagcgaggaaagagactccgggattaaggccgaactgagagttgagaaggcaaagggctcataatgcttagtaaaatcctgtacgattgaataagataaggacggagagactcaagcacacctccgtctttccaacgaccatagttgttacgaccgagatgaccataccaatcatccaggttcgagtagccacctgttcagattggggggcagggtcttcagaaccttcaggaacgatatcggtgatgtgagacatatcctttcctcgcttctctccaacggtttttctatataggggatagcacggaaaaaacaaatttgataagaaccaaggaaaaagcggtcgttgaacaagaaggaaagaaagaatacacaacataccgagtgttgttgatgagctgtcggaagattcgatagaacattggagcctgaaggaacaactcagtgaaggaggcgatcaacatgacaaggactccaggccacagaagccagctgaaggaagatacaagcaatatgatcgaaagtcatcaactgataaacttaggagaaatacgaatcaagagtgtacgaaacaaacatactatcgagcagttcctctgtgaggatcagttgttccattagccaaattgaccgtgctcattgcaaagttgctatggtatccgatgctctcatcgataacaggcgagtaagcctgcccggtggccacgagggagggaccgatgatggcgtatgagagaatggctccaaacatccaagagaaagcggcattgggtccagtcaagaagccgacggcgtgaaaagcaggagtgaactggtagctccatccccaattggatagagcaattgcgccgggtgctccccattgggagaagagccatccaaaatcccatccccacaaaattcccggagcgtatttagtgaggaccgtccagatcaaagaaaatagaaaggaaaatccaaggatcttgatcttcttgctagaggcttttcgagcggcgggtgtagaagccgaatgcaagtttcggatggtgaaggcggtggcagttggtgacgggaaggtcagcttttgcttaagaatatagtactttctcagaggcatggcgaagaagagaccatagaaggcagtgatgaatgacagggcgataagcgatccgatgtctttctctggagttgtcagaagcccaagttggtaaagggctacaaaaagatggcgcagaagaacaatgagtggatatcttggcggatagagacgaaagaaggagacaccgcaacctaccaggcacggcggcaacgaagagaccggaaagaccaccagcagatccagcagcagattggacagtaacgttctccttgggaccaaagtatcctccccccaatcgagtaggcagggcgatagacaggggtttcaaaatgctacatgattgaaaaagaaagggggtcagaggttagcgatcaagaaaccagataaaggtgaccgaaacgaaagtaagaagcgtacgcaaatcccacgatggatccaaatagggtggctcctaagaacatacaagatgtcaagtgatatcagcaaacctgttcgataaataagaaggagcttagcttctgaataaatgacttgccaaaggtaaatccagttttgagacccaaatacacattactagctccaacaatgaagccaaggacggttccgacgaacacggctcggaactgatggacattggaaagagagaaaagaatgatgagcaacagaagaagaaataatgagatagaggcatcaagaggtgctgacagtcaatgtctgtccctctacgggtgcattagggtcgacagggaaagggtttccatcctgtacgattggtcattcaggaacaaggtatgaatttagtcgtcaagtcccaaagcaagaaatctttgcgagatgaaatagggcagaacaactcacattgagcagaacgatgttctgtccttctttcaggctgaacacatcgttgtcgaccggatgtactttgtcttcagaatagtcttccttcttctcaacgtactcgttcgaatcagaggtggctaagtggtgagcttcatgcttgtgaatctcaggaacggacggatcgttccggtcgatattggactgttgaaacccagtgccgagcttaggcagggaaacgatctcggacatggtgcgcgagg

SEQ ID NO: 2598 - DNA, 10481 bp, Xanthophyllomyces dendrorhous
cgcgaggaggtgagtggtaccgatcaagagtgaaatgaatgaaatatctagaatagagacgggaagaaaagagtacaacgaggatagagattcgaagagcgggaagaaaactagtctagcatcaagacaggacgatagcgatcttttaacatagatttcccacagagaaccgtcttggagtcatctcataagaggtcgatcggccaatcagtcggctagtcagcgagagaaacttattgggaacaaagcgagagatacgaagaacaacaacagagatagattcgtcgtcgacggaatgccatcacgcctcgaggtcagttatgttagcaaaggaagagagatatttgcaacagaaagaggagaaaaggaagagacgaccatgtgggttcaaaatcccaagaaaggagataaattcagaagacttcaccatgtgggtcaagatgttagtaagactccaaggtcattatgtcaacagccgagggagagaatatgtagataggcggaagttgatcttgacgataaatcttggaaattaatctcggcgacgcgtcttgggcgtcgagcgccagttgccaagaacactaaaaatgcttgtatgatgaggcgatccggtggctcacattgaacacacaggaggtttctccatttgatgcgtgcgcgcgcggaggctcggtatttttatttttatctggaaattacacggcttatttgaccaaagcatttgatttgacggcaatattccccagctgttttggaaattacggttcaacgtggtgtccgtctggtccggagaagtccacctgtgtacatctcaaagtccatgaacactattgaagactcatcagatggattgttcatatctctgttttagaacaaagaagaaaagagtcgatgtatatcgaattgcagtgacctcaggaggatcatctttccgcttctttagcggtttgtttgtgcgtaaatatgcttatacgcccggctctacccatccttttgtttggatctatattcctccgaccgtatttgagattgatctggtgttgtactcatcctggcctttttagtctctgatgagacttaattcgttacatgcacttacatatacctaggttttatgctacttctcccctcggtgacctcctcggctttgactttggtttcggcttcggccttagcctgctgttaatctcgactgctgagcacttgatgatcaaatagcctcgagggatctatgaacctaattggatagatcatgttatttttgacttgacctaacataataaccaatgatgaatgacgtgcaccaaaagaccatgtttggaagtgagaaagaaataagaaagaaaaggaagaaggggcggagacaatataagcccatgtcgctcgttagcaaacaagcaccggttagcctgacgttttcatcttgcttcttgttcggtgaacgagccatcaaaaatgttcccacgcatccagccaaattcatccaagaatctgagagccaacctggatgctgagcccactaatgagagctatgtggtagatacatagaaaacaacacatgggcataaaatagaaacgtagataggaatacaccgctcacttcttctcaaacatcttcttgatggcatcagaagagtacgacttgggtcgctcaaggggcataccaagggctcggtcccagatgagctgggagaccacacccaacgtcctggaaactccaaacagaacagtgtagaagttctgctgggtgaaaccatagtgggtgaggagaacaccagagtgggcatcgacgttgggccacgggttcttggcctttccggcggcgagaaggatgtcgggcacgagctcgtagagctgtccgacgagcttgaaaagcttgtcatcaggcaagtgcttcaaggcaaactctcgctgggcagtgtatcgaggatcagtcttcctgagcacggcgtgtccgtaaccagggacgacctgtcctccgttaagagtcttccagatatactccttgaccttctcatcagatgcatcctgtccaatctccttctgcattcgggagacccagttgaggacctcctggttggcaagaccgtggaggggtccagcaagaccgttgagggcagccgccatggagaggaaaggatcagaaagggcggatccgaccaagtgtccagtgtgagcagagacgtttccaccctcgtgatcggagtggatggtcaggtagagtcgcatgagctcaacgaacttctcgttgtctccgaaaccaagctgagtggacaagttctgggagtagtcggccttggggtcgatggcgggggcgtttcctccgccgtaggtgtttcggtagattcgtccggcgatggcagggagcttggcgatcaagtccatcgagtcatcgaaggtggtctgccagtactgcttcttgttgattccctcctggtaggcctgggcgaaggcggagtcgtggttgagctgtagcgagacaaaggtgataggcaaagaaaaagggataaagggtagtcagttatccgaacgaatgtagctgtcaggtctatgaacgacagacaagactcacggcagtaacggccaaggagagctgagacatggggtgaagggtggaagggcaggcatcaaggagatcctcgacgaacttggggatggaagctcgggcggcccagtcggcagagagctcggtgacctgctcctgagtggggacctcaccggtaaggagaagccagaaaagagcctcggggaggggctcgtttcctcccggagccttaggaagaaggtcctggcactcggggatggtctttcctctgtagagtagcatcgtaaactcgtcagtctgagttatatgtgtgtgtgtttccgatgggagggaatcaagcttaccggaatcgaataccctcatctgattaaaagcaaatcagagaagacaagaaaagaaggttgacgggtgagtaaagatgaatctataacgacatgttgaatttagatagattacctaccagcatcaaggacggaaccttcagtttcacaagattttcgggcgttagtgattcaagatcttcaaataaataaaagagaggatgaaaaagataccaaccctcccagatcatgccctagggaacggaaaagaacaagaggtgatggtctgtcagctttagtcacaaacgaagagaaccatgggtggacgcgtaccttgatacctcgcataccactaaggagaccgaaagggttgggtatgtcagtgaaagctgatgcaggggataggaggaaaaaaatcttacccgtaagcctggtcgacggtgtactctccgaagctcttggctccgtgagcggctcggatagccttgacctgaaggggagagatgaatgtatacgagatgagatgaggcgagatagaaagagatcagccaatgagcgagattgctcggtgtcattcactgagcatttcattcgctgatgggccgcgaaagccgcaagatgaaacgtacgttctcaatctccttgggaatgagctcggcgagggtctccttaagggtctttgccttagcggcgtatcctcgagaaagtcgaggaatagcagacttggatacataaataaataagaaacgagccagaagacaaagtttgagcgatgcgaaataagtgcgatggggaaaagcagggacgagagaaaaaacccttgtcagtgatgaacaaagatgaaaattcccccatcaaacaatgcgatagagatcgaagaagaaactctcacctgagttctaagaagggatcgaagggaagtggaagccatgatgaacagtgtataggctataggttttactgaaaaagagaaagaagacgatgaaggtagtagtggttggggaggaggaaaagaacagagccaggaaagacagggcagttcagggcaattcagggcggcattgagtctcctaaactcggtctctcgtcgtaattactcttttcacgattggaaggacggagaaaaaaaagcgcagccatgacatacgcgcagtaggattttgaaaaaaggcggagggccgtgtgaagcaagctcggtgctcctccctggttttaccgggaaagccctgtgtgcctgggtccgccggctcaggtacgggtgaattcgggtagatctgccggttgggccggatagatgttgttctgggattttcttatgctgccctatgcgtttgtctcctcatctatatttctaggttcagagctcatggagggacttgtctcttgtatcgatgttggtcggttagaatctagccagttcttggctcgagtaagcgctcaaagacggaaggagataggcagagcagtcattcgtccagaaaagaactccgactatgacggtctttaaagctcaaggtcgagcgagtagtcgtgtccgacaaacatcggatagattctttggtggaagagcgtctggtccatcatagaggattagatattgagtttctaatggtcgactgatgccctaagcacaattcttctacagacgacaaccaatttccttttgcttatcaagtcatctcgctcagatgagcatcttggtgccattcaacaagaagcagctctaatagtgagatctgattgacctcgaactcagttggtcaccatgtcaaatcttgaagaaaatatatagttgcagttcaagcggcaaacacctgagattactttccgctccgcataaccatctcacttgtctaaaccccaacataatatgacacctgcaaacgtccctgttccgttcactgtttccttcgctcagtatgacgtcgatcgaatgatggccaaggttagagacaccaggctgcctgctgagccgatcgtgccgggtgcatcctgggactatggaatcgatctcgaatggctcacaggactgaagacaaactgggcggatcagtggagctgggcagaggcagaaaagaggatcaacaagtcagtctggttgctaatcttctgactccttactgaccaagtcttcagcgtttcttagctcgctgacgtcctgacttgatatcactccaagatattcacattttcgtgtcgatatcgaagaaatatcgctacactttgtgcacatccgatcgagccggccggatgcgattccactcattctatcacacgggtggccatcaacattcttagagttctgggaggtcatcgatggactcgtcgaaccagcagagtctgaacagcctgcgtacgtgtgtacactgggttgagaggctgccaagcccccttggcttgtgatactcacctttgggttccatcattccacgccatcacattgcgcttgtccgctgtgttctttcatatcacagtttccacgtagtcatcccgtccatgccaggctatacgttttcttcctccccgcagagaaaaggatgggatgtcatggacacagcgagagtatacaattcgttgatggttgaggtcctgggttatagtaggtcattacctctcaaaattccactgtagggagtgcaccttcttatctttccaccgtcaaatgccttgactttcttctcaaagaaacctatagttgtgcagctggagattgggtatgtcaagacgtctcagattctatgcgctcgttagactctttaaggtttttccctgacataccatttacctaatagggtgctaccatcaccgtcatgcttctcagcaaccatacggcctctgctcttaccgcccatttcacctttttcttcggccttcctaatctattgaacccgatccagacccttcccgccatactttatgttactccgttcgtccccagaagtatcagccggtgtttcctctcttgggtgtacaccgatacagagattaaggcaatggatgagctgagtaggttcaataaagaggagagaggatatcatgccatccagggctcgaaaccgatgacgttagggtgcgcgttgtacgatgacccgattggaattctgtcctggattggagaaaagtatcatgtttggtccgatgtatgtatattcgggatctcctctctcgtgcaatgtgcgtactgaactgttgacggggcatcgctaatgactgatttctgtactggtcttacctcgtctcagcctcttgcgccagctgctccttccaagattgattccgactacatcatcacccagacggccttgtactttttgacgaactcgatccacacctcctttctgtatgtacgacacttcgtatatctaccctggcgcgcgcttatcttctgttctttccgttgtgtaggccttacaaggagtacattgaggatctcccgtttaaaaagttctttaccaaagccagacctgtcggagtttccaactttcctgctgaggtcatgtacgatttatttcctctactcgcgcggtgtacgattccgtccttgatggcacaaataagccaacgtaaacttttgagcgaaacctttggttcacaggaaatgtcctaggacgtggctcgagaacacatggaacctggtgaactacaaggagcacgctcggggtggacatttcgccgctgttgacaaccccaaagcttttttggaagacgttagggagactgtgagtgggccaattttctttttctctcttttaaaacgaaactttcgaaattgatttgaaagaacattcactcctgacacggccacgctttgatcaatccgataaagatcgtcaaaggatatttctccgagttgtccaagcagtagagtctgttgaatgtaacatcctaaacacaaactgtagcctgcctttgtctaggtactcagtagaaaacgttggtatattcttctgtcttctccgtttcgtctcgtgtttttttcgtatttctcgtcttcatgatctcgtatatacgatggctagtttttctcttttcttttctagttctctcgataattttgcttacgccttaaattgatgtgcagatttgtttggaagaatcaggatcagacgttgaggagattggaactgcgtctaagtaattacttcaacaaaccaacacaaaaagctccctagattcatcagaagctccgtgtttgatcacacttatatccttcatcctaccgggaccctacttgttaatagttatgtatacgtgaaacttgtgtagccaacatataaaagaaccggctgcgggttgagtaaagttatggattaaccctaactactactgctgctgatgatagaacgcccggtgttttttttcactggtgacacccgaagggtacacttcaccttcttcaatcactcttatcctcccttctctttcaacgaggagtatacgcttgcctagagacggacgtttcttgatccctcataagctgtagcagactttaaacaagagacgaccatcagcatggctattcttttcgcgctccctcgccccaaggttttcctcattatcgcgctctccctgctttcgttcactttgctccttcacccagcctctcccgcatcgtatagcagaatatacagctacgtccctagcaagtcatctggatatccaccgaacctacccgatagaattaaaggcggcttcgttaacgataccctcggcctcggtgccattccagatgctggcagctgggaagataggaggaaggcaaacgcaacgtttgtcgtcctcgctaggaattcagacctatgggacatcattccttccattcaggtgaggtctctctccattttgttctcgcaagacgaagagaacgaaaagatctttggaaaggcacagatactaatgcggttgatatgtcgtcggacacctctcgacgggcaattccttacactctagcaaatggaggacagatgtgagtgccctttagtatcacacattggtcttgatacgactgagttaaactaagcctcaaatatttttgttcgtcatttccctgactgttctctcgatagttaactggtgggcaggtgtgtatctttctcatttatggctctctgtcttgctcgcatcctcaaagagtttaaacctcttctttgtcgaaccctacttcaggctatgactgggtctttttgaacgatcaagagttttcagaagagttcaaaaagtagatactctttcatatatctcaagactcttccgtcctgttagctgtgtagagctcatagctagtggactcggcaaagaatgttaaccgttcaactctacttatttagatacactcagcagattgtctctaccaccgcccattacggtctcatctctcccgaggaatggaaccagcccgactggtaagatgtttctgccttttccactgggtgtgttcaacacttcctaatctcctcatatcgacgtccgggatctattctttctttatcttttaggatcgacgagaacaaagctgctgctgctagagatgacatgtttaaacatgttagtcactcgcgttgcataccatcgtctatacacactcttctactcgggactatactgatgatcttttctatatcgtgtcgtatagaacgtgtaaggagacgatcaagtctttcctgcttctgaagaattgattgtctaatattcttctttttatagtatttatggaggctccgtcccttaccgaaacagttcgttctattatcttcgatcgcgcatctggtctgtgtgaactacctagttataacacgcagagggctcaaaatgtattcctgttgcttaattttagtgtgcagatataactctgggttcttctaccgacacccactcatgatgaactaccgatactactggcgagtcgagcctagtgtcaagttctactgcgacattcactatgatcctttgtgagttcttgtttttcttttccctcataaacacttcgcgagatatattgatctgattttggggttccttgtaatgacagcttggtcctgaaggatgagaataaagtctatggtatgagccaaattcatccttctctatctctatagtctgcagaggatatcaaattgactctatacgacttccacaaactaggattcacactttctctatatgaattcaccgagtaagctctatccttctttacactatacaactcatccagaagcgcttccacttacatgccttatacattcattttcaatctcttaaatagaactattcccacactgtgggacgcaaccaaggagtttatggagctccacccagaacatattgttgagggcaactcgatgggcttcttaagtgatgacggaggaaaggagtacaaccattgttcgtagttcagctgtccgaccgtctgagggtttagtcgtcgagcgattccgttctcatactcttctctgttccgtctttatctgatcgcaggtcacttctggtccaactttgaaattggagatcttgacttttggaggggaggttcgactcttttccatctgaatacaactctttgtcatggatgatcatagcatatgctgacgttctgtctgaaaatattgaaatcgacatcaaacgatgtttcggcagatgcatacatggactactttaacttcgttcgttcctatttgccctttgtttgtgtgtatgtgtgcgcgcgcgcgcataaagatgatcgcttactctttcttcattctctttctttttcaaatgatcgatagcttgaggcaaagggagggttctactacgaggtttgtcctgcctgcatctcactatcttttctgatcgattttcgcagacaaccatggttgcattctgaacactccttcttgttgtaatttatctagagatggggagatgcccctgtgcatagcataggtgctggtcttttcgccaaaaaggaacaggttcacttctttagcgacattggttactaccacggcccatattcccactgtcctacaggcgaagcccattcggccggcaggtgctcctgcaaagaggaggacaactttgacgaacactggttctcgtgcacgaaaaagtacaaagctcaattccccaacgagaaattctttggatctgaagcttgaagacaacgtatcggaaattataaaaatcaagtctagaatttctctttctctcttgccattcatcgtcttgtcttttgcggggttcaagttgtcttctgccttcttcttcttctttcattatacggactatcttctccttcttgtctctgtcaatcttatcaacctcatcgttcctgtctatttcttccatacatttcctcaaccaggatatgctctccactctcactcttctttttgcatgagcttcatccaactccgtcataaggaaagaagaaaacgaaagcaaactcaggtgtagtctctcggacttggtagatcatcgttttttcatccaatctctccacagagagaaacaatagacttgaagcttaaatgaacatgcataaagagatacactcgagaaaaaacaagggaaaaggtgaaacgtgaatgattcggatcgttcatagaagaatcgggatttatgacaagtttgtctat

SEQ ID NO: 2599 - DNA, 2025 bp, Xanthophyllomyces dendrorhous
gatatagaaagtatgtacacaaataacgagaacgaaccatgtcggtagccaatatcggagaaccaaaggatctgctccttcttagcgaacaaggcggctccgatagaatgaactgtatcgtgttatttagtcgaaaattgcaaggaggccaagataacgggatcagagagaaggtttgagaaaggttagattttgttagggaaagtcagagatagagagaacatcgaacctggagcgtctccccatcgttcgtagtagaacccgccctttgcatcaagaaagtcaaagtatgcctggtacggctcggaccgccagaagttgaggtctccgagctcaaagtttgaccagaaatggcacttgaagcgatggagaagaaagagagcaagaggaataggtttggttatcaagttttgtacatatttagagtcgaagaaagagaagaagtttttcagaagaaagcaaccaaaactgaactcaccaggttgtagctaaattgacgtacgcgcatccaggctcaataatcagtcaaccaccttcaaaccctcgagaagaatagaaagaatggccacttactgggcaccgccgtcgtcacttaggaaagcttctgcgttgccttctaccttgaggtccggtcgactcttcataaactccatggtcgcctgccagagcgtggggatcgtctcgatgtattcaagcagactgagagtaaacccgtacactgccttcttttgcttcatcaccaggaaagggtcgtatgctggaatggttgttgagatatgtaatctaagctgagaaggcggccaagaaataagacgagaagaaacgagaagaacatacggagatcacagaagaatttgactcctggttcgattcgccaataataatcaacattggctagcagcgggtgtctgtagaaaaactggaatatgaatcgcgcgcgaagttactcgtcaatagcaactcgcatagtggtatgatgcggaacaaccgtccgttcgagataactgactccagaattgaatcggcacactgaaagatcgaataagaaagataggtcgatcagaactcgaacagccattttcttgcttagattttcgaaggaaacgcactgtttcgatacggaactgaatgctacatgcgagatcgtgatccagaattaccatcaaagtcgttaatctatcagtaagaatattttcacggctgagggaagaatgacggataagacgaactccatagatgacttttttcttgatcatttcttccctagcagcagaggctttctcctcgttaatcctgtgtatgtgtgtgtttgcgagaaaggtctaggtcagaaggggccatttgatccaaagagcgaaagtattgagacggaccaagaaggctgacgccagtgatcaggctcaactgttgataatcatgtgtatgtgtatgtgaggatcggatgcaaagaggatcagcaaagttatgctacaacaagagagtgtaagagatagccaatatgcagaaagtgtaggaaggcacagaaaagagcgctcaactgagtccataagagcagcgcgctttagtgagtccctgtgtgtatctgttgatgtacgagcgggaagattttcgtgaatcagcatacttgacccagagatatactcaattaggggaagagaggttgagggcgtactgtttgaattcctcgctgaagggctcctcgttcaggaatacataagggtaattagcccctttacagttttatcgacgatgtgtttccctcatctgttagctatttatatcagaacgaacagctgatagaaggatgagtatgagacatacaatggttgaaagctcgctccatctgcttaatcgaatctgccaacgaccacagatccgagtttctggctgatcaaggaaagtcatgatgattcagatagcgcgaggatcagccaggtagttagagagaagaaaacaggcaaccaagagagaagtaaatagaaagagagaagaaagtaaaaaagaaaaaagaaagaaaggaaagac

SEQ ID NO: 2600 - DNA, 22459 bp, Xanthophyllomyces dendrorhous
aggaaagactgtgcgcaagcttacccaaaatgacaaaggccgcgttaaccttttcaccacttctggtgacattcccggccgcactttcgaggtccctccaggtagacggatgaggtttgactccgccactaccgtactttccgtccgaagatttgcttccagcaatcagaccagaggcggtgtcggcgtaaccttgatggagtgctgagagaagaaagtgaaaggcaaactgatggacgtgtgaccggtggttgttagttgtcagtttgccgggaaggaaggtcaagccatgtggaaaaccgaggatagaacaaactgaccaaagagagaaagatcaaagggatcagcttcaatggcgatctgagggacatcagaccaaacatgagtgagcagttgtgagagacgagttcgaacgggttgatgaggtttggatgtatggctattagagagaaggtaaagaggaaccgcggggtattttgggggatgatgcttatgtaatagaagtatgcttacataagccatcggtttgttgcaaaggtctttgatgttcgttatcatcttatctcttgatctgaacaaatatatacacgtgattcaccggccatttgcgacgctcagttagctgttggcttgctctgagagaggaggatgactacgaggtgaccgagatgtaattaagcacgtgaaggagagaacaaagggccagggagagagtgggtacagagactacaacagagggagagagatagacagagatggacagatggacagatcgggagccgatcgggtacgaccgaagaagagtgcctggttcctgatcttcaaattcaaaccccgtccccccttggttactgactctttggtagaagagacatgcatcaggtaccgagacagcgcgaccatcaaaggaacgttgcatgtccgagatgacgggccgccagcactggggatgctttggaaagagctaggctcgccatgagaaggaagatcaggaacgaggaacgaggagcgtggaacgtggaacaaggaacaagggacgcgaaagaggcactagcaatatacatcataccgggtaagataagaccgaaccaattcgagaaggatcagagattctcttcttcttcttcttctactcaacatgcactcacccgatcccattcctctttcaaacaacctttacacaacgtcgcagctcactctcgccattgattcaggtcttacttccatgtctgccttgaacactaccgcattggccttgccaaacacatcctataacgggctcgggatggtccctcaaatgggatgggtcagtcggccacgcaactcatatctctgtttctgtctctcaaagactcatatgttcctgttggatctttacatcatagaactcatggaacacttttggatgttccatctcggaagatatcatccttaaagctgcacaggcactggttgacagcggtcttagtgagcttggttatacatgtttgtaccaatctttcgatgtatcaacccgagaaacctgcagataaaatggaaatgaaagagcaatccttcttgattgactgctgtagacgtccttatcgacgactgctggcatgcttcggccaggcattcggatggtagaccaaaagaagacccaacaaagtttccccgaggactgtgagttactccgatcatctgtatcttcagacccagatctcaccgcgaccggctcaactatcttcttaacaattgcgctttgttcaggagtgctctggtggatgatatccacaacctcggcctcaaggttagtgaaacctactttgatctgcttccaattccttctgtagctcacctcaagagattctcgctctgcttctattcaggccggaatctactcatccgctgtgagccttagctttacactcaattcagtaagacaacgactaacatttgtgcgctcatctagggtatctatacgtgcggtctcgagtttggttcgttagggtatgaagagattgacgctaaagcctatgcgtgagttacatctatccgctaagtccagcatcccgaccatatctcgatgttgaattgttccttcttcaccgaatgttatgctattgcagagactggggtgagtttcatctgaaaccttggtttacaagtagagagacgatgtgtgctcatgggtttcctcaacatgtcgatcaaaaacaggtttcgattatctcaagtacgataattgtttttctgccggccaatttggaacagcaaaactctcgtatgacaggtttgtccctctgcgcttccttcagacgattctcaatgcgatgcacaattgactatccttggtactacagatacaaactcatgtcgaacgccttggtcaatacgggccgggatatattttactctgtatgcgttttatacctcaatatcggactgatgccgagcaccctaaccctctctttcctgtctgatcttctagatatgcaattggggacaagatcaaagtgcgcacacgctcttcatttgggcggatatcaataatgatctaatacaatttctataggttggatgtgggccactacaatatcgaatagctacaggttagtctcgcttccatcctcctttttacccctcgtccaaagcttatggttcgacctcttttttattctgcagaatgagtggggatatcgacgatgtttgttcaaacctcgatctttctaacttgttgtcactaccgctgaaatgggtccacctctcacatctgttggacttgatcgcaacatatagacattcaatcagcagaaagattggtgtcctttcgatgtaagtcatacatcttccttcgatcgcctacccggatctcaccaatagctcatgtgtcttctctaacacctttaggccaactcgaatgccccagaagggcacgggtgctcgatcgccaacatattagagaaagccagtccgatcttgcaaaagcaggtcagaggcaagtctccttttcagttatatattttccatacagagatattcacgaacgaggacttgacgtcttttcttctgctctctcctttaggcgcttgggccgacctggatatgttggaagtcggaaatggagtttgttccgaccttattcatcttatgcgcccatcgttatgtgttggacgcactcaagactaatttgttggtttggaccctttctatagggcatgtcaaccgacgagtatatcgttcacttcaccatgtgggcccttctcaagagcccgttgatcttggggaatgatcttacgaatatggttcgtttcatcttgtctcgctcgtcatttcagacactaaccaaattaggatcaaatcttctgatgtaataaggacgaggtcgccaagaacattgtctccaacaaggctctcataggtacgttcatatcttcttctcatccttccccaggcttatgggctcatttcctgttgtttgatcatgagcagccatcaaccaaatcatgcaaggaagcgcaaatcctgctcaacgagtgaaaggaaagtttggagaggtccagatttggaagggcagccttcctgacgggtatgttttattctttcccttttttatactcgatcgtattgataaaaccggaaagtattttgtctggttttatttgcgctgtatgagagaacagagcatacacagtggcaatcatcaactttacagatgaggatatcattatggacgtcttattcaaggacatcttccgggatgatggagagaacgtccaggctatcaagttcaaggctcgtctttgtatttatttctttgtctttctttcttttctatctttatagtaaagcaagcgctaacccggctgacatcttttctttcgtcgctcaacttcaggcggtcgacctatgggcgggattcttctattccaattccgaggacaccgcattcggaagtaacgatttacctgacacagtgtctgatcaattatcccagcttgagatccgaaagcatgccggacgattctgggtgttcaagcctattgacgaggaagaggagaagaaagttttgatcggaaagtataacatgcaatcttcgaggtctgtttagacgggtcggatagataaatttggattattgtcgagttgcaggcaggtagagttcccgccctctttcttctctttttgaagccgagatatagtctttagacatttaatcttcaaccaagcgttcttaatgcccttttgctctctttcgcattgtatataatatgtcaaaaccatatatgggtacatctgttcatccagcacaacactctaggattttaattagggcattgactcgcccttttcacatcaggttcagaaacaggagattcatcgtgagaaattattgtttcctctagaaatatgatgtaagggacttaccagtgtccaacttcaaaccgttaggagaataaccagaaacattttgttcagctatctgaaatcgagcaaaaagaggaaacagcacaggcgagggtggaaaaggcaaagaaagcggaaaaaaagaaacaaaaaaagaagatatacacataccattatgacatttgtagcattctagaggactcgacagacgatagtatcaatcaatttaattggtcaagagaactaatgtgtcccaagttttgggcagttgaaaaagagatgaagacgtaccatctggcgtgctcgatcctcctgcgcccctgccaactcctgctcctgctctagaaccacctcttgacctgcttctggatccatcttggttggcgttgttactgaaactattattgttagtattatcgtttcctcttccaaatgatctaccacctcctcggccatctcgtgcatactcatttgggcaattactcgcccaatgaccgggttggttgcatttgaagcattctcctgtcgtcccacctccgttagtcggaccgcctccacggtcggatgaacgattaggtccactcctgatactcccaccaccgccattggccccgcctccattaatacgttcgtcgtcccattcaaagaacttgcacctagctgcttctgaattaggacaaacccagaagactcggcctttgttcggtccctccttgttcaccgttcgttgtacagctgtcaggttacactggcaacgaagaatatcacctctattgctgtttgtcctctgctgttgtacaggacgatggtttgatggctgacaatatttttccacaaccggtagagatcaagtatcaacatatttgttggacagcaagagacgataaaagacacatactgctatcgggcccgactgtctttgtggttcccccgatacatcgtcaatccactcctgaagttcgtttaacgccaatcgttagcctgtcttgttatcattctcaacaaggaaatccatgaaatgattttctgactcacgaagaacccacatccttccccttgaggggccgaacatgcccaaaaccttttacccttattggcagtgtctcgtaatactgtcctttccacagctggcttcatacaaccacatctagttgtcgacgattcggaagttctggttgatagtccagacactcgagaccctgaagccccaccaggtcgaactgatgtagtgccatcctcttcgcccgagccttctttgtcttcgcgtgcggttcgcgatcgtgccgatacattaccagttcccctgccccgcgtggcggacgacgtccctcttcccccgcgggttgttctagcgctaggaaaagacgcgcttcctctcgcacctcttgtccctcttgcctctgttcctcgaccacgtctacccctcaacggtgcactacccgggccaggtctgtcatgattatcatcatcgtcatcgtcagacctgttgctaccatttcctagatcattggaagtgccccttgtaccatcattaccagtttggccggagccgtctggtaacgtgaggatggaagtccagttagtcttgctgagtataaatttgattgtatggttgggaaaaagaaaagaaaaatgacatgacacctaccatccctcagatagcgtatgactacctgtactcatgagcattaaaaattggtcaatattcagacaaactgtcttctgaacatcgagaatatcgagaacataagaacgtacctcagttaacactctcatttctcttttggcagtgatgaaaacctctttatattggttgagactttcataaagaacatcattcttgttggcgattccatcacagatgagctgcattctatgttccgtctagatgtttgaattttaccgaacccaggttatgatatcatttgatgagccgggtcatataagcgtgaatatacaaaacacatcggctaaagtggagtgcatagtggaacagacagacctcgcgcctcaaatgaggtttgcaaactgatcggtcgattccaatccgatcccaaccttctaccagcgcgatccctaagttcgaaggaacgagatacttggtttgaccctgtttctgctccatcacgtattctcgatcgactactttggatatatgttcagcaatagtcgcgtccgttcctgtgatatccagagtgattttgaagacaccggcgttaacttcatctgcacatcatatttcgctcttccatggtgttctgaataataaaggaaaacaaaactgaccaactccattttggtccatcagggtgactaagtcggcctcagtgagtaatgatggcgcagtagtatggccctccttgagctcacaaatggtgggaacgaatgtctcgcctaactggaagtcagggatctcatgtgtggcccatttgtcgtaaggatacacatccaaatagttttttgctagtaccactaggccttttttgccgtcaagttgagaataagagaaagtcacgctcgcaaaaacgagtcatgacctgatgtcaagaagttgaccaagaagaaaatagtacgtaccagatgcatggaacccctcgcttgagatctctattccgaccgtcgtcgtccttccttctgcgtcttttgaacaagcagccaggaaccggcgaacgacgaaatcatacactcgtttctcatcccctacaggaacattcgtccatgctgtcgggtgaattggtggatgggctttatcatttttctttccattccggggtgtagaaaactcgccgtcttctagcctaagagagtttggttatcaagttgagttagctacggtgagcattagagaatctccgagtagagaggagagagcaaacctctgagcgaacgtcccccaagttggatcttgtgtttgctttcgaatcagagccgagaagtcgaacgccggatcgaactgatcggtttctgtacgtggatagctaagaaaacctttctgatagagcttctcggcatgctgcgtcgacgaaataaattcattttgttaatgcgacacgagagtaaagcgtataaagttacaaacacaaatatgcgaatcattagagaggagatggtgagcgaacctcaagaacctgctttggcgacatatggagtagtctcgatcctgctttctgtagctcgaccgtggttaacggatatggcttcctaagagttatgtcccggaaggaaagggcgcatgccagttcaataagaggatcctcggtctggttcagtaaacagtaggacagaccatttttttgctggtttgttttcaaccttgacaactgtagcttccgggttttccacacagcactcatataacaatgcggcggacatgaagtcaaacaggtggcctcggttccatgcgaattgcacagtctgatgatctctttgtagagtcacgtcgatgaatgaaaatgcttcaggccgaaaagcttgaatttgaagataccgagcgacgacaaagcccatcgtaggaaactgacatgctccttgaaagccaaacccgcgaaggataaaacaccccctcgttgtagcacgatcagtacgcgcgcacgattcagtctgataacacagactgtatacaagagaggaaagaagctaagtgataccataactaatcacatgatcctttaattctccacaagcagactgaagtgccaacgtctgcattctggtgaatgccgcacctgtcctaagatccagttctattcgagcttccacggcagcagctgataacatatcaagagcgactggattccgagcagcgttgtggatctgtctatagcgcgcgataagatagcgttagcttgttatattgatgtacattttcaagagggcccccaaagcgcaaagggggagagaaagaaggacatacgcaggaataatggcactaaacctggaccgaaggactttgatctgacgattacctgctcgacagtgacccaatatttcagatccaatatgttctccctctctatcacaatcggtccagatgaggaggagatcatggtctcgcgctagcttcttcaaattgctgacgaccggtttcattttctgtcaaaacatagcgaatgagttgaatcagcgacagggcttggctgtatcttctccgtgttgacgcttcgtacgttccatcgttcgcagtgtatactgacaggtggaacaaattctacaataggggcttcgaacaactcgaacggttcacaactactccaccttcgatagtcgtcatgaaagtcgttcgagttgacatggcccaggacggatgtgaacgtgaattgaaccggttgagactggggtggcagtttgtactgaaacgtgtagttcttcacaaagaccacaccaggtacattcgactagagaaacccaaccaatgtcagtcaaataagttcagcatgtgtctctaaaccattctgttcggactgcgaacgaccaggtcgaatgaaatatgtgcaaacactcaccgtgtcggattgaccttccgacaagatcctggtgagctccttagcgatcgatggtttctcggccacacataacactcttctcggcgatggatggatgggcatcagagaccgatactcatgagagatgggtgatggagatgctgtcgccgttgatgatactgttgatgttgatgacgaaaggtggaggtggagtttgccgagggttggaatgactacaaacgctccgtaatgaattgtaacaatttgtagtcttttctagtgtagtacagcatacacccgcccaccacgttgcagatagcatacagcacactttcaccttccacaagacagcatacatagatcagacagaacatatacgaaagccttttcagaatgagcggttctctcagccggttcattcctaggcatcagttcagattcccaaacaactttgcctcatggcatccaggccacatggccgcgttccagaccaggatggcccaggagcttatggatatcgatatggtgattgagtgtcgagatgcccggcttccactcacatcaatcaacccgcagttagaagagatatgtgatagagcatggggtcagggctgggctcttggcaccggaaaggaaaagggtagagttcgggaacgtcttgtggtctacaccaagaaggatctggccgaagagaggttcgaagaggtatgttcagtttcatacgttctcctttgctctgttgccttgcattgacgtcgctcttttccacgggattgattatgctcagccgctagtggctgcattcaagaagcatgccaatcaaaatatcatgtttgctgatacaaagaatgtgtcggatatgaaacgagtccttaagagaggtgtaggttagtccctatgttcatgttaccgtcggccttgagcgacattctcactaccgaatgaatgtatcgcatcctctcttgatctttctagcgttcgcaagaaaatatcagtccactctacttgacatgaagattttggtcgtaggtatgcctaacgtcggtaaatcttccctgctcaacggacttcgtcatgccggtctaaagagaggttcgtccaagttttctcttagagctgcctgtgaactgttcatgtgcttctctatcttaaacaaatgtatttgtactctgttcctcttctccaccgttagattcgaaagccagaaaatccaaggtgtttatgacatcctcttccccgggtcacaccaaaaagtttacagggacggccaagattcacgaggatcctccgatgtatgtgtacgattccccgggagtcatggttccttggttcggagagggagatgaaggagcggatcgggcaatgaaatgtgcagtcacaggtaagttatgacaatgctcctctagaaagaggaggagggaatagatcgttgatccgcactcgcgcgctctctcatcctagaaatgttcaatggctaactttttctcttactcttctctcacattcgtctgtgggtctctctcttgataataggctcagtaaaaggaggattgttccctgatgatattgccgccgactaccttctctacaaattaaatttacgtgtgggcgaatctgatgcattacccatgggccacgaagaacgaggtgacacggtgtatctctattatctttcgtcgttctagattgacttatttcctatcttgtttctgtctcacagtcattccatggcatttcgggctaccctattccgaggaactttacgatccgactaacaatatcgaccacttcctttcgcttcttgctgcccggatcggcgctctcgagcgaggcggccgaccaaatcttgagagatcggctgcattctttctaaaccacttccggaacggcaagtttggacggtacacgctagatgatctagaacaaaaagaagatctctacgccgatcccgatttctcattctatcccgaagacactccttctctttgctcatccacgtcttctccgtcgtcatcgccatcaccatcattgtcgtcgtcggcgtcatcgtcagtgtctacttttgattcttccaacgaacctcgtccctcagaagtgaccagcagcacagagctagataccgactcaagtacagatctcgtctcttctcaatctccaagtcgagcggatctcgttcaaaagacacatctgaaaactctcctccctgcccctcgaaatcctattctgaatgaagccctccaactcccccgatcattcgaccccacgaatccgccctgggcaccgccgcaccctggctccgaagctttcaaacagatgactgttttccaacctccaatccttgccccctctgatatctgggaaaaggtctctgaagctgtgcgaagatatttctttgggaaagagcgaagagaaaaccagatcagtcggacacaactcaaaaagattgcgtcgggagagaagagggcggtggcaatcggccgcgcaaagagcatgttgctggagagacagcgcagagttggtttggctcagagaccgatggtcaaaaggattgccgccgcaaagccggaatgagactcgctgggttccatcaagtctttggaagctcgccaacccttctgactgtactgtatttaaatattccacgaaacacacaagcacaagttcttttgtgtggattaacatatcagctccgggagagaatagggccttagcaagttcgaaatggtgtttcttggtctagacagcaacaaaaaaagaacatagacaatcgtcttctaattaaatgcccatccatccagatgtacaaacgcttctctctcagaacattctttcttcctttgtcggcattagcagtgttcacatacgtgtgtggatataggggagaagagagaagagcaacaagagtgtgtcacagttggaaggtcaaggttttgtttgtgacattagacaagtgaaaggggaaagaagaaaaagcgccctaaggataggaagatgacatgtttactggaactcgtcggcttttcctgactataaagccgagacaaatcggataagaacaaagaatgaatcaacttggagtttgtttttgacgtgagaggctaagaaaccgagatgagagcttacgataagtagacctatatagcccagccacacgtttgagcgtaaaagtaaaatcaaaccggatcagaatatgtaaatatcgggcatgtacaattctagttggcaacaaagcagactgatacgcaccaacaatcaacccgaacaaccccaacacacttccgaagatctcgacaatgagaatcttgacgaagagtgtcgggtcagccgcatcggccaacgcggctgtcgctccggtgatgccgaccgagataccacaaagaagctatttcaagagagatcagagggcaagatgagtgaagagtgataagcctagatagagagaacggaaatgcgacacatacgttgcataatccgacagtcaatcctccccagaagagcgcaaatcctgaaggttcggcggatcaggtatcacatcatgtagttagacagctgacgcgtaggaaaattcgagaggaggaaggcatgcgaaccggtgtagtaattgctctcagagaagacggcatcagcgccaaccgactggattttggccgagaagacaatggccatgataactccctaccaaacaaaagtatcacatcacattcgcttcagtaatgtgtttgactaggtgagaaagacgtctcgtgtttgaaggacccacataaatggctacaacctcgcagaaaatgatactgtacaaaagagaagaacagtctgtcagatggtgttgcaacagagaaagagtatgtgtttatccatatagtgatcctccttgcgagctacactcgccatcgtctggatcttttttgatggagaacccgccggtcaagaattagatgatggaaatctcaactcacgaaatcaagttcttggtcctaattcgaggtgtacgaacacctccaccaaggatcgatgccccggtaatgaagatacccctgtgacgttgatcgccaatggaacaagcaggacacggaactcgattagccattcactccttgttgccgcatcttagcattgtaagcagtatatatacagagtggcttcaaagagaaagcacagcgacggaaagccttcaaataaagaaaacgtaccatccggcacccaagacactcaacccgatgcaaagccccacgccagtgagtgcccaaaagaagggtgatgtctcctccaagaaccttccagggttgaactctacacgacacgttgaagatcaaacgcggttgagagaatggaagtataagctcggtcgttgctaagctcgattttgcgatcatatacggcaaaacggaacaacaaagtcgaaagagaatacgaaccctctccttgacctggtgtagcaacatgatagatagcgatcgaacaacaccataggatgtttgcaaagagagggagcaagagatatcaacagaagcacatgtcagacctcttgatcaatcagataggtttgtttgtttccaaaacacacaaaagaaagcattgggaaaagacagaaagaaaaggtgtaggaccgaacggaccggttaagatgaggtagaggcctatcaagccaacagttgagaaaccgatgaaaggagagtatcggatgatcgacgacatcttgtattgaccgatctgcttgctctgagtgttgtgtctgtctagagaacgaaagggagaacgaatggcaagatggaagcgagacggagatgggggaggatggaaatcgggatgacggtcagagtagacatgtgggtgtcggccggggacgtagaaatcattgggaattttgattaggaaatttcagagatgcattagagacttttctaatcacatctttctctcttctctcgctgtttcctatggtctcgaatagatttaaacgcatgtatacatgtacacgatagctgatcgatctttacagaacggttctgttcatttgcagtcttcctttctccttctcttgtccttgagagcatcatactcttaattcgatccttgggcaccggagcgagagagaacggtggggaccgagctagaaggaatcattccgtactgatgaagagataaagatagtttttacaagaacgaaatacagccatgattagctcaacggtcgatcagtatttgttcttgtataaggaaccaagagagtaagaaaaagacgaacctcagagcaaacagcggtgatataatcaggaggcgtcaagtcatacaacaaatgggtcagttggacggaagagtcgagtttgtcgattgtcaacgaagactttaagggatgtgtcgatgggatctggagtaaagccaaaggatcgcctgtttgattcgaaaagggaacgaaggaatcagtgaatacacaggaactaactccagaagagcaggaggaccggaagagatagcagacgtacccatctcgttcgcgacaacagcgtccagctggattctctctccaaacttgtaggtctcgcagcagactactaccggcacggcctcgctcttagccatcatcgccacgctcgctgttcccgccctggagtagagcgctccatttgaaagcaaggcattcgttccgagaagtaccaggttcgctctcggcaggacggagggcaaggaggaaagcaaggcgtaggttgtgggaatctgatggttgagtagtgtgcgaagcagattctttcctgaaagtgtacgttcacatttgtaccatccggtttttttttccacatttccccaaagagagaagagacagacgtgtggtcagcatatcaagtgcacctcggcttgagaacaggttgtaaagcgtgtaccacgtaccttccaacagaggtcgagaatctaccacaatcacagaaaatccttccccacgtttcttcatctccttgttcgctcgaatcagaaccttctctacaactgaactcctggcgtatgtgagaacgacatcaccatgtcgaatcttttcctgagcaaattgaacaatcatctcgtctgccaaggtgactcgttcccgaatatactgatcaatctttcgcgtcagaaggtctttgctctgcaggcgcacagaaacattcacagcatagttcattccacaaattagctgccgtgaactatcactttgtagaaacacacacgtacgctgaactgaacttacatctgcttcagcctcatcaatatcgattgtcgagatttcatatttaagccaacggatggcatttcctaagccgaccggcattgctcgggcctgtgtcagatgagcaatctgaggagacagatgagttgtcaaatctcgcggaagcgttgtcgatgggggagtagtgtatgataggatgacctgtttcgaaggtcggtagaagaacagtgaagcagtcagtagatgaaagcgagagcgtgaaagggccaagaagggtccagaaggtatatagttgagaggcaaggcgataagtccaggcaacagaaaaagccttacctgcttaagtgcttccagtccagcaacaagtctcgcgttggctcctctgatctttccttctttgagcataagacctaaccggataaccgccgggtgaacgtctcccttcaacgtagctgccacgctcccactaggtttcggtccgggcaaatggctgacgatcatgtgtggctgaacggtctgttgcgcctgagcagaaggaagagcgtaaggtagccggttggtagacgagacgggtgtactcatggacggtcgtaacgtagcggctgatgaattagaggttgtcgagctagaaggagtcaaccctccaccctgcccactggccactgatgaactaatggaggccgaggtggtgagcggacctcctttgttcaaatggggaagagtcggtcggtgtggttgagagtgatgatcagtggaagaagaggcattggcattgccggcagcaacgttcccactggcaccaccattattgggatgagtagagccgtcttgaggttgacctccgttcggtctggagttgaccttttgagctcgtctggcggctctctctgctttcttatctactttgggctctttcttgactcctcctgctagcttttgattattcgagggagctttggctgcagcaggtgcagaggtggcaggaggtgcggacatctttgtggcagagatgatgttgacgtcggtgttgatgttgatggaaggaaggaaagaggatgaaaatgggaaactagaaatttcccaataggaggaacaaaatatactacgaaaaaggttgagcttcctaaccgacgacgctaccaaccacgatcacaccgtatgctcaatcttgtgctttgctcttactgacctcacatcctcgttggcgatatgtgtgcccattcactaacgaagactgtctaaaccttgctaacttgtgttggtgttttttttgtgatttgatactgtgtgtatgtccaaaattcatctatgcctcttgtaaaggcatgccgatgagcgttcgatctaggtcacttcagttagtggctcgacggctagatccgtcatccatttgtccactcgaccttccattcagaagacacagaacctcttcggcgtctcgaccggagttgtcgccggaagaacgattgtctcgtcttcaagcctctgcggcaaacttcctcagagcaaaccataagaaacctgccaaatcgagatctacagttgtcaaatcgactggtgacgcgtccgactcccaccgcatcactccgcgtacgcctgcgtctatttcttctgagcctgctcttccccctctgccgtctcggccgtcgcgtgcgttcactccggatgaagtgatccgtctttcggcgaagtatgtcaagcttcggaatatgacaaactatgaaaagctcgagaaggcatttttgaaacagcgagcttacgaggattccaagaagaaaaagtctccctcaagaaaagatgttaatgtgatgagcgagaagaatgattggaggttctggcagggaaagagaggcgtcccgattatctcggtaggtggtagtagtctttctgttgtttgtgtacccaatacgcgcgcgcattctcttgctctgggatgaaaatcgaatcttgttgtccgaccgatttcctcctcttcccctggttttgtctatcttagacaataccacaacctcctgtgacgaatatttctgaaggaggagcagccgaaacaacgtccgaaccgctggatctggcctcagactttgattttgagcatgcaagcactcgaatgtttagaagtctaagacgcacaaacccccgactgcctccgtccgagcgcaaatctcctccgcttcttcgagtccgagtaggtcaaacacttctcttcctgttcttagaaaaccgttctgtctcattcgatgcccatatgcttgactgagttctcgattgattgattgatagtttaccactaccttcaacgaagaaggttctacctcgagctacaaggcacccccattagagataacaccagtgaaccagccgttgattcccaaatcatactttccctctccttcggtatacaacaacaagccgttgtttctgatgcgattgatctacccaaagcctttcgatctctctcggccatcggccgtgccaaaaaacattcgaatggaggatgggtcgtctgaatcaatcgcgatgaatcttcgtcggacggtagaaacctcggctcggtacttgaaagaggtcgaagatttgttggctttacctcagaacaatgatccagagatcaggacactcgtgatgagggaaatcgagaaacggaagaccaagttggactatcgtcggggaatcgagctcaagaaggtgccaagtaagacttggccggaaggaacgaaatgtctgagcttagggttgttcattcctgtggggaagaagatggtccatgcgctggcgagtgttagaaacaaagtgaaacgaaagctgaggaatgctctggcgatcgctctagttcaggaatgggaatcctcgaccgaggaagtcagggagcagcttagattcaacggtttgtgctctctctctctactctattctttttcttgactctgtttcgtacggcgcagacagacgcagacttacatggttccttccgtctgttgcgtgcttcttttcgaggcgataggatggtcggctatcatccaacctacctcccatgtgaaactagcacggatggaagatctggtgacgtacatgagagccgccttaaaacgggcgggaaggaattactacactcgtgggtgggaagaccgagaggccaagtcggccgacatggacgagccttttgagaaaaagacggccaaggcctcccaaagggcactcgactactcgagagagggcaacccgaaggctgcttggagtgacgagcgcagaagcaaggacaagaacacgaacatgtcgaaacggacccgtcaaaaatcttgacaattcttctccttttgtatgtatatgtatgtgcgtatgtacgttaaacatgatagacagccttagggtcggtgagagtatcctcaatcgataacggttgatgcatgatccttctggacttggatgtcctctgcagatgacatttgatgtctctgtatcgctatcatcaaacgctcaataaccatctttcatgcctatgccagaacattccccgtctgacgtccactcgggtgttagtcgagcgcgcacagcacagtccagccatcgggatttatttgtaacgagggttgcatccgcgttcccagataccctgtgttgatatcacactgtacagcagaatgtgtattcctttgggtcagataggatgaggcctcaatcgaagacaccatgacatccactctggtatacgtatcgcgccccagctgccagacttcccacgataatagaacagccggaacgtcgcgtaggggaaacagaaacgagtggtagcgcaagggagatagagaaatctcgagtcgttctatcccatccgcctccgtagcctcccgtgtatactcgatcggctgtctatccttgtctcttcatttcaaatcagtagctgttcgagatttactgtcctttcctctttacagagtgtgggaggtatcatcgaaaggtggtacaacatgcttgttctcagatcgaacactgagacaaacaatattgagcaggattcatggacgtgaagaaacatatctcaacccctcaactggcagtcgatagtgtgcgcatcttccgtgtcgaccggtgagtgcgctctgagctctcgaaagtcgcaatcttacgatacagcacctttgcgaggatcatgggacttggaccaactgaggtagcgagcccgatcgaagaagagaaaagtctagcaagccaagcatctcagtgtgtgttgagccaagcctgtatatatcagaggttgagaacgatcgcaagaccgttagctggctcgactactgtggtgctcatgttgtatacctgacaccgggcctctcgatgaataccgctgagatcagctgcgcgtggctcgatcaagcatgtcttccctgtctcttcgtctgatgatttgcttgactgctcatgactgtctctatgtcgcgctactcctttgtctctttgatgcttgctctcagacttggtggaacagagatgtcaatgcgtcacgcaacatgctgcacctagcccttcaccaggaggagaacaagggggcaaggataccgggctttgacgctgtcgctagtgaggctgaccttgagactgccatgactgctgaggctgaggatgagactggcacacattgaaaccatgacccatgggaaccttggtggttcatggtctgagggcacccaagtccaaaagggccatgtatcgactgccatcggttgaggttgccttctagtagccgaagccacatagttattatgttataatttgtatagatgattttggacagtctcatgaaattcaaataacatgacaaattccaatctgacttttctccagctcatcagtctgactttcgtggctcgcgctttgctcacagtgaaggcattttgggtggtctggtgtgagcggattgttgtctaaccacagatcctcaagaagtaagtcggcatgctggcctttttttcgtctcttctatgtgtctatgcgtgttgttgccatgtggacgggagagagacaggagagaacgcgtgttgcctgtcaaatatcggtccaggtccctttggttgaggccccgataggtcctactggaaatcttttgaatcaaccctccttcgacaaatatcgacaactctttgggtgatgggatcgcaagcgttaggcttggaaaatgcaaccattgaaaagaactctcaacaaggaatcctgggaattatcggttggaggaaatatcggagaaaccggatagtgtgggatagatagagaaagcgtgcggttcctattgacaaacccacacgagggtagcttcggctggctggaagaattctcccacgaacgcacacatgcttggtgaccaagaaaaaaattggctgaccaagaactcgcctgtatttgttgctttataatcgactcccttctttttcctttcgaccaacctttctgctctcttctcaaccatcacatccactcttttctcaaatcgccaccacctgctttcgttttaaaagatctatcaaaatgggacgacgacctgccaagtgctaccgatactgcaagaacaagccgttccccaagtctcggtcagtttatcttctctgtgtgtgtgtgtgtaggatatccgtgtactgatctagaattctctcaacaatataggttcaaccgagccgtccctgaccccaaggtccgtttctgtctgatcatgctgccaattcatttctcttgaatcatcaactcaactatcttcctgtatatgtttcgctctcctcgccttctcattcgttctctccgttccctgcccactctttcttcccttccactcccacgaaaccctttttgcttccttttccttccaattttttccacataccttaacagatccgaatttacgatcttggacgaaagaaggcttctgtcgacgacttccccttctgctgccacttggtctctgacgagtacgagcaggtctcttctgaggctcttgaggctgcccgaatttgcgccaacaagtacatcgtcaagacctctggtaaggagtctttccacatgaggatccgaccccacccccaccacgtcgtccgatgcaacaagaccttgtcttgcgccggagccgataggttgtcccagggtatgcgaggagcttggggtaagccctacggtaaggtcgcccgagtcaacatcggtcagcccatcatctccatccgatgcaaggacgtccacaagccggtcatcatggaggctctccgacgagctcgatacaagttccccggacgacaaaagatcatcatctccaagaagtggggattcacttctgtcacccgagccgagtacgccgagcttaaggctggcaagaaggttcgttcactttctgttttccttcttcttttttccttttactctagaagacttcttttccccagttgttagcgagtgtgccattactgaccttgcttctctcattctccttctcagctcatccccgatggtgcttacgtccagttcatccgacccaagggaccccttatggagaacctccagaaccagctccgagcttaaacagcgaagttcgggtttttctttttataagcatggcatttggttgtcttccctactggatatggtatcgattggttgcttcctaagcttctgtcccaaaaaaaatattaaaacgagttgcgtgcctgaaccaactatcacagacggggtgacggctacagaaaaatatgaatcatgaatgagagtggaatcgacgacacagcacatgggggaaaaggtctttagtccggatggacgaacaagcacagagttccgtggtgctgcgagggctctttttcggacgattcgatatgaatcttgatcggttcatgcctgcccatttgaccttctaacatccaatataactgacgatagaccggtggaagactgggtagctgattaaatggccaacgtgctcgtcgagagcgtcgttcgttctcgacacattcttggacttccctcttctcatccgatcgaagagaggacaagctcgttcttcaagaaaagttcaggttggcactaatccttctccttctgccgtttgcttcttgcataaacacatcggaccttcaagttctgcgcatgtttcatcgggatgcgtctttaatcgatgaatcaagttactatcgaatgggatcatcccctcctctcatcatcgctccttctctccgcgcatccctttagggtgaatcttccgagagaaacctcgaccgtctagctcaacctagtttgtttgaaacaaagatcgaaagatgaaagagcctccaaagagattgtatggagatggtgtggtttactttgtcttcttcaaagagttgaccgaatcatcatgagaccatgggaggagagcggataaccggtaagc

SEQ ID NO: 2601 - DNA, 24011 bp, Xanthophyllomyces dendrorhous
  misc_feature (8850)..(8859): n is a, c, g, or t
cgttagcctagatattttgcaaagaaacacgaaagatgaataaaccgagacgtacagggataacagcgaaaggtccatgggcaaggaagagctgtgctctgtgcccctctttgatgaaattcgaaccgacgttccacacagttcctcccggctgaactccgatagtagaaacgacaccgagtacgggaacaagggtggtcgtggttgcgaccgcatagatcaatagcgggaggtacactctaggtgtgttcttgtacaggccttgaaggtatggacgaaagacgaacaaaatcgtggtttcccagtaggttagggttatcttccgagtcggccttggaaggaagcatcgagaacagaaatatgaggacgcataccgtatgcgccgatgaaaaacatgggaagcgagaacacggcttcgagtccgaggagagacttgaaccaggtgaactcggacgagtggccgatcaagttgaatgcgccctatggaaaagaaagaggtagaaagacgcgaagggtcagccgaggatggagatatcttatgcctcggaggagatagaggagagaagatacgaaaacacgaaactcgcatcatcggatctccagagagttggaaatagaacgcgacgagcgcttttagtgggctaggaacccatcgttcgggataaaatacttgaagactggaaacaaagaggccggcgaaaaatggttcccaggcgtagtgacattccggtcagatgtgatgaagagtaaagaacagaaagacgagatcgtactctacgcaaagagctgccggctaggagtaaggacagacgaaaccgttagaaaagcttgatcaaacatcctgttgccaatcaagatcacctacaatatgaacctgtaggtatcaacaaacaggtgcgagtcggacgagctaagtggtaaggccataaaatcctctgatggaaacagataaagaaacagacgaacgagaaagaacagaaagtaaataaaatcgagaggtctcttcgagagaggaaccctatttgcgatggacaccatggctctgtatatgtgtgtacgtccgtacgaatgaggggtagcgaggaaagaaggtgacgagatatcaatagtccattatcggatatttcgtagttggcattacaaacatctattacgacagactgtaatccgttcgtacgaacaccttttctgacgtctctcctccccatcacacatagcatacacagggtacacaactggccaggcattgtatcgatccatccatgtcgacagcatcggtatacaacctcgcgagggagtctaggtcgatccttaaacgattcagaaaggcatccccttctctttctatagagctctatccaaaacactttcggttcaaaggccaggtgcgttcgtttcttacgatgtatccctcattctctctgttcgagcccgacaagtgatgaagctgacgtgtatgaacatccttcgtgggcatggtcacacgcttgtatgcatgttggtttcaatattcatataaaaaaaaacaaagactggtatttttctctatgacagtccgatgaaggtatgtttagctatcgtcgtttctcttgagcataacgcgtccctaatacatgcctccgggtcacagaccttccttgaatccataagagcccaacagatccctcatgatctgctaccctatcttccatccccacaaatcccttactacgacggatgtcttatcgtcgagctcattgatcaccgaccgacagctaacgttcatccttccgttgctgccgcctcgtcggacgcgaccggctctgctaaaccaccttccgactcgtcattgaaaccggagggacaaccagcgacgaatgtaccgcctgtccccccgcctgcaccaccgctggcgtaccatgggccaggaggcaaaggtccaccacctatcagagtcgttcttcatccgacgcctgccagcttgtggagcgatgtttgcgcaatgagcgaggacgtcggccagggcagctgggacgattgggatgttctccagttagaggctaggatcgtcgtacgttgcttcccgttctatttccctctttgtttctctttctgtcttcatcgttttggtcgaaccccgcttcttgggattctgtctcttttcatttatgcatacatcttctttcaaaccgttctcccacgacaggctgcgacagcacctccgctttaccttggaacaagcttctacggcactcgagtagccaacgcgtccattgcacagacatctcctctagcccctccagaagctcaacaaccgtatcatgccgagagttccacttcatctggtctcttagcccgaaagagggcccgggcgcatgggtctggtgtccagagaagagacgaaatggaaagtcagaagagtctgtatcaggtgggggagatcaggaagcaggtcgggtttcaaccaaagtatgtcatccttggtgctgtgtagtgctttagttgctgatcattgtactgaattcctgtttgccttaccgtctgcaagtttctcgcgactcacccagatcgaagcgtttcgatcgaatccggcatcaaaccggccccgctcgctcgcctctgacatctcgtccactcatccaggtcttcctccaccgtcgggtacctacccgaactataaccctcgtccgtctggttctggttcggccgtgaatatggttccaaatgcggatgcctcgtcgagtgtcgataatccggccgggtcgatcgttcctgccggggcagaggaaggagcgaaagcggccagacgaacatctgtggcttcctccataggaggcgatgttgggcaggatgagcaactggcgtcggaaccggcagtgtccgaaaagaaaaagacaaagaagaaaaagaagaaggcccaggcggaagaacagacgaaggatgctgatatggacgagccgtccactccggcggttgcctcagcgcccacaccggttgacacaccggccgcgattacgaccacgaaatccaagaaagggaagagtaagaagactgtcaagccatcagaggaggctgttccgcaaacaccagcttcagactcggcacccactccatcttcatccaccacggtatcgacgacggcgaagaagggcaaaaacaagaaagcggcaccaggggtaggtatgtctccggagagtcatcctcccaagaagaaacaaaagacttcaacaacagctagcgcggcctcaagtgcgcctacaccaggagggaccgctcttcctctcggccctccacctgtaccgtcccaggccggccactcgacttacgctcaaaagcaacccccaccgtcgtcctcgccttatgtgtcgtccaagacgttgcctccgacttacccaactgggcgaccgctaactggcggtccgaacggagttggaggggttcgtacagcgcatgggcaaggaacgggtgtaaagacgttaccaggcgtaccgggtttgcaaagctcccagcaactccagatgttgcaacaaaatttccagactcagcaaggctacccgatgcagggaatggggatgcccctccagagggatgccggacagagcgggaacggatacatgggcggaggggtaggatcataccctcagcaaggccagggatggtagctcttgtaattgagctttgttctcaattagttttttcttcttcttcttcttcttcttctaatcctagcctgatgcttgtttttgcttcggcaagtattcttgtgcttcttgttgtttcttagaccttcataccggttgtgcgtgcgctctgctacaacaccagaagagatcaggatgtccatctaggtgtgggttgttgatatatatatatatacacatgtgtagataggcaccttagcatcattgaaagaccaagaccaagaccaagaccatccattcatccatccatccatccattcattcgtcgtccttcgtagacgagtcgaggctgaacgtcaggtaccgagattgaaggttacggcggttacgcaagccagaccgtgaccaacataaccaaggatcgcgtaaccatggtccatcatgtcatctgttccttcctcggccgccatgttcatctttccaactgtttctttgcccatagaagaagacaactaaccttgaagagattatgacggatctcaagcaacatgggatcggtatcgagaaaggatcgcagcatcggaacggaaacagctatgccggtagtgatggagatagggacgaggaaagggacctagatgaagaaagatctcttctcgggatggatagttcggctaaactcgtcaactcgcttgacatgtacgatggggatgtgagtgcttggttgaacgatctgttggatgagggtgaagatgatcagatcgtatcgtcagtggatggaatagacaaggtatgttctcatctgggttattatcatcgctatcgccattgtcgtcatcaccatcaccaccaccatctggagagttattgttcgtcgtatacgctcaaggctgatcatgcgttaacttctcacttgggttatctctctcggggtcctgcttgaatgcgtctctctaacgggctctcttctacagataaatttagaggccatcgacgagaaagtccgaacactactcggcaggttatccggaatctctcaggatacatctcagcagcttgaacagacgatccatgatatatcccgaacggttccccggctgacgtatgaccttcagttcatgagagaatccgctgcatcgctcagagtatctctccatgggatcgaatctcgaacgaaagcagctcacccgacccagtccaaatccgaatccgtttctatttcctctatcgatggaccgaccggattttcttcggacgcgacaacaacaacaaccaccaccaccaccgccgacgatgaagagactaaaggggtactagagcgattgaagtaccttgacaaagtaaaacaagggatggaagccactctcgctgtgttgaaagaggccgaatcatggtcgacgcttgaactggagtttacatctctcctcgccgaaggtctattccacaaggcggccgagcggttggctgaggcttccaagtcggtagctgtgttcacccacaacacggccgaatacgaatctaggcgaagtttgcttgtcagtctgcagaaccaactcgaagcaagcttgagcgcggcgcttgtcaaagcgttgagggaaaaggacgaggatggacggaagaacctgttcgagatctttggaatgattcagagggaaggagaatttagagggtactactatgcttctagacgaaccgatctcgtcgatcggtgggaagccgctgtcctgacagactgtgaatcagtcacttcacaggaaaccggtctgggtcttggacgcccgactggacctccagaagacgaaggaaagtctgctgtcggattcaacccctttttgtctggtttctacagctctctgctctccttagtgttagttcttctcgcttcagtgtgaaattctctcttacagtaccgtttctgaccattcttctttttgttcgaatcgtgactgtattcttactgttgatcaacagcgccgaggaacgaacagtacttccttcaatcttcccagatcctcaacccacgttaatggcattcattcagaacgtattcgattcgttaaatccttcgctcggccaacgtctagagctcctcgttgaatctcacggaccgagcgcgctcactgagctcatcactgcattcaaatcaactgaagatcttgcgctcggcattcagtccaatatggataaactcacctctccatctcaatcctcagctgctaacacacatgctcacggtagaagtactagcccggctcctgcctctcttactcggaagaaggatctctcgccttcaccttcgccttctcgaaaacagtcggtctcgtttgcagacggtgcttcgagaagatactctagaagactcaccgccgcatcggtttcgtactctccaggagtcgaatcccctctagacggcttacaccctcactcgtacccccatcctcacccttctcatcaccacacgcaccctcaacttcctgtacccaatgcaggtgggccttgggaaatcccgttgtacgagccgttcttagactatcaaactgaatatggtcagctcgaacgaagactcgttcattccacattggacaaagcgttagacacattggatggcgtgacagtcggtggtgctgagcaagcagatgctgccagagttgtcggagatcgatcagtagaggtgttcgcgctcgcggaaggagcgctggacagatgtttgggactcactcatggattcggagcggttgaattggtgaaggtggtaaacgaactacttgctcgctttttagccagatgtgagaatttgttctcagaccgtgatgtaagagaatccggttctctctcttttttttactgcttcctctttacctcctctccttgctgttctcctcgaatcgatcacaagtgacggaacgaataacactctgacgatctatcgttcttctcttcccttttccccttccttggctttagtcttctgcgaaacaacagcagtctaacgggtcgacgcgtcgagaaaatgcgatggacgaactcgacgaggttgatcaactcgaaatggatggaatgaactatagttctgaggactgggggacttttcaattggccctccatctcattggtacttgccgagggatccaagatcgtctattcgcttttgagagtaagctccagcaggcactccaacatgtagcgaccgccttcttagcagctcgggacgatccagctggtcatttcttctcaagaacgacaaagggctcaatcacgcttctccaacaatctgggctcaactcgaaagatcttcatgatttgctcgaatccttgggctcgacacacggagcagcaggggcagctttatatggatccattcagccttctcatttgcgcgcgccatccttctttccttcctcccataccttcggtgctccttccaacgctgtttcggcttctcctgcgtctaatagcactggctctggtgttactgttgtcacatcaggagtacagtcgacaaatgccaccccatctagaaatagacggacgtcaacctggacgaaaaatcaattgatggaacccgctcgaaagtcactgatcagattcaccacagcatcccagctttttctccaaaaaacaattctgtctccgttgcaccaacttttgagtaagtatccctccttaccagtatactcctttgaggtcacatctctgtccaccgctgccatgaactcgacatcttcatcttcgataactggtgcctctaccaagccgaaacagaaagcagcaatttctacgatcggtgtccctcgattttcgaccgctccaacagatacagtcgcccgaattggtgaaggcttgttgaacttgccgaggttattcgaagtgtatgccgatgatgacgcactctcgttctcgcttgatacgcttcctttcatcgatccggcgacgctacgtgaattccgggccgcccaagctcaagacacatcgagtgtcttcaactttggtccctcttccactcaccccgagaacgtgcctttggtctctccaacccatctatcgcctctaccctcaccatcggcaacattcccaccttcgtctatcccggggaaatcatccggctcggcatcttcgtccacgttaccaccagagatggtggtctctctccatctatcttctctcaccctatcccttttgagcgcgtttacctccgtggcgttcgactcactccccccgctgggaccgaatccatcagtccaggcggacaaggcggccgaacaactagggacagacgtagggtatcttgtgaacgtcgttcgggctttagacgttgattggtcagaaggtcaggtcatcaaggattgtttagatctcacagaagatcagctgagggcaaaagtcaggggtgaagagggaagcgccggaggtgaaggcgagcgcgaaggtggaggaaaagaacaaggtggtctggaaagaaggaaggtcatgctcaaagtagcaaagttgagagggatctcgtaggaggaggggaaacataaaaaggaaaggaaagcgcgagtgttctccctttctttcaagtacatgatggattgttttacatgtatatcctcaacacgaagatgaagcctggagggaaatcaggacatgcatcctgtctgatcgagtcacagatacacactatctttcggctgcgtccgattcaagacctttctgagaaattatacataggcacgtaggaagaggaaagtagaggtagtatatacacgtatgaataaggatggaacaacatagccacaaggaaatctccataagaagtttatttccagacccagaccaactgttcaaggcctccaacaacctgacagaccgctcgaccaccatcggggatttgatggattgctccatctgcgcaaacgagatgtgagagttcggatgtccgagtcggggtccattcccagcctgcacctggtgaatgagcgcaaccgggggatagtcaatgaaaaaacatcatagaccatgtaagaatcagtgttatgataggtgaatagatgtaacgaggtgaaaagacaaaagaaggagacgaacatcgatagacctgaacttctccttcaggctcggcacctccttccggagattctatcggatcctgaaggacctcatctacgtgcttcccgtctatcgcgaaaagaggaagacaagttgattgtcggaaaagagaaagaaagaaagagagagagagagagagagnnnnnnnnnnaaacagagaacatcgtgacgataagcatgtgagaaccctaataaaaaatttagagaactgatttgatgacggacctctgtaagcgcctcctagagcttttcttaccctgccttgccactgagaccttcgatcttcttccttgtgagcttctctgacagctttccctcttcctggtcggacgagaatgagatctgccgtgcctggccctccttctttgggtgggatccgttctagtagtggcaagatgacaaattgaggctcgagccgagtcaccaaggttgaagcgaggcagtacgcccagggcccttggagaaagactccagatgaggccgaaggcacagggtggaatttcccagatgcaggggaaaacaactcgataggggttgatacagctgggctcgctgttgatgaagcagatgaggtcagagggggaggaggaaagagtcggagagtcgcttcaaactctacatcgatgaccttctcggctgccaacttgaatctttccaatcctggatggtcgtttctcagcgtttccgacacatgaagtaacgacgcatggagcgcggtcgacgtaacgatatgacttaggaacgagtcaatcggatcttcttgcccggcagcatagattgatgtcttctgtaaaggaagcgatacgagagtcgacgatctacggttcgtttggctggcagatgtagacgaagaggacgtccttcggtggtccaagtaggacaagactgagctgagattttgtctgtcttgctcggttgatatgaatttgtcgacaagctgtgattcgagtgtcgactctggggtaggagggatgaacccaggaggatgtagatggttgaacaacgcgttggccgttcccatcggaatcggaatgatttctagacgaggtggctgtgagctatttgtatcgagagaggtacatgcttgggctcggaagaggtcatgatagaacccagtgattaattctgtgatgagtcaagtagacggcccgaaccggctggtcagctctcggtgtcaaaactaatcagagagtaggaagaagttagaatgagaaagaggaagagaacagaccatggcttgtcccatcgcctcccaagacggcacaaacgacgttctcactccctccttgttggctttgggtatcctcgtcccaccgagctctcaacttcctccctaatcgttcaccatctccgttggtctcggtttcgaggagttcgaaaggaatctcgacggcctcgaggaacgggcgaagaatatcttggtaaactaagagaccctcgtcccatcagcaagtcatcgaagacgagtcagagacgtaaagaagatggaatggtgttagaaaaggaggactcggacggtagaaggagggtctcagatggaccatgaccaatcagttagattacaaagagcctagacgaacagcttgtagcctttctattaccggacgaagggtttaggataacgatcagttccatctggtatgtcctattaagtttgttcagtgttccagatcacacaaggtatccgtccacaggagaaaagggatggtaatgtatcagaagaaacccaagaagatagagagatggaggtggaagagacatgtctatggaaagatggcggatggagaagagtgaatggcgttgcatcttgataagatttcgttcttgccttctcgcgatgccgagatttgtcatgatacacacatccccgggccatttattactatccagtgcatggcaaggactcggtcggttgtcacagttaggcagacatgtctggcctttcctagaagtcaagcgtcatgttgagctggctgatgtatctctctctctatcttatgggatactttcagaatggattcgcatcgaccgaatggcgtcttggtctgttcggtcgtcttgcagcaaaaaaacctgtggccaaaacatgtgacaaaaccttgacgactcttcagccggtgaccggtgaaacccaaagaaaagtcatgatcgcaaaacaacagacggtcctcttccaaaggaaacgtttactccatcttggcgtcctcggtggaggcggcgggctttcggtcctttcgggcgaggagagcctttcggtcagcgtcaaggtgaagggaggtgatctggaggttggaggggtggatgccgatggggacggtggcaccggaggacttctcgatgttaagtcgctcgatgtgaacgacgaacttggctcggtagacctgatgtgtggaaataaaaggaagaaatcgggtcagccaatagatcatgacacggcaacgagaccaaggaacttgtcgagcacatacctggacgatctttccctctcgtcccttgtactttcctcgggtaaccttgacctcatcgttctttcggatggggatggctcgagcctgtttttgtagagcggataagagacccgaggcatatatccgtcgatggtgagaacacgtccttccaaccaaagctgatctacttgattcagtcagcaattacagaaacaaaacaaaacttacgttgtacttctccctgagctccttggaaagggtagtgctcatgatctttctcctgacggaggaaggggcatcgaagtgagcctttctggactttcgtcgggaggagtggacgtctgtaaggccggaaaagacattatagatgaatcagcctcatggtcatgtaggaaacatgtgtggtctgttgaggtcgggcatggaagaagggatgagctagcttcaggatactgtgcaaacaacgtgacggctcgagtgtttccttagacaagaaacagttcgtgtcgtgtcctatagttccgtcgaatcactttctcaacaaaagttctgatccttcgtgagggattctaagcagacgtttctctcctggtgcttcctctccatgttctgaacagtatcctggagctttgccgtcgaatgccgacctggattgggaaaaaaaaatggggaaagaatatcctacgaaccggcgttctgcttcattctgctgcgagtaaagaaacgacaagaatgggagtttgacggtgataacggattgttgttttattgggaaaggtagaagatcggtgtgaaaaagcgaaggggagaacaaaattggcagagtcccgtgtaaaattgatagacagagtcaggtcggttcgagaaggaaaaaaaaccgagttgggtttccgagtaatgttgtaggattcgccaggggtttttcaggtgggttccaagagaccgaacggaattgacgaaggaagaatgtgcagaagaagaaaaaagcgttggtttcgtcaaatttctcttccctaatgatcagtcaatggtgcccgtcggtcctcttctctttttttttctccttcttcttttcattctctccatgtgcaaacccagcggatctgattgaaacagccataaacggatgacatcgagagtatctctcgcagaagaggacttcaagcaccgacacagacaagaaacgggtgtgtactgactttgagtgatcttgaggatgaagtcgctgaagggaggttcaacactagaccggatgggatgggagggcctttgctctgcgactatgatgtgcccatgggtatggggttatgtcccaaatatgcccatatatggggtgtcacttgggcatcagccgaccgtccgactctcgacaaaagtcagatcggatgtaacacacccaccaaaaaaaatcgagcgcctttttagtgtcaagacatttggtcgtgtcctttccatctcggtctacatctctcgtttctgcatctctcgttctctctattgactgcagaatggagatggctggctaacgtatatgttcgtcgtttctctttctatgtctgctctcgctcatgcgctgatactgaacttcgctctttctctattacagttgaactctttgcttcgacgctaacctaactcaaagagaacaggatctgaaccaatagaccgctcgatgatcttatcttctcttcccttttcctctctctttctcttttccatcttctcttcctccctccactacacacgcctacttcactttgatgtcttcttgcccttaaatcctaggcactagtcatccattcagtacgcgaagaaccaaaccctcctcttcttcgtccgattcgtgtctcacgttttgaacggcagaaggggcatttcgttattttgttgatccgtcctatttacacgacggtgagcttcacaggcgaaagatatcctgtcttgtcttccttgcagagtgcctaccgttggaaacgattcgtttcgtgcgatttactccgcatggtccttccactttcgtctttactcttttctttgttcttcattttttctttgaaattgcgccattacactctgagtcctctctctctacccaagagagaactctatttagttcggtcgctagagtcaatttgttctccattactcaccgcaccgtgtagttcttaccgcgaagtgaggtccttttaagctcgagaggcacattctatacctactccatatctgtttgactatattgaatgtctctggcgtaaatatgtctctggaaagttgaccgatttgatagcaaaccgcaaagtatcaatctccaataacatctcattgtacaatcacagctttcataaacgtgacaagaggattccaccggcattgctttttgtttattggcgaaatagaataaccctaacgacctacacgtggcttcatgtcgaacccgtccaggcctcaacatttgttcgaggttttgtgtctgtcgagaatatcagaagcaaataaagagagagagatcaagatctaagatgaaagctgaacgagaaccttatcaaccaaccaacgaaacaaatgagcaaattgtacatgatatttccctttctatcgtatactcgatcctgatttctgtccccagccctcagaatactcgagaaaggggaaaagaacacacactctctctcgtcgctccaaaggaatttcgacctctaatccctctctccgactctgacgagccactctccgacttctccctcggtcatcactcgccagagtccaacaccagtggcagtgcccgtgtagagatccttgtcgactgggtcagaggatgacaatccaatctcgatttctgaggatttaaagtcggtagccaagatggtagacagtgtctcgatcgccaacttttgttcattcatccaatcgggttgtttgttttgtttcaagaacaattttgtcagtttggggtttcagatgtcagaagaagagcacagagaggtcgagcgttcgttctgtgttctagattttctcacacacacacacacacacacacacacacacgcgcgcgcgatacataactgaaggagaaggaagacgcacctcgattgtttctgaccttgtcaggcccttgacggcgtcgcctgataattctggtgcgtccgggtcgtccactttcttccactttttctccaactaacaattaccacaacgaaaggatagatagatctcaaggatgtcaatcggtcggccacaatttatagaagtgcgctggaccagaagacaaaagaaggagacaaggacgctccagattagcactcacaaagttcatagcctctgtttgcttctgaccggatgcggttgctttgaaaccaacaaagtaaccggccgggtcgaccttgaagatttgaggtccgagctcagagtcgtgtccgattaacgtcatcactacactcccaatcgacagataaaaagaccagccaacgatagtcgtgtcggacgctcagtcagaaacagccgtctcccggtgcttcagcaaaaaaagtatcaaggagagcgaaacataccgacacctaaaggcctcattccggctcgttgagtgtgcacctgattaatatttgccaatcgtttggccactagaaatccagacaaggaatcaggatgagaacacaagccattgatttctccctatttccgtgaaacgtttatgtctggcagcatcgttctgatgtgcaagaaaggtcgaagaatacacatacaatcaaccggctcaatctcgtacccgtacttgtacctccactctgctgcctcggcctgagctgtctggacttgtgatcgggcgtcggctgatgagtagagaagggaaagtagatggtgatgatgagtgtccacatgcgttaaacggcaaagagaagaacgaaaggtcgagaaacatacgaagcaagccagtcatcacacagccaattgtcggtgtgatctgaaacagatgggtgactgtcgagggatccacgagcttgtcctatggaaacagagagcagatgagaggtccgaacgagaggaagaagaggagcaaagttaccgagaagttcgaggaagagaatcgaaaggttcaaatggagagatgatatactaacggcgatcttcttctgaacgacgataaccgaggtgtcttttcctctgatggcgacggctgtaatgcctgagccagtgatggccttgaacgcgtactctgttttgcagcgaacatttgaacgatagccggaaagggagttagtggacgcacgtcgtactgtacatgttccaaagtaacacaaggcgactgaccgacttggtataagcgtcctgaagcgacccaaacaaaaacaaaaaaacaggaagaagtagtgtgaacgtaagagagagagtacatatgtgagagtgtgtgtgtatgtgtagatgggggacctgtcagatgtgattccatctgatcaaagcaacgacagcaaagactaaccctctggagagaagacggtgagatatcgatcgtaagaacctctagacatgatgtgtgtatgtgagtgagtggtatatagtggtagaaagagatgcaaagccaacggatctgatgggaggatgatgattcctcctcggatgagccgttggaatgaattgtttcgttggaggtttccttgcttaggtaataatgttgcaaccctaacagaggaaccgtcggccataaccatggttggttacacgtttctctcaaaatcaatgacatgtcccacgagggaaggatgaaaccaaaatgagtaatgcgcagtagtctcgataagattggcgtggtacagttttgagatcttccgcggatggcgcgttctgttgaatttctggcagagcgtagaaacgaagcctaaaaactggaacaggcgctggaggagtggtaaattcagggacgcaaacgaggaaggtaccagggcggacgtaaacaaaatgatctgcgaaaggaagatctcaagctgtggaaagaaaacaagggcggcgtcgctctcccttttagccggcttttcccacaggcacaaagagcccgtcaaatttttttcatactcgtccggctgagaaaactcgaaacatggattcgcggaaggcgaatgcagatacacaagagagtttacgagatcagatacaaggagagagcagcggaggggaaagagaatagagcaagaggagagaatagatgagaaaagaaaagaaaaacatggggaaggaatgatcagccaatattcaatggagaagaaaaggaaagaacaaatcctcagaggagcctcgacccacagaggggagagaaagagagagagacaacccttctcttccacgcgacacacgacacacccacttcacacatcgtgttattatccttactctctcatccatatcgatatctatagacagaccgaatcggaaggaaagtaaaagagcaaaaaaatagaatagaaaaatcggcgcgtggtggtacaaccttctagttgagtcctttcttccccaatcttcctcttgtattctgtctgtacttgtcttttgtgtctgcctttcgttctccctcttgctgctgttatcgtctcctctcttttgattcagttttcttcatcacttctcaaaacatcgattgagattgatagaggaggcgagatcgaaagaaaatcctatagaaaaagaggagagtgtgtgtcaccagtgtccggccgatcaaccctgttcccttttgttccgtctcttcttttccaacctccctcatcctccgaccttaggacactcttctttcccttcgttcctctcttttttcttctttctcttctcttctctctttcatttgcttatcctcaaagcttgttcgttccccatacaggctgtttttcaccgctaccaagcattcgttgtcacctctctctttgttcttctgacgaccgtccaaatccgctctgtttacttcttcctttgatccctcttgtttaaatctctctatcctctcgtctcgtctcctcacgcaatggaggaccctacgacagagcaagattcatccaggcgcttcagtctgcctagtatccattcactgctcgaaaaagtaaccgctaccgatactccaactaccacaacacctaccaacactggtcagttctcctttgaggttcttacctaattcattttccttggtctttctcacgtcctgccttcacttcgttcttgttccgtacatccctgtcgcgtccgtattcaccgatctatgtggattttaatcaaccaacaccaacccacctcttctctgtccatccatccatcctatctatccgtttgtccctcgcgtttgctacaacgcttgcagaaaagcatccatccgcaaagtctgaagtagaaaagaatctcaaacctggtacggcaggcaccgtttcttcctcctcaactgctatcgatagcacatacgtctttgaacagaccgaggaagaacggtcgtctcgtgtagactcatcgtcctccatggcatcaacaaaccctggcggtccttcgactccaccaccaccacctctgtcgaccagctcaattggtagcgatcagagagattttgagaaacttcggggcagccaagttggaggaggcatgcaagactggacggttggaagctcgcccgaatcggcagagggcaaacccaaagatgcccaccatcatcaccagccggccatccagccggcaccattccggttcttagagtaccagaaccaaccaccttaccatccagaatccgtcgacccgtattctaaagaagcccctcttggctcggacatgtccaacaaaagctcgataaaaccacttaatacttcggtcgacgcgtctcaacctcgtccggccgctccaacgtcttcagggacgatctcggcccagccggtcgatccatattatcctccaccctccgctgccgaagagagtacaagcctggattcaatctcatctcgtccggtggaacgtgagccaggctctatctacgcgccttccgtcaccactcactcatccacaactgcttcaatcccgattggttcgcctcactcttcttccgggctttactcttcctctggtctcaacttcaacacaaatggtccatcttctgtacacagccaaccttccaccaccgttcctccgcctgggcctcacccggaaggacatgctggccaacatgtctgggctagaccggacgttagaaccaacgagcagggttcatcagctccctccaaccgtagagaaagtaccatcggcggtaatgacggtttcatgatcacccccgacgacacacgccggcagtcgacagggagcaacggtcggtcgtccagtcgagctgccggctcgtctggtcggctcgcggagacagtggctagacgatccagcggagaagccggacctggaccgtccagggaaaggaacggttcgtccgactcaaccggtagcatcagtggccattctcatcctcatgcgtacaggccgtaccatgtgccccacggagatcagcgatcccagccaccgccatcagtcccgtctaccgcttcatcttctgtggaaggcctagccggatctgcgtctgggtctagacctgcgtccggcccggaatcgcctcatggaatgcaacaaccgtatccatatccatccggtggtcatggctctcaacaaaggatcccgcactcccaacaagtcgcagattcctctcagacgtacgcattgttccggcagcagcaacaactacagcagcaacagccacaacaacaacagtaccctcaccatccgccagctggttcttcagaacaacagacggtccagtatcgacattcgattcctccctcccaacatcaacaccaccaccaccaccagcaaccacaacaacaaccacatgcgcctttccacccatcgacgcagcctcaatacccaacccagcctgaccctcattcccactctcactctcaataccccgctccctctcaggtctctcctcaggttccttctcagccacatcgacaaggttctggagttgacccctcgggcatgccttaccaggcatcacaaccaccttaccaagcccagtactacccctctaacagtaacggataccctgggttgcctcaatctcaccactactctccttctcaaaaatatgcccatcagcaacatccctaccaacagcaacaaccgcaatcgaccatttcagcctacccaagacatcactcgtatccttcggactcggcgaacgttgcgccaacacctctttacggcataaatcacccattcagagcgtacccgcctggatcaaatgctattttcccctcaaactatgcgcctgttcctgcttaccctcctcccgctcctggcactactcccggccctaacttaaccggtaccgatccagctccggtctacggacgaccactctcaggaaagcattaccaacgtgggccaggaccgacgcacatgccgaatgtcgatccgccgagtcaggtcgagtctcaactacagatgtgggggaacgatgatcctagacctgtctttggtcatcctcctccatcgatgtcttaccctcctcatccctcctctgccggaccggtcatgcctcccgcagccgcggcggcagggttgttcagccgaaacggatatgatactaggctgttcatcggtggttggtccggaccgatgcatatgaatcctaatggtcatggaccatcaggtatagacatgctcggtcgtcattctctcgatgaccgaaagattcaacggagaaatactgacgatggactagttatgtcgacttcttcaatgatgatcaacggtggcattggtggaggggtgagagaacgaagctcgctttcgaattcgatcacttcatccagtcggaatgagagctggataggcgagaaacggacaagccaatctagctcgtcaagctcttcagggattgccaaggaggcaaagtacgagtgtccgcattgtcaaaagagatttaatcggccgagttcgctcagggtacgttcttgcgaggttggagaatttgtgatttgaaacacatgtactgaccatcacttttcctctctggttctattgttattgttatcgcaccctcctctctctcaaattagattcacatttattcgcatacgggcgaaaagccttttgtttgtgacgttcctcgatgtggccggcagttctctgttcaatccaacctaaagtaagttatttcattctttcttcttttcatcaaagataaacgttactcatcttttttcggaccactcttctctcttcccagacgtcacaagaagacacacgagagccgatcaagtttctcgatctcttcaacaagtacaaccgacccgtcgataacttccagatttggtcaacctacatctactggtaacagacccacagcaactggtacgggtacgggtacctcatccggggaggaatctaactttgccagacggcatgacctcgatcaaaatggagaggatgatctcgaattagatgatatggaagaagatgaagatgaggaggaccgggtaagagagttggagagagataggccgatagttgaatttaatggtaatatgaacagagcgagttaggcgttcgccttgtggcctccgtggttcccccccctccttttctttttgggttagatctcctgtctcaccagcaacatacatgtgtttcttttctcctctttgttagtttttgaggaagtctggtcccttgctgctagctctttgttctgtcttcaacacccttttctttctacatatgcactacctttgatcgatttctcgttctcgtccttttgttgagtttttgctggaatctcgtctctaaaaaaattagaacattcaaatcaatagacaacgttgttctttcgtgtttttgtgtcttcttttccactcttcgttctcgttctttgactacccttatgctgctggcatcttttcttgtcatttctctctctcttcttttgtctatatctcgcagactaaatgggacggaccgttaaaaccatttgtattcgatagatcattatgccttcatcgctttcctatcgcccccacactctcatccttgttacaatgaagtacatcctgcctttctctggcataccttcagagaccaagaaccaaaggacaaggacagatcgagacagaggaagcagatgccatgatcaccccttcttatcttctatgggtttaaacaggtgagaaatcgcaggaccttcttcccttttcctagacagatcatcagccactcgatctggaagtcagttgatcagaactgcgttttgtgtttccaagttccctacacctcagtcttcatcatctcaccttttttctctctttcttccagtcttttaataaatgagcggttcggtatgatattctcaaccgagataggggtttatatttatgtttatgcttccgtttttctctcttctactattcattgttcgttattcgttatctgtcgtctagatgggtacaccacactcgtgtgcgccgagcttttgatatatcattccagttctcttctttctctgtctcattctgcgggtttcattcttcatcattcgttcaaggagacacccgagtctctatcccgatccctgtcaccatcgttgtcccgaataggttctttcaacaagtgctgtgtatctcccctctctctctcttagccttgattcaatcttagtgccatatcgtatagtacgaccatactaaacgacctgacccgacccgatccagcataaaagcccagttcattccgatctgttccatccacgatatcccagtttcagatccgatcttgacctatttgatgactttgatcttttggtctgatgctggttgggctgaaactgatcggcaaaagctgactcggactttatctatttcgtttcgcaggctaatccatcaagatgtggctcttcatcgaattcatttgtatctaagaaaaaaacaaccgaaatcgagaaaaaaagccagcagacggaagtaaaatccaatgcgagcgacaagaagaagaggaggaggaggaggagggtaatgacgagggaaacaaaatgaggatgtggcacaccatgtacgcatggaggaaaagccgagggtttcgaggcttgactaaggaatgctgatcgagacgagcgttcttccttgtcatcatgaattctccggcgcaaaaggatacacatcccccttgcatgcggcccagcattctcttcaagatctgggttctcgaacaaggagaattaatcgcccgaaggacgatcggatgtttttatcgttacgatatgaattgcttttttgccctcgaagaacaagtatccggtcggaacggaggccgacgcaagatcggctgaaaagggagtgaaggtaatgaatgcggatcggaagaaaggaaaaaaggagaaaacaggaaagatgggaaccgcctggcggcgaaaacttcgggcgatggcggacataccggcaagggcaaggggcatatttgaatgcaggaagatttggcgaggcggaagctatcaagaaggaagaagaagaagcctgattgaccgacgccgggggcgtcttaaccgtagactagaatttaattcgccgatcacgtccagctcggtcgggatagcttcatacccttttcggttgagccacaagtctcgaattgttgttcttcttgagttgacaggcgtgacaatcactactactgtcagcataaatcatacacagagggtgcagtaagaaacacagacaaagacagaaagagaaatacacacatatgcacacgcctctgattcaacgaacaggctcttgttcttgactgaatttgaagcagcaacagcgatgatcacacactgatcgacagacagactgtatcgaggaaaacaatagaagagagagagagagagagagagagagagagagagaaaacctggttgatgaagaattctaacctactttgcctgaacactctttaaatgagatcgtcttccctgtcttctctcgcagtcaccagcactaccttaaggacacagcaaggggagggtatcagtatatctagtgttagaagcgagtgatgtgtcaccgaatgattgtgaggtgtctagtcagtctgtcagattcgtaaccaggaggaggatgttagtgtatgtgtttatatacctagggaacgggtcaaataacagagtccctgtccactttccaaggatttagtcaccatggaacccccccccctttccctttttttcaactcagtcagacgcaagcacgactatcagtggtcagtatctgtgattgacatgttcgcgagagaggctttttctcggccgtatggagagcacttgtgagagacctgtaatggacgatggtgttgtttgagagtctgacctgttctgttttcttgtgatgatcacacccagcagaaagagaagagaatgcaagagagagtaagaagtacaggagcatgagagcaagaatatgggagacagagaaaaggcctcaagcgaacccataggtcacttggggttgtttctgctcgaacagagcgcagtgttgagaaagagttctttcccacgcaaactctctatctcttttttatctatggctaaactattagattaatttctcaacggtctttgagtcggactctatgaacgggaacaggtgagagagtatcatcagactaggaggcgactgaagctatcacatccatcgcaccacggggtgtgagctcgtttgcaaacgatctacagtgtttcctttcccctccaattgtcatagctccgaattttcttattccattactctggatgattctttcagtgaaagagctagatatc

SEQ ID NO: 2602 - DNA, 20068 bp, Xanthophyllomyces dendrorhous
gccgatgagcatcatgttgctgctgagggcacatctttctccatccaatctctctagcacagaaggatctacttccgtaaaagtgtccgaaattccgcggtttgatcgtgtaacctctccttttccgctcgatctattgcatccgttcgatctgcgcacaaagtatccctcttggctggggatttcgaactaagatagattcagtgcttagacaatctttgaacgtctcgagatctggagtaccggatcatgaagcggggaaaaacgaccggaaagagaaggagctagttcgttctcgatagcatttctctctattgtttttttctttggatccggaggctatgtatgaaataaacatattttacttggtctgggattcgaaacctgggggatgtgcagcgatgaacggtcatgattattaccacaagaggatgagcttttactgaaggaggggagctcctcattcgctcgtcctcttatctctgtcctctgtgttcccaagtgtgatctctatctctccgaaggcttctttctttctcgttttccactagtcatggctggaaggataatatgtgagactggttcgatctcgccgggtcatttagtttgccattttaaaaagtccggccacttcgccctagtctagactgggtacgatagctattcctgtttctttttgcttctaacttcttctgtactacgttctgtgtgtacaacttaagtggtggacatgacgaaagatctgtcggtaaaacggaagataacctcgggtttctttttcctcttttcgaatgtgtataatctcaatagttcagcgccgatcaatgaactatacgtactgttcaggcggggtagcctggggtaacgatcgtgaactgtagagagaatgaccggtcgataaactatggattctcgtgcccgtaaggctctccagtctgagacactttaaagttttctgatcgtgacaattcagaggattgtcacgatcgagaagagacgaaagccaggtacccggttgatttgaatacttttcatatattcttctctctctctctcattttgcctccgcatggtcggcataagaaaccaggtatcggttatcgatcagcgccacgggagtgagaaccagctaaatgtaatgatctactttgtttataataggcttctttaaccgtctttccgccatctggtggcgcttatatagtacatcatatttttatattttaccttcggctgtttaatcaaccttgtgtttccatctgggcgtcagctgggcgtgtctctcaattgagagccaaacatcggctatcaagaaaatatgatgaaaaaaaaaaaaaacccgatggtcggtcgatcggtcagaacgacgagcgtccgtacttgatcccgtttatccttcgaatcgaagccacgattaagagagcagagaacgcggctgatgaaccggtctcaactctggtcgtcattctatcatatttcgataccgtgcgctcgaaggttcttgcgccggtgttgacggttagaacaatcggcaaatgagtgtgtgattatgtccgtggacgaggcagatgatcgaggcttgctacatggaacaatcagccactgggcgccgaggggattgaggatgtgagtgagggtgagagtgagagtgagagtgagagtgagagtgagagtgagagtgaggatgggggtgagagggggagtaagtgcgagtgaaggtgctgggaggcacaaatcatcaatagttgtaaacgaactgatagggtggtaggcaacatgagcgcacaaagacagagcatctcacctacactcgaaccacatacacacacacctacacaaaccgagaccttttaggttttgaaatgaaataaaaagcgaagcagaagagaacagaaagataaataataagaagaagaaaacagtttgatattcctatatatgcctaccgattctttttcctaaactcgatttcttcttccgtcgatctctccattctcgtccgtttccccgacagcctgcttcttcttctcgtattccttcatccttctctcccattcgcttgagtcccaacgaatcgaagaaaagttttctctttccttgacaaacacattcgttctcaaactcttaaccttactcaactagacactctttataacttcctccttctctcttctctcttctaccttctaccttctacctcttatcccaactcttttgttcactcctatcaacaacaaccacccactcacaccgtcatgcaatcatcttcgtccaagaagactgcttccaagaagatccctcgaccttccaagtatgtatttgtccttgtgtctcatgtgtccttcgcccaagctgatctttccctctcctcttccttcttttccttccgctcgtcctctcccttcgcagctcttggattctctaccgttcggccacgatcagagcattcagattagcagagtcagaaggaagagagtatcccttgcctccaaaggtgctcgaggcattacaacaatccggacatgtgttcgatcgaaccgtcgggatctgtcgtacatcggccaacccgatcgaactgcagaccattatctctgcgatgtggaagcaagagagcgaagaagtcaagaaagagtttcacgcaatgagcgcccttgttaagaaaaaggtatgtctcttgcgttcttctttgccattgtttacttttttcgtctcttatctaaactcgtattttttttaaaccactccttccgttcaccttctcccaacctgccgtcgtatcctcctctccctcggcgatccccgttgccaacctgactgtttgattctcagcatgccgagttgtatcctgattatgtgtatgctcccaagcgaaaatctacatccacctcgtctgcttttagttcccagtcgacagtgaacactgtatctgcttcgacgttgtcctcgatacctacgttcattaccccggcgtctcctttggatcacagtgactgtggttcttccagccaatcgtccccaccggtctcgccgtttgccatgtcctttcctcttggacagcgtcaaggacagttgcaacaataccaccaacagcaagagcattgtcaccaacgacagttcgagaccgaccagtctaccagattggtcaaacgacgagtctcttcggccgtagtcaacacactatccgatccttgggcattctcggcacagcagtaccttcaccctagagcctcggtctcttcgtccgacggtcatctcagctcgtcgtcctataccgaccaagccttcccagtccatcgattaagctggtctggttcagacatgcccgacatggttagtcctcggcctctttgggggtttctttcgtttcttgtttcacttcctgctgtactgagctgctgcctcatttaaacacctccagacctacagctcattgtcagactcgagtacatcgccttgtcagtcgccagcagcttactacccatcaaaggattacctgagtccaatctctgcctgtccgtcccaggcggatgagttcaactttggatcatcctacccgatgtgttcctcgccctcgtcatcatcgtcattctgtggaccggcctacacgtttgcgccttccttctccgagctttctttccaaccggcctcggcgacgcccacgaccaccacgtatggctaccctgccgtccagaccaacaaatcatcctccacgttcttgtacactgatccatcttattgtgatccttacgagaccgagccccaaaccatggtctacccggataacatcatcggttggactccgaccgagtcggcgccgaataacggtgtgagcatcggtacaggtgtgatgacaacgtcgttgccaaccacgatggaacccgcttggtctactggttggggaaatgagatgatcgaatccgttgcggacgatcagacagtcacttggtcgctggtcgacgattgtcttctcccggttggtccggcgtgctaattggggatggggaaggtaaagagaaaaatcaaatacagtttcttacccttcttttcctatttcaaatagactgtttctactattctctattcttctcgtctccattgtttcttcacgaaattcaattagtcggtcaatcagttattcgggtttattcatctcttttcttattcctgtattttctacgtccttctacttcttctacttcttctacttcttctacttcttctacttcttctgatttcttatttcttatttcttatctcttatctcttatctcttattcttctcttagagtgtatatacccccaatcgtttgtctcctctccccagagtcccatattttatctcaacacaaccccaaagatcgattgcctgaactgtaacaagacccgatttgtcttctgattttccacatcacgttctcatctcctgtcttttcgtatccatattcatattcgttttttctattcttttcttttctctccatctccctctatcattgataaatgagaaaagttacctcatttgtttgttacaaggagtatgtctttcctttttttagacagaagaaaaacaaactaccgtcgtcacaaagattcctattgatgttggaaccttctttactttattttctctagtccagtggtttctcctctatatctaaacctccaaatcacaatccaagaacccaaaaggagagacatcaacaaagggcgaatgaaaagccacagagaaaagttagaaggtgggctgaaattaaacatgatcatcccaaactgttctttccacatcgtttcctcagctgggactaagatcgaggctgctccacagtttcggaatgtttatatctctagaggaaaatgcatctttatgtttgtgggagttctccatcgtgagatcaatataacgaacttgacccgttccatcccacgttattgtaatttaagtttggatagtttagtcttttttaatctggtttcgctctgggtccctcgggatttgaactatatgcttcgtaccctttatcaattgggttcattgttgatccgttcgccgagcacgtattcttttccatctaatttctctttcaactcttatttaatctctgatccgtctcctttgcttatctttagaaatcaattcagaatattacatccagttatattttaaaaattctctactcaccttctatagtcttcgtttgtcctttaaagttcacatcgccagatgctgggcgttttcgaggtcagacttgtaatgccacgttgaactatacgaatgaaccgtcgacctggaaagttccagtaaagttcccaattgaaagacgagaacgttcgggcaagtcggttattgtttgttttctttctgatctttgcgctttcttctgttttaccaaagaatcacgccaactgatgacccctcaagtcatcttccatcattcccctcttttccatatctttggacccctctttctcttcaccttcttttccttcttctttgcccaactttcatgcaaacgcaaatgagtctcaaaagaaagaagaataagaaaagacactaaagatcaaaaggtattcatgaatcgttcattcatcattttttaatccctcatctcttttgaaaagaaagaaagaaaacaccgtgagagggttgagttgctttatgttccggtcgtccatgctccgatcacaactccctggattcaaaggagattgaccgtatggagacgttgaaccagaatcctttctttctttgtaagagttccgggtatatttcgtttctcttcttcgtgtcttccttctcttttctttgaggatgatggttgctgtgttgttgacctttcggtgtctcatccccgtcccgtcacaccctaggtcattccacccacccattcacatctatcggccatccttctcgatcggaggtctctttgggctgattctccctcccgctcttcatcatcggtcgaaggaggagaacattaggctagataacgatcgtccactgatcgaccgggtcgagccttcttcatccctctcggccgccgatcgtcctcggatcatttcgtcttggccctggccgtcacctccgtccgtggccgcttcttcttcttcttggtggtcatctcgatcactctcgatgtgattacctacgatggcacccataggttgaccgccaagtagactgtccctgtcaacagtacgcacgcccgtcgaccgatggccactccatagggaagcattatccaccccgtccggtccaccgaaactgctagacagcgtgtttcctccggtcaacccgatcaaacctatgccgccaccaccggctgcactccatcgactctcaccgctctcccaagaaccttttcgtctgacagcacggacggaagcctgggcgtcgtccatccatccgagtcggccaggtccgccaaacgtgtcgacgctccgtcttctcacagacgcacctccgccgaggaacccaggccctgttctttctccaccgccgccgccgcctccagggccggagagggagaacgataggctctcgggtcggtcggttcctcgtctgctcgagagggaatgtgcgatcgaccccggaccggatttcccagtgcatgacccaactccggccccggtccgaatcgagccgttcgaaggaaggacgccggtcgagaagaacgaggacgaagccagtgtgagtaccgaagcatcgtcccctggtggagcggccgggttcggattgttcctcacgtgtggacgagagtgaacaggcggccggtagtgggtcgggccagactccgactctatatttgccgtcatcggactcgagctttgttcttcgtctaccagatccgtcagacggtctgccagttgatcgatcgtcggtcgatgcagactcgagaaagaagacgcagaagagggcgagagggactggatgtcttccagaggaatgagtacgggatgagcgtatgaggtcgaacgggatacaccggcagatagagtccctcctccggatgaattccccaaccgagaaatcggtcgacgcgatggtgaaccctgtctggatctggaacttgggattacttgagggtattggaaaaaaaggaggaaaaaaagaaagatgtttaggatagacaataaatggacattcatcagtttttttttgagactctaatctattctcgcagaaagacaaagagaaacacatgaagccacttaccaggagaaagtttcaaaagatcgtttctgagatcagcttcgtcatcagaagcgacgaccgagagatggagaggtgaggtcgtggtcgtcgatgagatcaccgagtttgccgcccagcttctccgtcgtctatgagccgtcgtctgaggaccaggaccaggaccagagtgaccggcaggatcaacagccgacgttgggacttgtgctatatgcgccacttgactagtgatcactactggcatatcgtccagactgatccgtccgtcactcgaggctacgctcgtcacagccgtcgtttccgtccgagcagccatgctgattgaatatcttcccaatcgagtcgacgaatttgccgtcgaattgagtgttgaattagcggttgatccagatgagaccctggataacgacggaaaccttgatagactcggcgatggtggagaggacagacagaaagctcgggcagaggcatcttcatcggcagcaaacacgattgaagggccgaaatggtgattagcgatgcccggagttagatttgatgaagcattcgagtcaaaccgggatagttggttatcagaggtagagtatatcgagctggacagataggagtctctcgaggtgagaatcgttggctctttgaacgacggagggaacggatccagagaggtagcgatactcagatagtcgttcgatcctgtttccccagtctcttcttcctcctcttcctctccttcgtttccaccagcctcacccgaacgtctagttgaccgagctgctctaggcccgttacgcatcaatgcaatcccgtttgtggcgacaaatcgaccataatcacttgtgccgcctcgatcgatcttccttcttgctcctgggtcgatgacatgtgtagcagaaaccgtcggcaaatttgccgcccgttcgagatgactggatgaacggactggaacagtcttaggtggtgcagccaaagtctggtgggctggaatcgtattggacacgccgacggtactactccgtttgagtcgacggaaccaaccgagcaagggtttccctgccttcttgccgagactatggctgggtgagtatggagaaacccctgtaggatgtgcacccggacggataggttcgaccggagctttcggtcggtcgaggttactcctgttcgcggcgaaccaagggcgagagatatcagcgggttgtctgatattcaatgccgaagatggacggtctagtaagggagtaggacgatctgctcgaggcagtcgaacggaagccattggttcagagatgataactgtcctgctcttgttcttcttcctcttctcaacggttgatggtagttacaatgaccaagacgatgagaaggcgagatttaaattgtgcgtatctttctctagccgggatcaacattccattgtatcttgttccctctacacttccctgcgatctctcagtttcttgctttatgcactgtcactgtctcttgtagaggccgatatggatcttgttattctcatcctgccttgtaccctcataactctggctgcaagaaacgtcatgtggggataaatctttggcgcatgttcggtatttatccaacatgttatccatgctgacaaacgctccccgttcgcctagcatacaggccgctctctcgcctccccacttagtcgaggccgtttagcaactggagatgtgttcacgtccacatccgcgcctacccctttctctttgtccttacactcgtctactagtggtgcgacaatcgcccttccgggtgatgtaggcacgccagaaaagtccatcccagctgattggctctcggtccggtctctggccggtttagagtaactgcttgtcggatcgtcctgaaaccaaagcacaaaaattgtgtcccgaatactttgatgtatcagaagggtaacggatatgcagattagatataaaaccattcccgggacatacagaaagaaaggatttcgttcgagagagatccagagagccaaactgttcacgatagttcgatagaagatgatgaaggtaggctatctgaccgtgcgaggaatcaaggtcggcactgaacgaaccaaaaacgggttaacgttcgggtgtctgacccgatcatgaagcctgaaagttagacggacgtactcgagagctagaatcgcctggtgacaatctgttcatcgcgtttcatggatacacataaaccaaaagagccatgataattgttccatcagttttctaccccttaggccaagaaattgagaaagaaagagaaagagagagaaaagcttaccctcaaccaaggctcttagagtattcacctccagatgatcctttcctacctctgccaggacatttcctagttcctcgttttcctcaaccagcatctttaatcgtcccataactttcttcaagtcaacccttcgtgcagactcgataggatcagtcgggttcgatggaccggcttggttgtccaataaggaccgaagttgagcgttgtcggcaacgagcacgctggtgatctcccggatctgagtcaatacaggtaggaatgtttgaggtacatcgacagtcaaagagcctgtcgacgatggtcgtgttggcaacgataatgaggaagatgacgacggtaggggaggtagtgaggataatgtagatattgatgattgaggatccttagggataggagacggtcgggcggtaggaatggaagtgaggagactgatcgtttgctactaacccccgctcaaatccaggatcgatcaaaggaaagacacggtcagttccataagcacgcatatttgtgtatacatgcgcgagtacgtatgtgtacaagtgtgagtgtgagatgcggtcccttgagagctagaaaggagaggaaggggaggacgatcgttcggtcgatttagagattctgtgatatgagaagattaacatacggtcaagtcggccacttctttttgtttctgttcaagctggtggatgagttggagctccctagcggtcagaggggtcgacatgtcgagtggttcacccatggacaatgttgagagtttccctccggttctgatgaaccacggggttgagggtgatgacgaaggagataagggaagatggtgaaacttctgaaatctttgtttatctatcggggtgtttgtttctttttcccttgctctttcttcttcctttctctctctgttctttccttcgtttgtctcatctctttcattctcgcatggtcaaacgcttgcataagatggaacgacgaccaaagatgaatgaactgctaactgcccatcctttacacaatagaaagcgcaagctcttcgtcgtcctgccagtgtgatccgtgggactttgacaagccctacttttctcccgaacacagtcgctcgacatcctttctctccctcactgcagtcgtcagatttcgaatccctttctcttctaccagaacgacgtcctcaatccggacacctcccatcggttcatactcagccaggacggacgtgttcaagaacggcgaggatcgccaaggagcgagcacgtgaggggaaaagtaacatcccggctcgatcgtctgtcgattagccaaattcagatgaacaaaggagtgatggatccagtatggccatgtgagcaaccacagttcaaacacaattcgagagtgtgtgaaagaagagaggaggcgtacaattatcatgccctgctcgagaggaagtctcaagcgaagaaacttatatagctgagggttttccaagctctgagcagggatagtcggatttgtcgccggctttgaagcggaaggcacgtcctgatggaaagtttgaggttgaaacaacacttggtatccggcattcatcttttcaatgcaaaactgctccgagttgagagaatgtgcttacatgaacgtctagtccgatagaatgacctatatccagatgagcaagtgggcgtcaggtttgagaaagaaaaatgttgtctccatccaaccaggtgtatcgacccaagatgacaaagaatgtaacgaaccaagtccatgagggaagaatccagtggaaaccccactagcgagaatttcttcctctgttccgttctgaaagatgccgagcctcaaaaagttactgatgagaattttgtgcatcagaagatgaaccgtatcccaatgaatgcctgctttgatgatctcttctgccgccttttgcatgtccaagaccaactgatagatctcgcctgaccgctcggtgaattttccgccgttccccacaggcatcgtcctcgtcacgtctgccccatagcaattccattcggttcctgcatcgatcagcagcacttgaggtgcccagtcttgtcggagtgcgttgacgtctaacggatccggttcatcgtgcgcatgtgcctgagcgtcgccgttggtggctccatcatgggagtggtgatgggaggaggaagaagaagtggcggaccgagagaacgaagacgaggtgagagtggtaggaaggtggtgtgtgaacggttgatggttgcagatatagtgcaaggtggctgcccgtgggccacctgcaacgataggcatgtaagatagatgcttggatctatgagagatgtgcaaagagtcggtagatgttgtttaatacggagtcgctctcagttctaattacgaatgagcaactagaaggatgaacataccctcctcgtctgcagacagcagtgaacaaagcctcggcatctccctcaccttcaatctcccaatcctgtccccccaaatcaagcggcctcccatcgattcctctcatcgaggccctaccaccagcgaatcggccaagctcccgcatgaccacctcatgggcggcgctggtgatcttgtttgcgcgttccatgttttctatctcgaatggtgtcttagtcagccgagcctggtggatggcaggaaggagactggccgagctcgcttgtttggagctatgataggcgttcataaaggtcggcagagctggaaataggagggttggtgggagggtatggatctgatgagtagaaccaagagaggatacagtggactgaagagacaagattggttgaatgaagtgtgtctcaaagagcgcagaggcttcttctatcgagggaggtggaacggaccacattttcgagtcttcgtccgcctgagggacgaaccttgttgaagcgcgaaagatggcaaggaagcagacaggagaaagcatgacaaagtttgagatcagtatctaggaacatgagctcaggaaacagatacaacagaaggaaagttctgaatgagaaagaacaaggcagatgctcacagttgatgtttcacatcctggacgttcccagaaaggtacgagaacgatatcaggacagctgatccggggatatcacacccggtcaagtagtaaaagttgctctctggccgatggggcatctcgcctacatttccagatagaccgttcagattcaagccaataaaacgagccaattttgggtttcaaacaaccatcagacagaaaggtttcctcaaaaaagacacgagatcgtgtgtgtttcggcaacctccgaagatgagcatgtgaacggaatgatgagaaaagaaagaagaagaaggatgcgaactaacggtcggtatcatttctcattggagtttcatgagagacaaggagtatcgcatggcatccgtctatgatctcgtcctgagagacgagtttgtggacgactttctgtgcatctagaacacggagaaaagggaggataggacgattagccggtcgacgctcatatccggagcggcagaacagaatgacgggaccgacgaaggatagctgtgtggtgattcaatcatacgacgggttagccaaagatcataattatctcagcatcaaccgggaccgacctggatagagcgacatgatggattgcttgatggattaggatgggtggatggatggtagaggcttgggagagttagaggtctatatggtggatatttgaatacatagatgaatcatatagatgaatcatatatgacgcaccttagctaccttagatagggctgttcccatccaacctcgccttctctagatccttcttctcatcctcgcttgtccctaccaaaccatctagctccttgtgtctttgccactcaacagtcaattagaacctacatctctctcaatatggccgaagaagataactctgcaggagctcccgtgagtttggtttcgttatggcttatctggacggttatcacttctctcgtcgtgtcggagtcttcctgtcatttttttcctttcccctggtcgagccttgaagatttcagggcatgctatctggagagggtttggagatggataaggcaggacggcatctacgctcagcccactgtgaagggtaaaagtcaggcaggcgatctagaagactggtagagatcacttcaacatggcttgagatacaaaaagacacgctggagcttcgctcgtccttctcgagtgtgattttccttcccctttcatcttgttttctatgaacgagaaagatctttccattcgactcggatagagtgggctatatgctacattcgtcaacgaaactggcatcggctgcgatagccatttgatccccatcttgacatgtcttctctagattgctctcaacgtggtttgattttgtgctgaggctgattatgtctagaagaatgtctttatactgatcagtcttatattttattttattttatttcttttccctggcgtctccttatctcaccaccatcacgaaatgaacggcattggagtttactaggagactgagccccatttcgagcccgtccacaagctcaccgagcaggttgctgtcgctaccggtgaggagaacgacactgttcttttcaagatgtatgttcccttcatgttctttctttttcctttccttttttttcctctttttctcctcttttggtcggacataaacatctcagacggacagaatgttaccttcctcttctcctttctcttctcagccgagccaagctcttccgatttgagaagtcttcttccgagtggaaggagcgagggactggagaggccaagattctcaagccggaatctggcaagatccgattggtgatgcgacgagataagactctcaaggtctgtgccaatcacgtcagtgagtgaactttccgttgcatttagctggagacagagaggagacaagacagcagaacctcctttattgcacagtgctgatcgcgtatcaacgcatacagttaccaccgacatgaccttgtctcccaacatcggatccgaccgatcttgggtctggaacgtcgctgccgatgtctctgagggagagcctacccaggagactttggctatccgatttgccaacgccgagagtcagcacctttttcctcgtcacttccctcttctcttgtctgtttggatgctttgagtgctgacgctcaaatgagagggtgttctcgtctgtgatctccagatgctggtcttttcaaggatgctttcgacaacgctgctgaggagaacaagtctggcgcttcggccgagaaggcttccgaatctcccgtcgaggctgccgctgcctccgagtcgtcagtctttctttatctaaagtctgccttccctctatctttttgagcttacctgagtgtactttgggtttgcgctatatgtagagcacctgttgccacgaccgaggagaagcctgcgactcctgtcgttactcctgcgtcagtcctttcccgtgtatttcttctctctcgttctggtttgacatgattacttaatcgccttcttcttttcctgttactctcaccgatcgtctctgttctctttagtcccgagccggaaagcaaggaggacgtctcttcgcccgttcctgctgctgccgttgatgagctgatcaaggaggagaagaaagtcgaggagcaggtcgacgtcaaggcccctgagtaagtcgactgacgatgtttttttcttagtcacagttctctttgttgaatataatctgcaaaaaagggtccgacatgttgagctgaccacctgtatctgtgctatctgccattgcgtctgtctcgatcaggtcgtcagccgaagagcctaagaaggacgagtaaaaaaggcaaggctcggtgtgatctggtgtctctgttctttcttttgctacttttctgctgcctcgttttgatatccattatgttagttgaaagagtatacctgtgtttgtgtctgagtggagagagaacagagaaaggcgagtcgcctacgtgagagccaaacgatgctgcaaccctaaccgaatctgaaacatattcttatctccttctccttttgttcggaggggagagcagcagcgaaacaccgaccaggtctgtgagcgacaagatggattatggatggagagagggtatgtgtgatacaacgagaccatggagtgagagacagagagaaacaacaccaagagcaccttaaaaagcagcgtcacaaaaaaatatgaaactttccttttgttcgctttcttcttgaccttgaccttgatcttgatctcaaccttgaacggtctaaaaaccgttacacctttcttctcgtcctttctcatcatcgactatgagctctccctcgcctccgtcctcgccttctccggtcactccgttgaatcgtttcagaaagtccgttcccttggaacgtcctgtaccacgcgccgacccaacagccgccatcgcctttaccgctttcgtcctaggctccggcttttctctcgctctcgccctaaccgtcccactcctcataccagactcgatctggtcgcttgtgagctctatagagatgcaaggcagaagattgatcaggctaccaacctcagctttaccagcctatgttgcagcttggtgtttgttccatacgttggagtatttggttactgctatttggaatccgagcaaggtctactggggctgtatgtcctccttcttcttcctcttctttccgtttcttgcgtatgcttatgaactgttcttcaattcatccttttcctcttcttgtcgatagcgttccttctctcgaacggaatggcctacaatgtggcatcctccctcgtcatagtcgaatatgtggtcgagtcctacttcttcccctctttgaaaacagtcggctggtggacatatctaggactatcgatcgttgttgttggtcaatctctaagatcgctggctatgattcaagctagtgttagtttcagtcatcacgtcgctttcaggaagaaagatgatcatgtgttggtcaagaccggtctctacgcgtgagtgattcttccctcgacatcaatcctatcgtcaatttaacatcagatatacgaaacaagaatcttctactaatcaactcgtcctcttccttggttgttcatcatacacatatatacatatccgtgtttacgaatgcgtgtaatcctttcgagcaaatacagatacgccagacatccttcgtatatggccttttggtggtgggcagtaggaactcagatcatgacggcaaacccgatcatgctcactttattcgcagtattgctttggaggtggttcttcaagcggatcggaggtttgtttttctctctccttctccttcttttcccttgtggcttgtctggtttcctacgtgcttctgacgcgctctctttgctttctcttcttcgttggttaaaccaaacctgggctgacacctggctacctcatacagaggaggaatttctactcgtccgatttttcggacaagaatatatcgagtacaggaagaaagtcactagcggacttcctctacttcgataaatctcaagaacaagaaaatctcaacaagttagaagggggaactttctcgtcgtgcaatcctttctccttcggctatagactcttgcctctcgagagcctttttgaaagattctgttccgtacaaatacaatcgtctatctttccatccctttccaccacccctcacccctcacccctttaatccattctatcctataccattgaaaagaagacgaatatatgtgatccttatgatatataacgatgcgcgagggtcaccgttcacccatctgctaataaacattgattgtttcgtaagatcgagaaacatgcggagccttgttgaggtatgctgacacagacagcctttggcttctaaacatatatatatcaagaccgagagatgtccagaaaacagtttctttcaatattctaaatgaagccaaagcctaaatgaagtaagattctcggacgttgcgcatgatagatgaaggacataaaggcgaaacatagggtatgcagaagaaggttagaacgacgtccaagtctatgtaggctaatcgaaggaggtgttatcgccagacaagttgaagaggtacgagatccattcttccacccttcatgcgacagtggggaattgaaagatgatcagcattacacgtagttcaccaaaggataccccatgaccaaacaagactgaatgaaggtcgaacgaaacagaggacgtactcgaaaccttcaggcgcagagttccataaacccgtcataacatcatccgacattccactgaggccgactgagggctcttctagtctatccggcgtactgggtcctttcactgtgtccgttgtatatctaccagcccctaccctcgctccctgcactaccgactctgctgcctgatcctggaccacgttcccaattctctgttcttccgtctgactgtagccaaccgggacatcgctcgaaccgcttagtggccatagttctgacgggcttgccggttcaaacacggatgtgcttgtatcgtaggcagccggctgatatagcattgacgtgcctgacgtatgtatcgaaggagatgggctataggttatgtgctgttgttgttgctgttgttgttgctcttgctgctcttgctgctcttgcggatacagccgattgagtttgggcaaacgttgagtagatggttgttgaagaccatgtagtgggtgcccaggcggaatcgaatgcatccgttttgttggtgattgcggttgagaattcatttgatacaagtcgcatcgggattcaggtcgggtgctcaacacaggctccaaagctagattgcagccagctatagagtatccaacagatgaaggtggatcattctgccttgaagagacatcaagatctgataaagaaggtgcatgttctgatggtagttcattcagacgcccatccggattggatgagctctgctggtggtcacaggaggaaggcaagggaggcgtaaatgtggccattgtgctctgggctggcattgtaccataaatatgacttgaaggtagtcccaaagtcgaccgtggctcatcccggtgtaatgtcgaattgggctttgagaatgaggaggctgaaggagtaatcagatgatgattatcttgagggttccttgtgaaatcttcccgattacgcttattcgtcggattagttccttttgtcacatgggcatgttgaactagtcccatgataatgtctctgttagcgttcgagattcaacccaagagtgagcatgcgctacaagcaagtgggtttgcaccttcggtaaaaaaatcaagttgtagataagcggtctactcacttgagacatccagccaccatccacgtcttctcgtagacagtgaacatctcaatgatcttggagatgtcgttcagtctgggagatgcgaagaaaggaaacaaatcagtggacacaaagtggaagcaacatcatcagaagcgacggtatcagcggcggcagcggcggcggcggcgacagagacagcgatggagccatgcgaagagagaaaagaagtcagggtctcgacacacgcccaacagagaggggacacgaaaccaaggcatggaatcagcagaccacgtacatgcctctagggtcgaacgagctcgacgaccgcttcccgccccacaggttgctgcatcagcccaggccaagaacaaggcagacacgcaacgagacacaaaagcgagtgagcacatgcccggtcagcacacacagccagacaagacagcactcacacagccagaacagtgccgaactggaaagccaccctgatctgttgcggcagcagtcgacagcagcagccgacagacaacgacagagtggaaaagcatgagaagagcaaagcatggaaaaggagaagcacgggaaaagagaagcgtcagcgtcggcgcatgcaggcaagcaagcaggccagccagtcagccagtcagccagaagcaatctagccagccagccagccagcctgatggtctgatggtctgatggtctgatggcctgatggccagatcgtcgacgtacacatagcacatccagattgtctctgatgccgcgcttcgagagcgcatggagcgcgttcgcacccgccctggccgcgttgctgcagactgtcgagtcggaagaacagagagggaaggcagagagggagcagagagggaaggcagagagggagcagagagggaaggcagagagggaaggcagagagggaaggcagagagggaaggcagagagggaaggcagaaacacacggcgtcagcttcttggtcaggtcaacggctctatctctctctcgcacacacacagagcacagagcacagatggactcactcgcaagcgatgggaacgacggctgcgatcggtcggcagacggcgagatgaacggccggtgggtgtagatctggtcggacaaagcacaccagcacaccagcacacaagcacaccagcacaccagcacaccagcacaccagcacaccagcacaccagcacac

SEQ ID NO: 2603 - DNA, 438 bp, Xanthophyllomyces dendrorhous
cacacacacacacacacacacgtcagtctcgatgttgcctgcttctgacgcgcaagaaggcagagagcagagagcagaccgacctgggcagagtagtaggcaacatagatatgtgcgctctggaggaaccacatatcatccttcctgtgcggatcccatctgggcagacagaggaaggcgaggaaggcaaggagggcaggcagatacgacgcaaggagccagcatcagaaagcaagaagcagcgatcagcactctgcactctgcactctgcactcagcggtgtccattctgcactctgcactcacctcagatggtccggcagctgctgcacccagttgttcagactcgagtcgatctcggccacgatgctgagctgtgcttcgagcgagtggaagtctttgatgaccttggacttgttgatcgcatactgtgtttgca

SEQ ID NO: 2604 - DNA, 10205 bp, Xanthophyllomyces dendrorhous
aggccgtcgtcagacaagtagcacatcagacacagcacactacacacactacacacactacacacactacacacactacacacactacacacactacacacactacacacactacacacactacacagaacagacactcacaatcgtccgcagacagtacccatggatctgcgccagcttcagcagctggatgaaccccccgatcttcgacggcttgccctccggctgccggaacgccagccccggctcctcctcgttctcccagtactcgtcgtccacatcgatcgggtagtcgacatcgatgtcctcgtcgtggatcgccagcggccggcccgtgctcccacagagctcccggtcggccaggtagagcgcccagaacgcccgcttcagcatctcgccctccgcctttggcttggaccgaacgacatgcttcctgtggacgcccatgtcgacggccgtgcggatgcccatgccgatacacatccaggccacccggtggtggctacacgagccgacaaacatagcggcaatctagatccgataacagacatagaaaagagccaagtctgagaacagtgtgcaagctgaaggagagaggacgaagcatgcgttctgagacgtacactgatagcctgcaagctatatacacttggatctttgataatctctggtctgttttgagcaaactacacgtcgaaaagcaaaccgaaggttgagcaaaatttcgttgaaaactctatacgaaagaaagagagagattcaaagtacgaatcatatgcgcagaagaatgaaaaacatacttcgttcatgtaggcccatccctttccaaacctacacggagaggcaataaatcaccagatcaagcaatgcacaccgttttaagaattttgcccagaagaagaagcggaagaggacgaaacaaggaaacgtctgacaaaacaattctgaccttctctctctatcggtctctgtccactttccatcatcgtccgatcgattcgagatgctgtcctccagacaccgactagcactcgcaaacaccaccaaacaaagtgacttgaaatcggaattcgtcttgtacagctcactagcaaattcgcgctcgaatgtcggtcgatgaaggatggaaatattgagttgagctcgatcaaagtatatctggaccagatgcttagcaaatttaggcgagggccagaccgaagaaagctgaggagggcgcgaattatgattaaagacttcccatagtggaggcatccagtagagggctgagagccgtatattcaagataaggacggaaggtcaactagcgcactttactttgttctctattaagaaaagaaaaagaggagatgggtagataggaaactaacgtcttcgattggagttcatgtcactctcgaacgtgtcctttcctatgtgtgaggatttgttttcgataacacaatgaatcaagctcaatccggatgactacagttccgtcattaagtaaaaccctcccatccttattagttctggacaaatggtcgacctcccacttcaactctatcttctgatacatctgtaaccaacatacctttccccaaaaagcattctgaaagtttgtttgagagtcatcgctgaatttgaggttcttcagtgaattcaatatagacgtctcatcctcgtcgagctcgtcctcttttccgtcgtcttgttcccacggcttgactgcctccaagtgtgactgacctccaccgggcgaatcaacgagtgtatagggtccctgctcgttggcagttgaggtatatcgactgggcatcacgcttgtttgaggaggaagcactgtttcttgatatatcgaagcaggccgggataccgacggaggagcctccactactcgtggactaggcagagccgttgacgtaactggttccacataatccatttctgggagaaccgtatccggagcgagctgtcgttcgcacgaatgatcgcagacaccgaaaagagcaaagagaaatatcctaatggtcagcacgttcctccgtatccacaagggatccgtcaggttgatttgagaacttacttgaaggatcagttgttccatccgtttcagccgacgttccatcgattcgatatacgcgtcggatggtccatgccttgctgcactgtcgacatacgagcactctctgtctgctatttgacaattcttacactggatgtttaggccagcaaggccatcgcatctgatctagaaaatggatagggtatcacaggtatcgtcataggccaataagtcgtacgagatatcaaaagagaagcatgtcagaccatggccttgagggatgccgtgcattctgagcctcgttgaatacagatagagaaccctttgagaaaggaggaaacgaagagaagactggacaaacctttcttcgtcggcaagtatcgcctttcaaagtaagggaggaagagacgaacagtcaggcagaaccagatatcagcattcatcgtcgggcgattgaaaatgtgcacacacttcaaaggagcaagaggcccggctggttcacttagccaggttcaaatagtgggtaaacaacaaatagctcacaagctcgttgaagtttcctcctcttctcctttgaatcagacatgtttgggttggtatctgacgatctgctggctcataagagttttgggattttcggcggagagcgtcgagcggactgtcggaagaaagatgatgaatccaataaaaacgggggggacaaaatacagaggaggagcagggatgtcaagtacaggatagatagacttcttcttcgctacttgttctttgtctgatgggtggatggatgccttcgcctttgctttcgtgttcgttcagctttcggactggtcgttaggacggcactcacatctcagcactttctctttggctttgtgagaacttgctcgttttcttcttcttctgtgtatgagagagaaacgaccttcatgagactctcctgcttagctcttgctctgagcattctttggattcaagtcagcaaagatatcgctgatccgacttctatagcatggtatgatttacatggaaagggaattacaatccattcgacctttgaattaatcatcttctaatccaatatcaatccctccatcctctccatcatcaccttctgtatcaccgacagtacctctacccgagcctctcgcattcaaaacaacctgagaaagctccaccatccctccttctgctctatcccatctcgtcccctcgtcctccatctcgtcatcaccgtccaccttgcgtgtccgtttactcgcgccggtattcgatcggggaagaacggacagactccgggctttccaggcagagtagtgatccctatcttcgtccgagtcttctccgtcgaacggggtcggttgtctcaatacagacggagctcgacttcccatcatgccaggttgaacgcttccaccggaacgtgaagaaggcaggggctcaaacgaagaacctgatcgaccaaaagaaggaatcgaaggcgtagagcttcctgatcgagattggttcggtggaggctgaaatggtgtggcggatgagccggtagagaacggggtggaagatgtggcgcgggatgtaccagaacgagaccgacggatggagtgagaacgaggcatgtagtgggatggagggaggagtgggaatggctcaatcacaagacacagttgtttggagaatatagtgaagcctaggatgggacaagaagatggtaaatcatatgtaacagcagagtatgttctgcaaaggtagaacgacgaaccgttgtaagagagctggagagccggcttgaatgttttgacatcctcgtcctcataattcataccaccgaaggggacgtcgcgccgatgatattcttctggaggctcctctgactcttcgtcctcctcagggtggaacaagcttgaactcggctgagcaatcaatgggagaggaggcgaaggagagcgttcggccgtttcggatccagtctgggccaacaaggcgaatggatcgacctgggaaggatcatcagggtcaggtttgatcacagggatcatagctttcgttggaaggcatggagaaaaaaaagaaaaaaaaggaaagagagcccgagggtatctatatcagaggtaatcctaacaaagacaacaacacaagaacattttaaaaagaggacaggcttactatgatgggctatcgaaccggtagttgagtacgttcttgaagaaggttcttccgaacctgatcgttcgagacccgttccacctctcaatcgggcagccggttgactctctccagcctctgtatatccatcttcatatatgtcatcttctgagcttccctctggcctcctccgcttgttaaacctactctggtcctgaacgccaacactccgacttttctcacgtccctgtcttagactcttcgaccgacgactccctctgactcgcgcgtcctcttgctcgtcatcgctatggttagatccaagatccgcgactggtccgaccggccgagctacatagcttcgattcttgagaagaacgacatggctatgatcagtctgacgaagaaagtaggcgaactggtaggtatcttgaggagagaataagccgatgatgtcatcggccgtttccaaatcgagaacttcagcacacacgaagagaaggcaacggaaagggaaaaagaggaaaagacaagacagcttacctccccgatgaacctcgactgttgctgtgagagtggatttgctactgctggagttggtattggcagagatgctggcttcggagacaagtttaggaataattctgtgcaagtgtgattggtagtagggattcggatgggaagagagtgaacatcgatatcatgctcgagacgtgttcgtatacaacagagagtgagatcaatcaagaaaatcacctgggtcggagatcttctaatacattctgaagagttatgtccgtcatccaataaacatgggcagggtcaaggtctataacaggccaagaagagagaacgttcccaagcggttagccgacaagaacgaagaagatgactcttcgatgaagccagactcacagacatagagctgaaggacggtattatcacttatgcgaagatagtatgcgttcctagttttaaatcccatccttctttgctggatgtctggatgaatgaacagatgaacagatgaacagacggatggatggatggatgtagaacggttgaagcgaatgaattgaaacgaaattcttcttctgacatccacacaacatagacaacacacacacattgcatcgcacataaaggccacaagtttgtatatacactcggataggatagaacaggatacacgctaggataccaggatggacgattcatcttctagattcattgaggaccatcctcttgctcccatccgagcgattccttcttgctcactgctgagtatagaatatccaggctatattatctcccctgccgctgctggccgagcaatctctactctaggcggccctgctcagattgagcgactctgctctctatccctctctggtagagattctctaaaggataatgacgcgtttcgaccggaactcaactttggccggacaggcgaggggactcacgtagagagcaggtggaagcgaccgatcaacggagcgttcatgcaaggcgacaagctcgtcttgcgcgtaagaaagcgaaccaaagtaaaggtctatgtggatgcggaggggactaagcggaagatcaagcttgacaagggagaattcatggtggatgtggtcggaccggtagcaaagacgatcaagtttcgaggtgagcaatcagcttgctgtttgtttgatatcacaaatgggctaacctcctcctctgcttctctgtttagccatcgccgaccatcagtatagaccggatcctacaacgtcggagtccaaactaagagatgccttgacctctcttgactgtatggtcgtctgtttttgctctcttgaatgtgaaaaccgaactgatatcgtttgttcaaatggtcttctcctgcgttagataaaatgcttgccaaattcgaatggccagccgagactgaaacatatacccaaccaaagacaaaagatccagacgatatggacgcaacctctggtgaggatggagactattcatccgacgaaaccgacagagcgcgaacggcttacgaggagaagaatacggtgagcgtgtgccacttgttccctccaccattgttcacctcccagatcgcaccccacaaataccagtacgtatatatcgtttcctttcttccctcgatagcatatgccaatcttctccacccgatcccaaaggacttgttcattgaaggtgcactgacgccaacacaaattttctcattgatcggatccaaacagctacaaagccaatccaatgtcgacaatcacccgagcagaacacgacgaaactaggctgatcaataagacccggaagaagccgctatacgtgacgagtgttaactggaagctagaccagccagtcagttcttcaccttccctcttctttgttcaccatcctgatctgattccaggcatgttcgttctgatgttgatctggtcggattttgttcgttcatctagacacctacacatcctcctgcaggtttatcaaagatcgacaaggcgctggttgataggattaccaaggtccgtcgccttccaccctcaacactctccttcccctctcttctcccttatgatctgtacattccttgtcttcctactacaaattgctatctctttcttgtctctttggcgttacgtacattactgactgaatggaatgtatctttctccaacggaaacaagctctttgcggatgagggaacatacccaggtatcgtgtcgcggccggcctggtcaagaatcgcgcttgctaatcagctatcagacctaggaaccgaccacgcagtcagaaccatgtaagacttcaacttcccaaccttgcaccccctcttgcatgacacggtcgcttatatctgctctttcttgtacatctctgtcggtgttatgccgacgctgaatcttcaagactcaagccgcttctaccattcatagcctacactttctccggtggggctttccgagatttgttcatccggtttggatacgatcctcgaaaaatcccggaatctaaaatgtaagcctgatcaggttttcttgttctacctcaccagtagacacaacagaatgaactcatttaagaacccacttcgacaattgcattacctttcccgttcgtttagataccagagtgcgcggttgcgagtaggaagcgaaagtcgatccagagcaaccagatcgttgaagactcatcctaaccaacgagcgctcactgttgctggcaagacggcgggagttttacaaggcggggactctcggttcgttcttcttttccttccacttgttttcatatcgtttctgtcgtcaccagatcttgaccaaactaacgcatcgcctcctcctaggaaaacacacattttcgatggacagaagctccacaaagactggtcaaacttccaattatgcgatataaccgacccagaactcgtcaaactcattcatgatcccgctggggtcagagaaaaatgttatgttcgtcgctgtcctcttttccctcccctttgtaactacccaaaattcaacttggctctccatgtctgcaaaacaaacaaataaatgaacaaataagggggacgacggatggtacaagccgatcagacaacgacttatccgagaagtggttcgtatgaagttttcctcacttctcaaacgaggcgtcccgttaccccccggagcatgcgatcaaatgattgaaggtggtctagctgaagagagagcgtcaaatatcaaagctcgtgagaaacgaggtcggggcgaacttgaagatgaggaagaagaagaccatcactatcaacatgcttatcatcatttgaaccatgaatatgatggagacgatcatgatgaagactctgattctgacgctggtggagatgatgatgatgacgatggacatgaggatggaggggagggtaccgtcggccactatggaaaaagttcttccgattctagatatgccttcttgagccttactaggaagaagggcacttccaaatcacgacatatctaccatgggagaaatgataaagagatcatggtttgttttcttcttccttctctctcgtttcatcgttaccgtctattgcttcacttgagctaatcattgacgagcgcttcttactcattacaggctgctcggcttaggaaagctttgggtaactcgactcaacgggagccatgatttacacatttcaatagcgtacatgcaaaacgaaggaatgactcatatatatgatagtcaaatcacgatgttgaatagcgcacgcgttacaagacactgatgacttgacccatgctttggacaaatatagttacagggcgatagcttagtgcgaggtacagtagtcaagagtcatatctgagaaactaggtgtataagtaagaataaggaagaaaaaaacatgaataaaattaaaaagtaccagtacattgatcagataggacaagctatcattcagttataacgttctcagcaggtagactgaagaggtacgatacccattcctccattcttgtgatagaaaaggaggaaaagaaaaaacgaaaaacatcaagaagccagagaaagatcggcaaacgcttcagtatgatagagatcgatgactattcatatccataatctcgaaggcgagatggagaaggatggagagaaaaaaacggtatgaagacgtactcaaaaccttccggtgctgcgttccatagacctgtcgtggagtcgttcaaggttctgttcgaacctatcgatgacggcctgtcctgtccgcctgtcccatttctattaatctcttgtactacataggctaatttctgaccctgaacatcatttccggatgaactcatttgactagagctaggctgaagatcacctgagccatctgacttccacgaatttaatgagaccgtcgaactaagcatagacggacggacatcatgggtaggctgacagtcatcaacggcaggcaatgagcgcatttctgatgtgtctggattgtgcgtcgaaaggggtaaactgaatatcacctgctgaatttgtggctgctgctggtagtgttggtaatgcgattgtaagtacaggggatcaaccggagacaaatattgcgaagatgactgttgagaatattgcagcggaggccccggagttaccggctgaatttgttgcagtgggtattgcagccgcaactgtagtatcgattgaagtcgcgactgggcttgcgattgatgttgtggttgatacagattatactgagcttcggaggaggtatttgtcataggatccagcattgcgttgaagtcggatggaggagattgaataacctcagatgagtcggattgaccgttatacctctcgaagccatcggcgtctgacagaaaaggcatgggttccgaagcctctccgttcgtgcgtacatctggagcagacaggcactgttgttgttgttgttcttgtccttgtccttgtcggtgatattggtaacgatgatcatgacgagagtggtcatgtccaagcggagagagagtaggaagagactcagagaaagctatcggcctttgagtaagtgtcatatcttgaaggttattgaccggcagttctgatattggtggcactctggtcttgtccagagtcgggctttttgttgaaggtggcaacttggaagagctagacgcgggaggaacataaccatctcgtgtttttaccaagtcgtctcgatttcgtttgattgacgagttgaccctcttcaatacgtgggcatgttcgaccagtcccattcaaacgtctctgttagcgttcgtcaatccaagattggtacgtgagtgagcatacacctgagcagacaagcatcatgaagacgaaggctcttcttacttgtaacatccagccaccatccacgtcttctcgtagacagtgaacatctcaatgatcttggagatgtcgttcagtctgggagatgcgaagaaaggaaacaaatcagtggacacaaagtggaagcaacatcatcagaagcgacggtatcagc

SEQ ID NO: 2605 - DNA, 514 bp, Xanthophyllomyces dendrorhous
agcacaccagcacaccagcacaccagcacaccagcacacacacacacacacacacgtcagtctcgatgttgcctgcttctgacgcgcaagaaggcagagagcagagagcagaccgacctgggcagagtagtaggcaacatagatatgtgcgctctggaggaaccacatatcatccttcctgtgcggatcccatctgggcagacagaggaaggcgaggaaggcaaggagggcaggcagatacgacgcaaggagccagcatcagaaagcaagaagcagcgatcagcactctgcactctgcactctgcactctgcactctgcactctgcactctgcactctgcactctgcactcagcggtgtccattctgcactctgcactcacctcagatggtccggcagctgctgcacccagttgttcagactcgagtcgatctcggccacgatgctgagctgtgcttcgagcgagtggaagtctttgatgaccttggacttgttgatcgcatactgtgtttgca

SEQ ID NO: 2606 - DNA, 25410 bp, Xanthophyllomyces dendrorhous
aggccgtcgtcagacaagtagcacatcagacacagcacactacacacactacacacactacacacactacacacactacacacactacacacactacacacactacacacactacacacactacacagaacagacactcacaatcgtccgcagacagtacccatggatctgcgccagcttcagcagctggatgaaccccccgatcttcgacggcttgccctccggctgccggaacgccagccccggctcctcctcgttctcccagtactcgtcgtccacatcgatcgggtagtcgacatcgatgtcctcgtcgtggatcgccagcggccggcccgtgctcccacagagctcccggtcggccaggtagagcgcccagaacgcccgcttcagcatctcgccctccgcctttggcttggaccgaacgacatgcttcctgtggacgcccatgtcgacggccgtgcggatgcccatgccgatacacatccaggccacctggtggtggctacacgagccgacaaacatagcggctatctttattgttcagggcacacaaaaaaaaagatcaggccaggttgaatcagaaatccacggcgcaatacaggatgtattgaaagaaattggcatatacactggtagcttgtaagctgctaacaccaggagcttcgagaattctggggcttcctaagacatactggaagaatggacggtcgacgaccgacaagaagatgttcagatgcacgaacaagaatgtggcggagaaactaaaccatattcagaacaaggatcatacttcaccaatgtaatcccatccctttccaaacctgtgaaaagaagaaccgtgatcaaacagagcagtgagtcacctggttcacttaaagtcatatttagctatcatgtgatacgacaagtcaccatatactgacatttttttcctatcgtcctcggttaaatccctatcatcttttgcagtgatcgcttcatcatctgcatcatacagacatctactggcacaagcaaataccactaagcacagcatcttgaactcgatatctgtcgtgtacagaccatcagcaaactcgcgctcgaatgttggtcgatgaacaactgtaacgataaatgaggcttgctcaaagaatgtatcgatcaagagtcgagcgtgctcagcagaaggccaagtggaggcatacttgggagcggtagagtggtaatctgggaattcccaatgggcggtgttccagtagattgctacgatgaacgatatggagaaatagagcacatgagtggaacggattactctaatacactttcatatgatgagcagatgggctgagggagaaaggtcctgacatctttgacttgcattcaggtccatatcaaacgtgtcctttccagtgtgcgacattttctgcgcgcgtacctgattaaacaaactgaaaccggacgactagttgttcaggagaagacttcaagaggtcataacacgctttttaaaacttagctggacgaacaagctttactcgcgcgcgtgattttcctatcgaaatttgacaaacctttccccagaaagcctcctgactaggcttagtgggcagcttcatgatcttcattttttgaagcgaattgagcatgtacgcctcatcctcatctatctcttcttcttcttcttcttcgttgcctctttcccatggtttgatagcttccagagggttgtagttgccgatagatggaccagccgatgattctctactgtccgaactgccccgaacaggcattgtgcttagctgggggagagtagacgtcggttccccgacggctagagatgattgagagatcggaggagatactccgtgcatcgttctgggatcagatagcaacagagtcgagcctgaagccgcggaagtgccctgttagtcattgaatgaataaaacagaacgatacacgaccagatagcagggaaagcgaaaggaagaaaggatggatgagcgctctctttaggttggttccgtgaagcagaaccaaagaaatagcaatgactgagattcgggtgacgatgacaaatactcacttgaagaatcaatgctccatctgtttaagccgagattccatggactcgacatacgccttcgggggtcctcgtttcctcgcattctcgacgtatgaacactgaatcccggccagtatacaattctcacattctatacctgtgtttgtgaagccatcgcatcttatctaagagttgaagtagtgatttttggatcataggtgagagaggacggtgaaattacatggaaatccagtcagatcgccaaaacgtccgaaaatggctgtgtctgaagagattcttgaaagcgaagcaggtatgagaaagaggcggaccttttttcgtcggcaggcatcacctttttcttattaagcaaggaaatcccggatggaacgatcaagtcaagaccgaagccacaatcagtatttgcgatttgtatcgaacaaagcaaagaggagtaatccttcccctactctgttatactggatgggattttgagatttattaaaccggatgcactcacaagctcgttgggttttcctcctctttccagtcgaatcgacatctgatttggacatgactatatcctgatggcagttggacttggatggtcttgatggataacaatcgaggaatggctcgagggaggtgatgctcaatcgaaggaccgatcaaatgatgagacgatcgaggcagcgcgggagaatgaagtagataacgggggaaaagccgggggtttcactatgtcagagatcaggattaggtaatatatatactcagtgtgtagctacttctcttgacctaccgttcatcatgccttcccatcccatcatgctccttctcttcattctatgcgcttgatgatcctttctcgttctcatttctctcgattggtgatacccttgcttagtgttctgatggttggcaatctgtttcttcatcatcactctgcttgacaatgttatgtttgataattctgtcgtttaataaacgcgtggcaaccaggttgccacctcttcctgggtgaaatgacatgaagggaaacgcttgctcgcttgtcttgatgaggtccttcagattaggatcctttgtagactatatccaataagctatccctgctattcaataagtttgccgttgtcccctgagatctggaggcctagacttccgcgctcgcactttccttgctagtttcagtgacccccttataacttccataaccccagccccttacacacaaagcatcggatatcagggatgtgacttgagtattactccccggtaaccttctcctgcctctgttgcttctcctgtttctctatcccttatgctatatcactgcatcaacatgcaggtatatagtcccttagcgcaggtgctactccatagcatagtttctcaagcctggatctttggtcactcctttgttgctccctagtactcttgctccctgtattatatcaatcttaatcttcaaatttcttcaccttgcgcccttgtcacaaccactcaaagcgaaagagcttgaacttcctccttgccagctacatttcctgtctggctacgaccttcataacttttccgttacccctccccgaaccctagatccttgccagatccaagggtgcctcacgtaactgattaaaactcaaaatattcattcaagtattttaacaatttgcatctgccttgctcttgagattgcagttcgtttgcgtgtgcttaaatcagggggtgaattcttctttccttcttggaacaagacaacaagaaacgcgattaatgtctcccacatgtggacaaagcgaaataagattgatgaaaatagattgaacaagagtcatggatgagatcgtagaaaagaagatacacaacttcctacatcaacccagcggcagcggccgcttccaaagcctttgcgttgatctcctggtaacctctcagtcggatcctttttattatattttaattttaccataaacatgtttcaaaatggtaggagaggtcagatcgagaaatgataaacacagtaggtcacacaatatgataaagatgtcaacgaacaagtttcgctgaagcatggcaatggtgagctttccgacggcagggatgtatatgctagcctgcagaggataggaagaagacagggagagaaagcgttcagcctaggaaaataaacaacacgcaatagtctacaagacctaccttgttcaatacatccgtatcaaagttcttttcgccagcgatatcgacacaaacaaccccatccttcaaccacccagtctggactttgaactttccaccgggcaccgcgctgatcaccacgtcactcatcgcgagcgccgcttggagagtaagatccgttggggtcgtcacatgggagggcttgtacttgaaaggggacgagcctggctcggtggccgtcgaaggagtggtagaagtggaaggtcgtttggaaaactcgagaataccattgatatctgccgagagaactcgagctccatcgtttgctgaagtttgatcaaattgctcaagagatttagttcacgctatttgaagtaaaatgataggcagaaggccaatgaacagaccgagcaaagcagccaatggtcgaccgacaacttccgatcggttgatcaccgtgatggttcgacctctggctctatctccataaggcaagagggggttgtaaatgttggtgtattctagtgtcttgacctgataggacagaaacggcaaacaagatccaagttcaacaatctttctaatgtacaagagctattaacaacgagcgcggaaaacgtacgatggccaaaggtgtgcaaggaagaatggacttgaggagaccagcaggaggagtatcgagagaattgcttgtagccggtgaggcgaggaactttttagtaggcttgaaagtcagcggagaaatgtatcgaatgcttgagacgggaacacagcggacagagttaacaactgatttgtgtgtagagaaaataagaacaataaaggatgtgatctcacttatggtacaggttgaacacaaattggtgattcaaaccctcgacatccttgagaggagagacaacctgttgaagatattggtcctcttcaggaaagaacaataacgaagcaggaaaggaggtaaggaaagtggaaagtagacaggtcagtttcaaggtcttcgatcttaactcaaaggaggtaagagtatagcgtacgggttcctccgaagatagggtagtaaacctggtgaaaataaaccaatgtgtttataaatctgatccatatctcaaagctaaatgtaccaaaccgagctcgaagcgcaccatgagacctccaacatcgtcgtcattgttagcagagacgatagcctcttctacaccctcgccggcaacgacagaggaatcgatggcctgaccaacaagtcgaagctcaaacgtaatacccaaagcctcgcacgatcgttttgtgaactgtttgagagaacgaaagacaatgacatgcatatgatatcaagcaaataagataaagcttaagccaaagacgagatgaggataaaacgggtccaagactgacctcggcatatgtcttagcgtcctctttggccgttccaaggataccaacgagcttgagctgaccgccgttagctttgatctgttcgatcgccgaggtgagctccttcttgaacggcgggtacatcttgaccgcagtaagggtgatgccttgtccttccatggttgctagatagttcgaggaagcgttctggataaggttgtgaacgagatatatatcagagtatgttggcgcgctcaaaggaggatgctttgagaaaggaaaaaataaaaatgaaaaataaattcgagcgactgcgcgtttccagtccaaataatttccttggccaatgtgtcgggcagcctagggttgagttgactatacgcggctatgtctatctatgttgtggatctcttcccagaggcgatagtgttgtatagtgctcgatggatggagtagtatacagcagatcgatagaggaacatgcaagagagtaattgatgggaaggctcgagaaacagttatttccatattgactttgctcagaacaggacaacagtgtggtacttctgctgtctgttcaaaagggttgacgttctaactatttggatcgccttctttcttcctatctaagcctaacgcatcctgctcgttgtgaaccttctgtctagatctttcactttgttctgcattaggaggcgctgctatccctactactgctatcactactactgctactatccctactactgctactatcactactactgctactatccctactactgctactatcactgtcataaccaccaccaccaccagtcgtagccatgtcgactgttacgaacgtggatggaaaaaacgtgaccaaaagctgtacagatcgcacctgtcagggatgtgacctgagtgttacaccccggtaaccttccttcaattctagttctcctcctgcctcgttactccttatgctttcttattgtttcgacatgcaggtatatagtctggtagcgcaggtgcttctagcacatcttatgatctgttctcttatgcataaccgttggagtctgaggacgaaatatgatacgaaactacttcgccactcatagcttagtctcccaagtctgaatcttctgttaatcttgatccttgtcttttgctcttgctcttgtccttgttcttgttcttgttcttgttcttgttcttgttcttgtccttgtacttagccttatcattgtccttcgtgatcctatccatcctatttttcagtcctgagggcctgaatttcccctttgaatcctaagagtctggtgtggtcacaacttccgtaacctcgtcgttaccctccaaacctgaatcataacagcaccgctcgtgtcatcccacgtgccgccaatgaaagtacgcccttttgattacattttttttccatcctcctttcttgttcccttcaggatactttcactcccttcccaatccactcaacacttcctcccttcctcctttctttctccgtttctttcctcctccctcttctcctcctccctcctctccttctcctccttccctcttccgtttttttcttcggttgaaatcccggttccttctccttctttctactcaggtttcattcaataatgtccgattctgctatccccgagatcctcgtcgccctatcggctgccaaggatgccactcaggccaagggcaaaggttagttttcgcttgttttatctcagccatcaagtttgctttccttcgttccgtcacggtcagtttcctcgtgaagcgtgcctaaagtgacgtggcgggagctcaaaacggtctgtaggcgttggccgaggcgtaaagaaaaacaaagggtggaaaattaaagacacaaaaattatattaaagaaaaaattatcactcttctttcctttgctgacttggcctctgctcatccctttcctcgtatacagccgacgagctttctctcgccatcaagaggtctaacattgagaccctatctacctacgatgttcttcccaccattcagaggtgggccacttctaagaacgctgctgagcgagaagtcgccccggtcgcgttcgcccggttgatcgtcaaccttggcgtcggttccgagcctgtgtttatcccgtaccttcctaccttgttcaacttgctcatggagaagaccgccgccatccgaacttctgctcagtccgctcttaacgcattcatcaagctctgccctcccgagtcgatccgacaggttatgcaggccctcagagtgtgcctcgaggaggtcaagggatggaagggtcagatcggtgtgctcaaggccatggagaacttggtcagggaggagtcccaggagcaggtcgctgccgagttgggagctaccattcctttggtcgagcatgctatgcacgacaccaagaccgaggttggtccacattttttcttgggctgtttgagtttttacagccgcctgacaactgttcattcttaatgcttaggtcgccaccgctgctcgaaaatgcggacgagctcttaccggaacgctttacaaccctgacctgaagcctcatttggacaagttggttgacgctatggcttctcccaccgccgttccctccaccatcaaggctttgtcgtccaccacctttgtctccgaggtaactgcacctgtgttggccgttttggtcccactccttatccgagctcttaaagagcgatccaccgataccacccgaatgacctgtatcgttgtctccaacttggtcaagcttgttcgagatcccaaggtcgccgccacctacctttccgtcttggttcctggtgtcacgaacgtcgccgagggtgccgccttccctgaggtttgtcatctgtgtctgtataaatgctttcctcagaaaactgactacattttcgtcacacttttcaaatagctccgagcattcggaaagaccgctcaggagaccttggccaacgctggtgcctccgctgacgctgttcttcctgccctccgagacgttaaggcatctaccatcttggccctcaacaccctccttcccgttctgcctatcgccaaccttccaacttcgatcaccgagcttcctctcgccaaatatctgcctaacgatccgatcaaggctactatcttggagtacgccggtggtatccttgccgatctggctgacgagcgattgttcgacaagtctctttgggaagaacgagcccttggaaactatctcaggttctttgttggtggtaaggaggacggtcgacaagtcgccgcccaggttcttgacgtcttcattgaggccgacaaggtaagttttttcccttaaactcactgtttacaaaaaaataacaaaaaaaacataaaggtcttctattttgtctgtctaagttgctgactttcttcgttaactttcgtctttctctctagaaacggttcgcccccgatgaggaagatgacggtacccaaggagagcttttgtgcaacatcatgttctctcttgcctacggaggtcttctcttgctgaaccacaccaacttgaagctttaccgaggacaccgatatggtatctgtgccggaaacggaaaaggtaaatctaccttgatgaaggccatccgagatggaaaggttgagggtttccctcctcaagatcagttgagaacgatcatggtcgagcacgccctccagggcgaggacaccggaagttcgatcatcaacttcatcgcctccgattccaatcttgcctctactcctcgagagaagattgccgccgctcttcttgaggtcggattttctgaggagaagcagggcgatcctgtcggctctctctccggaggatggaagatgaagcttgagcttgctcgagctatgcttatcggagccgatatcttgttgctcgatgagcctactaaccacttgggtatgttcttcctatcttctctcgttagatgtttctgagttgctgatcattccgatacaatcttctctactcttcatagatgttggatccgttgcttggttggagaagtacctttgctctcagacccagatcacttgcttgatcgtctcccacgactctggcttcttggacaacgtctgcactgatattgtgagtttggatctttggtttattctgaatctgtttccatttttcgttctgagaaaccaaccgttaacccttctctcgccacgtctgtcagatgcactacgagaacaagaagctggcctactacaagggtaacctctcaaagttcgtcgagcgagttcctgaggccaggtcttactacaccctggcagctacctccatcaagttcacgttccctccccctggatcattgatgggagttcgatcaaacactcgttcgatcatgaaagtctcccactgtacgttcacctacccaggtgccgcccggccgtcgttgcacgatgtttcttgcgctttgacactttcgtcccgagtgggtatccttggaccgaatggagctggaaagtctactttgatcaagttgttgacgggagagacgattccccaagagggaaaggtcgagaagcaccctgctctacgagtcggttacgtcgcccagcacgctttccatcacttggagcaacacttggaaaagaccccggttgcctacatccagtggcgattccaggacgggcacgatcgtgaggtgttggagaaagccactcgagttctttccgaggaggacaagctccagatggagaagccgatggttggaaagaacggtgaggagcgaaagatcgagttgttgctcggtcgacaaaagctcaagaagactttccagtacgaggtcaaatggcgaggattgagccacaagtccaacacttgggtcggtcgaatggagctcatcgaggccggtttcggaaagatcgtccagcagttcgacgatatcgagtcttctcgagagggagctggttcgcgagacaacgcagcccacttgatcaagaagcatctcgaggacgtcggtctcgagggtgaccacgcgatgtactctgagatcagcggtctttctggtggtcagaaggtcaaggttgtcattgctgctacgttgtggaacaacccgcaggtgttgatcttggatgagcctaccaacttcttggacagagaggcgcttggtggactttctgtcgctatcagggattggggaggtgccgtctgcatcatctctcacaacatggagttcgtcaacgctctttgccctgagatctggcacgtcgatgccggtcgattgacccaccaaggaaaggtcgccttggtcgaggacgccttcgcggatggtgcttccaccgcgtcttccgcggtgccatccaggttggcttccagggctagctccaagccgagttcggtcgccacgacgcccgctggaagtgatgccgagggcaacggagagattccagctgctcctaggatcaagaagaagaagatgacgagaaacgacgtcaaagcccagcaggtcaggcgagctcagcgaaagctcaactggttgacatacggtggagagcgagagcctgataccgatgacgagtagatctttttcttcctctttgttatgactacaataaaagcatactccccgatcttgttcacctatctttgtcttctcataactctttctcgatttcttaatatcttgaactacctacctacttcaatcgtttaaacttccgtggcttgtcttttgtatccagtgtgttgcatccccctccgtaccgaaacggccccttttcttttgttttcttgttccaccttagactttcttcctctctcttttttggtctatcatcttttctgagtgctctctttatcttttttgtcctattctctttgtgtctactagtagtgttcatctttaagccttcagtcgattgaaaaacagagacaaaaaaggagcataaggtaaccgacacgaactggaagaccagcgacatgagtcacgagaacatatcggagggtgtgagacctccgaacatggtgaaccttgtactctggaaaacatgttcaggatggttcgaggaaggaacatgatatcaaatacttcacgtgtttgctaaaacgagatctacatggagacccctcccgggcatcatgactcgcatggccgagagaaacaggagaaagaaagaccacgatcttcacagaacaaaaaagaaacaacaacaacaaaaaacaaacaaacaaaggggggctatagaggacaaagagaatgaaaagagaacctcctcggtcatagcgaacgaagaggggtgaggagagccgcaagacgaggttgaatcaggaagaaggaatagaaaaaaaggaaaagaagaactaacacagctgaaaactacacaaaaatggacagtaggtctcaatccatcgctaaatatgaaggatttctatcaggttatattcgcttaccgactggaaaatcgtcgctgttcacatgtttatcttcatctagatctcccattcttttttaatttattaatatgtcgaccagcgctggattagttgatcttgaaatgaaaagtcagctgtacatcagcttgcttttgataaacaaaaaaagatggatgtgcaaggaaacagaaccgtagaacaggaaaaaaaaacgaaaattttgagcacgaacaaagacaaatctgatgcagtcagcaacatccgagttcaggaagaagtggttgtgtcaggaaggtaacgtacatgtgaatttcgttgtccgtcataagtatgacgttttctgccttcgattccacgtgagagaagcgtggtgaggggccgaatgatagtatcagaatgaaaggattggcgactcgaaagaaacagtcccctaagaaaacagaccccaagaggaaggcaagacagatatagagctcggctaagacgatgtgatctgggaaaaatatttagaaggatgtcttggctttctttccttcttctctaattgatcgaccatatacatgaacatagacatatacgcagaggcggagaattgagggattttctctggatgtatgctcccccacagatcggaagatcacggaggcggaaaagacacagacttgacgatattcatgacaaaatacgaagagttcaagaaaaaccatcggtggctgagaattctccgatcgaaggccgaagcagagatcgagagtaatccaggcaccggacggaagggtttgaggttaaataaagaaacgatcgagaatccctcgtcgatcgcttctgcatgcctccatcttccggctgttccacccgggccaattaccccggtccgagagtacatatcgggctgaggctaaagcagccagggtgggcgaagcgatctcttcgaatgagatcagagatcgacaagcttaggacagcggcagaagagccaaggaagcaaccagcgcagcaagaaatttcaagtgcctttgatcaagtaccctcaaagatcttcatccgacggaagcaaaagcttagcgtcccgttgatctcgaccggtttatcttctttgatggtttcgttttatttattgttcatccccgcgcccaatctttccatccggtttgtttacactaactcttttcattttggttcttttcctctttccctcccattgtttcgtccaatcctttcgttttccgctttcttccgtctcgttcccccttccttcacggccgcgttaaaaaagaaaactttgtatttacgtcgtcttcgttcccgttcccttacgcctgcgcctcctgctttcttctctctttcgttcacccccctaatcattgtttgtcatctttatctttcggccgcaagtgaaaagaatgggaatgcaaaaatcacagtggaagcagcaaggagacgagaaggaagaaaatttcatgggttgtcacatgctgccgctcaaaggactggtttgagtctcttgctctcctcctccttctccaccttattccgcatctctgcctgctcccttccgcttaacgctggtcatcgagccgacaacgctgatgacggaaaaatgaaaatgaaaaccggacatgcttggctgatggaagactgatcgttataaagaccaagtgctacacttggcaaaaaggatcttttacttctctcccctccggactgtaaatcccttaaagaccacttctgtcttcctgttcctgaatctgttcctcattattcacatcccgtcaccttcatccagttttcggttttcttcttccaactcatcttgatttcacctcccacccttctttttcacttgggatattaaatcatctcttcattcaagaggccgatttttgtcttttcattttcacaagactctttcgcttcctcatcataggcctcgtatgggtcataacttgacggacagtccgtcagtgtcggacacaccatcaaaaataccagcgtatcctcggacgattgtctccctcgcttccagctatccgtactcgaaggcaagttcaaaatcagaaaccccgactgggtcgcctacagaacgtctcaagaagtccgtcctcgcatgcaatcactgtagacaaaagtacgtcttgtcttgttcgcaattgtagtcacagaaccccttgtggctgaatgtttctgagatccttctcaaactttctcttctcttttctctctgcaaacagaaaaacaaaatgcagtagtcacaggccgtcttgtgttagctgtctgaggtcaaacagaacatgcgtatatgcgtccactccctctgaccgggcggccggcagcagagagaaacggccagaagcctcacctgtactacctgaatcagatcccatcctaggcccgaattttacatcaactctcggcgtcgcgttggccaggcctcgaccaagaaaacgagcaagaacagatagtcagttaggtggaccaaagactcgacagcgaggtagtcacacagttagtgaaagtactttgaccaatgacccagaaacgtctcgatgggtcccatcaattgtgagtcttctttctctcttctctgtttgttctgtcacatgggtgccgtctgacttgggtatcaatcatctctacctggttatttttaactccttcagtcttgtgcaccctcgcctgtgtcacaatctccttctgaagcgatgacgtctctttcgccattgttctctcgctcagtaatgccatccacgtcttcgtgtcccagttcaagcacgatgtcgacgatgtcgacgatgtcgattcctacgccacaaggcgatcatgctacctgcgactctgtcgagaacccttcatcctcggccatcgttgactatcaagagctggcttacaattccagggtttggtcatcgacaccggcctggctggagcaaccatcgtcttcagtcattcccaaaagtccggttagtgcggtctaccatccaatcccgatgtacccctctttctcttggccagtaccggcggctacaacgtcggagatatcaccaaccatcaccaccgctaccagcctggcgctcgacaaccctttggacccatacgtatatactcctccgtcgacagcggcgtcggtcgcttcgacttgcactaatatatctaacggagaccacttgttcaactacccctatccattccagttctcatcagaactgccattctcgcttccagaacaccctttttcatctgtcgggccggaggaatcattcttttcgatcccggcttactctgcgcatcatgatctccctctcgaaccggtcgaattagaccgtacggcgatcacaaaggtggagaccgagccagagatggaacctgaatggggttatcctcacacgttgcattccctccatcaatcattggcgattcatgtgaatcctccgatgaggaagcgagtgagcgacttgtggaacgtgcagagtctcgaaaatccagtggtcgatccgttgagcgcttggagctagctatatgaagagtctcgataggctcctcttttctttactttttatcttctgcttgtctgcttgctgtgaactcaatgcatatacccttctttcaacccttctctttttgtgctatatcctttctcttcgttccttgctcttgccattttgccccaaaccattctctatccctcgtcacttgtcgctcttctccttcgtttcttgtattatgtatagctgtatacatacgcacactcttcttctgactttcgtacgacccaaaagaacacaaaagaaaacacaggcagtctcttgcttgcttcttctcttctcttctttatcttcttcactttttgccttcatctttttcttttctttctctttcttcttttaaggaaaacgttatcttatcttctttagctttcaactatttcattgtcttttataccatatctttcatactgcccttcacttgtataaccccttttgcctgttgatcttcttctctattttcgctgttcttccattctgctcttcctccagcctgtttgttctaaaacggcctacgaagaaacagaacgaaggagaatgaataagttgagctcagtcggccttcgaatcctatcctatcaatttcattttaaatctgcagatatgttctttttctttttcttctttttttttctttctcgatatcaatagacatagacgtagacgtagacatacatctttactatacaagacctttctagaactaaatgtaagaaccaaggtaacgggagaagaaacgaaaacaaacaacgtgaagtacgaagagtgacaaacaatgaaatagacagtaattttaattttttaaaaggaaagagaaaagaaaagaaagaaagaagaagaagaagacgatgtctgagatgaactgactgaacaatcgatcggctagccggatgaaaccaaacagaaatgtgaagaaaacgcgaactgacgcaggaacaagagggggttgcatgtgatcctagaatggttcatcgaaggaatcaagtttcgatagccgacggatcgtatcttgccaatcttgggagatcttcgtggtactcgggcatcgagcttattaaaagtgaatccggtttgccccatgcaaaacaagagataacagcacaaaagagagaagaagagaacaggaacagaaacagggtgcaacgccgagagcgaaggatgcagatcgcaaatgaggacggagaatgggtccggacgggaaggaggcaaaaaaaggaaaagagcaagatggcggataagtaaagggaacgccataatgcacatgcatcgaatcattcctcgacgcccgaaaataaacatatcggagggaaaaagaaatcttcggagtcgaagtggcggaagaaatcggaaaagacaaagttatgagggagatagggcagacgtacataaaacagcgagaacgtccctcaaatgatccttcttccgtccagcgacaataccgggaccaaaacgggggcttgtcgaggcatgaatgatcggagggggcgttagggttgacgtgtgcgtcgtcgacttgttgatccccgacaatgttctaaatccgtgcaaaagtgtttgattccggaagaagaaaaagaagacgaatcaacaccagagaagacaaccaagttatttttgtttctccgcgagatgagatgtcaaaatgactgatcaggtattcgggaacaaaagtctatgatgcgcatgtatgcgaaacagtctttactgtttcggatatggtagacatgtcggagaggtaaaaggaagtaaaaggaagtgaatgaatgaaagactaacgctcgatcagctccaaacatatttccactgccgatcgatccgacagccaagtcctctaataattcctcgaccttttcgacgtttccttgttctgccaaccgcttagcataagttcccagatacgaagcatattcatccaccggcactcctaaggcctgactggcatgcaatctggattcaagatggccgagtgtgatcgcttgggtaaaagaaatgggtgaacttggaccatcatttgctgaactttctacctgtcgaacgactctccctgcctctttgagattctcatcgtccacaccatcagtctccgaatcttgctgattgatgagcgcaccgatagaagcctcgagttgtgggatgactcgttttgaatgaacgatcgttgaagttctggacgtacggtcggatgaggattcccaatgatcagagcctctcgaccaccatctactcgaaaggacgatccaacaagccaaatgttgacagaatgtcaaagctcggccgttcgagaggacgaacacatgggcgtggttggaacggagactggatcggaaaattgttggtcttttcgtgctcgttgaggtgagtggtcggaggatggtggagatattgggttgagctgatgcgtaaatagcggtcttggtcttgatattcctatatatgggcaaaggcagagatcgatcaacatgaaatacaacttgtctataagaccaaaaaggaacaaagaaagaaaagaaaaaacaaatggacagaccaattgtacatcgttcccagagcagtcacagcggaaaggcccgtcttggaagcctcgaggatcgaacatggcccgtcaaggaaaagggtgggcaagattcgtcttccctgaagagaatatacggtgagagtaccatcttcgcaggataatgcggcaaagaacatggtagcaacaacagagatgaccgggctggacagataatctgaccagatgattttgtttgacgaacgcgctgaaatttcgattgggcctaaactcaaacatcattttagtaaaaattcaactttcaggggaaaaaaaagggagaaaaatctggcacacgacaagaggaaagggaagaaagcaaactgaccggtatttgtattacgaacttcaatttttggagagtccgcattgtcggagaacttggcagataagagcgccttgatagacggtattgggagcacgttcccacccgttcgggtttgatctaaattgacaaacgacatttctggtcgcgccgatcgcagatctctctcgagatcatcacctcccatcatcgtcctcgtcctcgctttcaattcagataaatctccagaagcttttcgtttcccgttcagcgatagtccagactgctcgacgtccgttcgcatctctatgtctctcattcctggattagccgaactggttgagggcatctgtggaggaaccccgagtgtggaagatgaggacgatatggctggcggggcctgtgagtttccgaagactgcctggttgacaccgacgatggaagaaccggtctgaagcatcgtcggttggatccgtttctttccgtttttcatcgtgatcgtctgtgtcaacggaacgggtacagggaccggtagagtggacgatatcggattactctgttcagccaacgaggtcttgcccgtcatacggggtatgagcgtcttgacggccgtggtaataggagccggtgtacgagagaccacttggctgacaggatccgtctttgattgagaatgttttctgaaatgctcgtatgtgctcaaaacgaccttgtgtgagagagagggagaaggagtcagcggtcagaaagaggaacgcactcggccgtatgatatgcagagcgaggaaagccgggttacctcgagagcgccctcttgtgcaaatccgctaatttcttttttggtgaaatcgaaacaagcgatacttccatccgaagagcaagcgtacaacgttcggccttgtgttgtcctttgaaacgagaaaacgagagcgaaaagaagaattcgctacaagatcagaagagaagaaagagacagagaaagaaaaatagcggcaacgtcgacctaccatgatagatcccaaatctttccatcgaaacattcggtaaccaccaggagcggtgacggctcgttgttcttccaaatactaatcgaccgatcatccgatcccttatgagcacaaaatgaaattcaaaaacatctcagcccaaggccagagaaaagaagcagaggaagaaaatagtaaacaaagagagaggtacggaccaaagcaaccatgcacgatgtcctattccgcgtaagtttctctcctttagggatgaacacccgagggttgaacgcctacaatcatcgtcaataaaagaggaaaaggtcaaggagaaattcaagatccacatcagcaatattcggccatctgtctatctccctccttcgaaagaaggtatcgatacgaacggtcacttccaccgtattttcatgtcccacaaagcagatatcttgtttccatccatgccgttggatgacggccgccgtgaagaccgctctgttcattgcgtttgacgaggcgatgaacgcaccatcaggcgaccaacttgaagaagaatgagaatgaagaatttttttaaaggggagtagagtaagtcgcaattgcttcgaccggaacctactgccaaacaaatcagggaaagaagatgacgaagagaaactcacctgagccttcggaaaaaggttgaacctggagaattcacgaaaggctctttgatcgtttgttggagtgtccaatctgatgttttccagatcttgacagatttgtcatcggactaaaccaactcgaccaaatccagccgtccgtttcgtttgaaaggggaacaagagcaagaggtcggttcatcagtggtgatcaattgaatatatatatatccataattgatgaaaagacagacctgtgtagccagatattcaccaacagggtcccaacaaactcctttcacgaagtcctcatgttgagcgatctttttgatgatttcttattgaccaacgacccgttattgaaatgaaattcaatgagtttatctcaaaccctcaggcagactagcacgcgcaaagaaaaaaaaacgcttctgaggaagagagaaaagaaatgaggggtacgtacgaaaagttgcggtgttccaaacatagaccatactatccaaaccgacagtggctagcattgcatcatcccttgaccacgcgagatcgaccacatctagttttaacccccattcatgataacgaacgaagaaaagcggtccatgtcggaagcagcgttcgcgatgtgatcgaccattcatcaagcacaaacaaaagaagaagaaaaaagagaaaagagctaaaaggcaaacaaaaagaacggaccactggaatgaccgacgagtcgctggaggggcttccaagtctcgacgttgacgtctgtcgatccaaaaattcgacctcctccgacgctgttcaaagaaagacaagatggagggaggcgaaaataagaaccgctgacacgaaggaaattttagagacacaagagtcagaaatcaaagaaacgaacggatccagatcccctgtggaacgcgacgcgacgcgacgaagaaagaaacagacgcgtcagttatatgcctcaaagacaagaaagaaagaaacgaaaagagcatacagatcacaacaattttgtcatccgaaccggaagccaggaaacgcccgtgatgagcccatctgacgcacaataccggtcctgaaagtcccaagcccgaaattaagaccaagatgcatacagaatcccgtaagccaagatagttcagtgaaaccctcttcgttcgctctcaaacgaagtcactgagagaaaagagctcggattgcaaagagaagaagaagaagagagagcaagtagaacagaccatcatgttgagtcatcgtgcacagtaacctcgggtttgactcgttcttctcaacctcttcatccaatattggaagtgtcgaccaaatccttatcttgccgtctaaacatgttcccaaaacaagtcgagtcattagttaaaatcagactcggcattactcttgaccttcccaagcgctaagtctcaagcgtcagtgagagtgaacggcagaaagaggaacggaccaagactaccggtagccaatctagaaccatctggatgaacgctgaccgaatagataggcaacctccctcgtttgccttccgactttgcgtctgttggtcttgcccgaatgcatgcgcgatagagggtacgagtaagtcaagacgattgatagaaacaaaggatccaaaccagcgaggcggaagagaaagaaagggggagaagatcagagcagagtgaagatagtcagcgctactgtagatcatccacaaatcgttcgtctgttattccaatctccatgtcctcagcctgactaaatgtgacagtagcgacgcagatggctgaggttgtatcgtcatctggttaacacatttgtcaagatggttgcccagccgaacatatgatgtatcgtctggattggttgctgaaacctcagtattcaatccttccgaggatctccagcggacctcgagagggtatccagaaagagagacagagagaggaatcgggaaagaaaaacagaaagagaaacaggaagaaaaagaaaacgaggaagaatcatcaagcgtaccctcatgtttcacccaagctggtttgatcaatttcattctcgccctcttcgttcaagatcagctctccgattctacgtgttttcggattttgaagctaacttcgatgtcgggtttcaatatcgatctcaatatcaacgtccaggtttccaagatctatagttcaactccaaagtgaacgatttgatgtggtcaaaaagaggaaagagcgaacgataggaaggcgaagagacagaatgatctataggaattgttttgttgcatcatccgcgtcgcttgggcctggcacgagcattgggttagcacagcccggagtgtaaacacgtgacaatgtatttactttttcatagtatatattttttatttttttttgaaagaataatgaagatctaggcaaaaggagattatttggagagcagagaaaaacaccggggagaccgaggaaaggaaatgatagaaagaggagtgtatatgaagcaaaccgggatgggatagataattgattgtacgagcaaggaaagggattgatggagactatagaacagagacatacacaatgatatgttttttttctctttgtttttagaagttttctgttaattacaaaaaccatctacttcaagttgccaaaagcttagagcttgggttcttcctcatcggcgagcttcttggaagtctcgttaccgaacgtcgggacggcaagctcactgttggatccgaccgaatctgtgagctcatcgaaagtgccaaagacgtcggcgtcgtcgacctggccgacgcccggaggacgatcaatcttgttaaggacgagccagaggaaagtcgcgatagcaaaaccgagtggccacgccaagtaggacaacctgaccagtttgagggagaccacgaccttgcccttggtgacggtagatatgaaaccagggagagacggtccaatagagcaggcccagacgaaaggtgccttgaggttgactccatggaagaaccaatagtcggacgagtagttgggggtgtacaggtgggataacctgaccttctgtcgacgaaggacgaagtagtcggcaaacatgataccggcaagagggccgaggaagatggagtaaccggagaggacggagaggaaggtggtggccgtattgacgagctgccaggggttgatggcgaaaccgacgacggcgacgacggcagatcctcgcttgacatcgatatacctggggaacatggtggccaagtcaattccacccacaacaccacaggtgacgacgttgatgcaaagctgactgcagatgaaggagagcgagaggaagaacaaggcggcccggcaaccggaggtggggttgtgttgttggatggcttggatcatcttgtacggttgccagagcagtccagattcaggatacaatccagctccgcaactagtgatgatcaatccgatgactgaggtgccgatcaaagaggctgggacgatgaatgcctgaccccaaactgaaagtagcgagaggaaagggaagaggaagaaaacacacgcgcacattagcgatcaacgaaacatagtatgactgtaagagttggatacttactttgatctccaggctttcgggcgtatcgagaaaagtctattgggcgagacgtgagcgaaacgatgagatcgtgagttgattgaagggaggactagagcggaaggatagattgaggaacctaccggcagcatagatgatagcaccggaccaggctccgatctttgcggtaattcctctggtcatggcccaaccaagctgaacgctggtgagaggctttattttgagcaacttggaggtatcatagataagtggtccggcatttccttgcttggcaacaacgtaggccaacagggcgatcgtcgcgatggacacacagaacgacgagacaacggctgggattcggtatctttccggtcggacgaacagtagagggaacgcaagacaccagaagatgacgtagcagatgaagtcattggttttcatgtttgccgaggcggggaagtggttcttcatggtgtaaaacccgggccagaaggtggcgatcaagtttttgacaagctgaccaccgaaccagccttggtaaccgtaccaaacgaaactgagaataagcctgttggcgacgacgaaccaggctcctcggactccccaaggagctctatttccgacggcgaagggaatgtgccagctgaggcggatgaaagacgataggaagtgaacaaggaaaaacaaaggatgtgaagagagggtttagtctaccggagacggaggctagagaaggcgcgcaagcaaatagaagagagatgactcacgttccaccttgcataccgttggcgactagagcggcggtaatgatgagatcagcaatgacggtcgctagaatggactgccacacgttctgtaaaggagaatgaagggaacggataaaaaaagaagaaaaaaaacgaatagaggaaagattagataagagcgctgtaccaaaccagactgcatacgctagggagtgaaactatatcagcaacttacaagaccgagagaaagtagggtggacgacccagcaagatcagacacattgatagctggaggcgtgattggtacattcggttgtggatacgaacgtatgtgcgcacgtggaaggtcaattaggaatcatcagctgacaagaaaaattgaagaaaaagaagaagaagaaaataaggatgaaactgactggtagcgagccagaaccagaagaaagtggtctttgtccaagttctccttgaaggaggcaaaggtttgatgtcttcgttgatctgacaaaggaatggattgaccgaaggaatgataagaacattgacaacgatagcaacaagggcaaaacaagacgttgatacatacataaggcgatgggtcaccgacgacttctgcaaacctgaacgtcctcctgaagacactcatgctctgatagggcgagggcgagaacgccgatgttgaggctgatgtctccatttgcaaagaagcttggtatgacaagaacgatcgagagggagagaatgaagggatgtacgagagcaggagagaagagaccggaattgataacgatggatgatctactttatagtgttcgtcctcccggaagtttttctcgctttgcaatccttcacgtttctttttagtctacactggaagccagctcgatcgaagagcaaagattggaaagcaaaagaagcaatgaggaaaaaatgtcaacaaaggcaggaccaaagtttggattaaaaaaaaatgcttggggataggctgacaacgggcgagtcaaggcaagacgaggcaagactagaggaaaggaaatacaatgggaaagaccaaaaaaaaaaaaaa

SEQ ID NO: 2607 - DNA, 15876 bp, Xanthophyllomyces dendrorhous
ttattattattataggaaacctatgttcctaacaaatggatagttgagtattcctctggagtcgtcagtagtaagcgatccatggtaagtcttctcgtgccgtgtatcatctgcctcatgcgcactgaacaaatcatgcctcatctactttgcttgatcgcgcgctttgctacgcaggaccctcatgaagcttttagctctcatatggaaaagaggggtattcttcacgacgtccttcgagtatttagcagccagggtctcttcactggagctactattgctgttgccgatgccgttcgtacttttcccaatcttcttcaaacatatcgttagccagacacttgctctagtcatgctgaccctttcaagttccattggtgatgttcgggcgcacacattcaacgacaggatattctatcagtccaatctatccctggcgtcatccgggcttatccggtcagactcatccctcgacctgatttctccccccaacccggctcgctggctggaatcgatacctagttgagcctttcgttatctcctttcatcgaatttgtagcctagtgactgatttcgataatcgcgcatcggttatgaatttaccttcatctcatatcttctaaactaaatcaaaaaaccagcactcctcacaagatgacgaacgtgagccaacttcacaatttaggcatcaaaggcaagggtgtccaggtagccatcatcgattccggagtggattacaatcatcctgctctcggaggatgtttcggaacgggatgcaaggtcgtgaaggttcggcttgttctctccgtcttcgtttccgtattagatttgatctaattgttactgaagcacatcgtcttcccttgccaatgacatcccttgaatcaaaacagggctatgactttgtgcgttgcttacaatgattcactctgtactccccttggttctgaatctgatgtcttccttttgatatatcaggtcggaaatgcttatactggaggaacgtccactcccgtcgaaggtaccaatccgatcgactgttctggccatggaacccatgtcgccggtatctttggagcaaatgataatgtcaacaacttgtatgttcaacggatatatggcgctcgatgcgaataacaagagtctgaatgctctggatctgattaaatacagtactggagttgctccagaagctacgatcgctgcgtacaaagtgttcggatgcacgggaagtgctagcaacgatgtgatcattgctgctatgctccgagctgcttccgaggtgaggactatattcatgatatcaattcgaaggaagtcatgactctatcactcaccatgccttcgttcttcgtctttctgctgttcatcatagggatctcaaattatctccatgtcgttgggtggcgcgagtggttggagcgaagatgctgtctctgtcgtagcctcgagaattattgcacagggaattatcatcgtgagttatcgagagacgtgtcctcacaacagcaaaccgtcaatgactgaagtagattttatgacgccttcatacagactgccgctgaaggaaattccggtgccgaaggtctcttctatccttccttccctggtacgggtaacggtgtgatctccgttggcgctgttgacaagtaagttcatcggcattgcccgctctgtctattcatcgacgtatgccaaccaataaattcgcaaactcaactttaatggtacttcctagcctcgtgactcccggtcgatacactcttctctcgaccaccccacctacacccatcttctatgacggaaccgccgctatcaacgtgtcgagctcgactcaataccctatctatctagcttccaattcgacaagtactgattctcaaggatgcacaccgttcacagttgatcttacgggcaaggtcacggtaatcaagtaagtaaagacctgttctctaaattcgtttaggaaccaccaaggtatatgtgctagacaaactagctgacacgtgactgttgttcaaaagacgagggatctgcacatttacagttaaagctcaaaacgtgtacaatgctggtggacgaatcgttcttttctacaacgtgagccgatcttgccctctctttcctctatcaaaagctcaattcaactaagttactttccctgtcgcgaccattagaccgctaacaccgcgctcagtgagtatcaatttgttctataaattcgttaacacctcctatgtggataatgactgatgatcaagaaccactattgacgggcatcttgtctttctcgtttcagctgcaactgtcaacggagtagccgttcagtctggcactttgactctcactggcggaacaaacctcgtcaatgctgtggtcgccaatcccgcgctgacagtatcgttccctacgggattctacaacttcccaaaccctactactggtggcttggtctccacgtacgattcctcttgccgtttaagcatctttttaaatagagttggtcttatccaaattacgtctgcatttttatcaaaggctttcttcttggggacctacgttcgatctgaagatcaaacccacaatagccgctccgggagggaacattctgagtaccttgccattgagccagggtgcgtatggtgttcagtctggaactagcgtaagtttcctttgagccgaataccatacatgaaatgctctgtagacactgatgtatcttcaaatgattatctgttcgcatcagatgtcttgccccttcatctgtgagtagatctcttggcacacaagtctagagtgacgtgactgattggctcaccaagatgaattctatccatagccggagtcatcgctctctacattcaaaaaaacggacgcattgctcctgatactatcacctcgaagttaatcacgagctcccatcctgtctccactactgtcaatggcaccttaattcagcctgtcattcagcaaggaggaggcttggtagatgcctatgcggctgtattctcgaagactgttgtgtctccttctggatttgctttaaatgatacaacgcacgctgtgacaaagtcgactttcaagatccaaaacttaggactccttcccaagatttaccagatttctcatgtacctgctcaaacagcttctaccttttctagcgtatgttcttcaaatacacactactcaaagagctgactgatatcagaaagtcgctaaattagttcgatacttatttcctaaacagagctccgttcagcctagtctctctcctgctttcgctcagaaccccgctcaggtaaccttctcgagtacctcggtcttggtctggggtctcttgtcatcacaagtgactgttaagttcacagctcccgtttcgacacctggaaacgttcctgtgtattctgtaggtctattttaaccgacctgtcttactgattgttgtaacaattcagcttgataactgatccttctcacattgtctcgacaggggtacatccaaatcaagtccagtggtgaggtgtatactattccttacgctggtgtggccactagcatgcatgacaacttccctatcctcgacacgtacgcgcttgtttgattttcgttccgatctggctagattgacctgatacaacgttgtctcccaacctttcctcatgattttcttcttctagtaccaactactactttggaagtaaccttcctgccctctctgatgccaaaggcgcctttgtcactgcacctagaacattcacttttgtcaacggcggtgcgctcagtttctcagtcgtttcttgttgttcccatttctcaactgatcagtcttcgttgtgttgtcgctgtacctatatagacgttccgtctgtgatacttcggtatgtttgattcttatctaaaaaaagtcttcatcgaaataaaattgagaaaaaaaagttaacaaacctgacgtgtatattttctagactgatcggaggaactgctaagctcctcattgatcttgtcgctgcgaataccaccttcactccgaccatcgctaagcgagacggaggcgttaatggtcgaatgacccacgtagccaagcgagctgcgcctgctgctcccatcagtctcgctcctctcgtccaggtaggtttcgtctgcgttacgaactgccgttcagactcattttgctcaccccatctgacaacatatgtatagtactcgtacaactatcgtaacgttcctgattctacggcgaatggagttggatgtacgcagtctttgccttgtctgtttcgattcactttttgttcgggcgaatactgacaagatcattcacgatctttgatagatcaaaaatacgccctctcgacgagtaacacttcgttcacttatgtcacctccgacggaaccactgtacgtgtacccgatggaagctaccgcgttttaatccggggtctgaagatctttggagatgagactattgagagcgattatggtgcgcctttccataaattgttgcttgattgatcaggcttctggacttattccccaatcaatttcgtatcgtctacagaatcttggctcagccctattatcacaatcgcgcaacaaggcacttcaagtgcttcctccgttgcctcatcatctgcttcctcttccgcgtcttcatcctctcttgcctcttcggctgtggtttctgcctctgtctctgtatctacctcaacctctacctccacctccgcctctacctctgcctctgcctcgtcgtcatccgctgcctctgcctcctcggtttctatcgttactaccacgcagagttccagttcaatagtttcttcgtccgcctctgctacgctgactgtggctcgtcgagcctctcacaagcggcagcattaagtcgaggtcgtgatatgctgtatcttgctctactaatctttctacatctgatattctacctcaatgccattcgtttttttttcttgctcccttagtataccctaataggtttatgtctctatattcttcaatctctttcttcttcgtttcgctttctctccaagttgaatactatctaatctgtctgtgctgagagcaggtgaatttgtagatatcttgtagtgccatttctaacttgcttttactcactccttcgaagctaatgattcatcgatccatcgatcttcttcctctcgtcgtgcgaagaaacaagtataaaaacatgccataagatacattccagtcgtctgagacgtacaaccatagtttagcaaactttgagcccaactctttctcactcctgcatagccttgagagtatcttcgacagttcggaggaagatcgccatctcttcgtgaccaaagatcaacatcggtcgcaatcggacctatttattaatggaaaggaacacgtgtgtggtcagcacagatgtgacgaacggcctgggtgtgctctcttcaggaccagcatgagagaacaagaggaaggagaaggagtgacgcacagcagcatctccgcaaccacccatcaagacacctcgttctctcatcatctttacgaacgtatctctcttctgtccgttctcgaaatcccaagccaagaaagttccccttccctttcctctcaggcttctcggcccatcgtactttttgaataatttctcgagggactcgtagagctcggtaccgatagcagcggtgtgaactgtgagatcatgggtgttgataaagtcgatgatggtgttagattgaagaagggtggagggggagcccatccaggtgttgtacattcggtatccatgagacggtcgggtctctcgacggtgatagaacctgtgacggatgagcaacaatcaagtcaacaacctcgtctcttgttccatgttcatcggattcgaagagagaacgacattaaaataaaaaacttacccggcagcctgagccttcttactgaatgtgacaaagtcggggaactcatctttgccttcgaccaggccccaggcgtcgtgagcccagaactgaccagtcgctccgaacccggtttggacttcatccgcgatgaagaacgcgccgtgttgatgggcgagtttgatgagcgatctgaagaaggcaggggaggcgtgtctgtccccgcctttatgtgatcaatttataagaagtaagaaaagccatcgacgtcaatgccgagttgaagcaggatgtaagcgttgaataataacgaaccttcagagaggatgggctctacgatcaccgcagccacaggggacttctccttcctgctcaatcacaatttactgttcagccttctcgatttctttaaatatttaaataaaaatgattcagatgaaaacgaaccactggatcaaaatctcctcagtcgccttgaggcaccgatcttcttctctctggttttcttcaacgtgatcctcgagaggatacttgatttctgggaatggagcggccggccagtcaaacgccggaatatcaagctagtgaatgtcacgaacccgaaaagagatcagttgaccatcgagtgttgtgctcgaaactaagaacgcagcgagaacccaccttgtgtatagccttggatctggtggctgaaagacttccgaacgtccttccatggaagccagaggtgaaagaaagtacagacagctgtggagcgccgggagattgattgttcattaccgattctatatcatgtcgcatgagtgggtcggctctcgtgagtggaacgaacagatctagagtaacagaagagatagaagtcgttcttacccatctcttcggcggtaaagtcgggctgagagttattggctctctctcgagcccggtaagacatgcatgccacctggaaagaacagaacatgactcgatcagtttcaattttgaatacaatgcaacggtcaagtacaaagggtcggaccttgaaagcgttctcgactgcactacttccacagagcatcatcgcgatctggtccaagccgcccttaggctgaactttgagaagtccttctttgagccaggtagagtattggtaaggagggaaagaccccagtgctggtctggatgaagcggccacttggaattcgcgctgagatggataatagccagaagagatgggtcagcgcttgactttctgctcttgtcgggattaaagggtcaacaagacatactgtggaggccaacttcaaaagctccgggttgttgtaaccgactgcgatactggcgatttgctatagtacgagaatgtcccaaagcttttttgttcattcagctaacgatgttctaagcaaaatgagatgcaacgaatgggattactgacggcaaagacgtccaagtatttgtttccatccacatcaacaagatagtttcccagagatttgtcatagtctaccataacctggtaggttctaggatcgatagtatcatctgcgtcggcgagctaacgagttgtgtttcaaaagggttggtcagctattgatgccaagtttacgtagagagcgttcaaagcatagactgacagcccttttggccttgggacccatgaaactcccgtcaatcaacgtgacggagggctctttgggttgctccggaaaggcattcttggatgcctggaaggcagcggcgagcctggcagaagagccatggatcaaacgcctggagagaccaacgaacggaccgagagggatgagtgactttcgggctacagagatagaggccatcatgttgggtgtcactagattgagactgagggcacaagatggtggattggagagaaaagaacaggcagatggaggaccaagattggatctgtgaaccaaaagagagaagctgcgatggaagcagaagagaaagagctgaaagagacgagatagaaggtaaagaaagtgaagaagagagaagttccgacttgaccgcaacggattttagaacaaacagcgatggattcttatagattagatcgcaatttaagcgattatctaggccgagtcacttatttcagggcccggttaataaccggtatgggacttaaatataatcatctatcattcaaaaaccgagataacgtcacgtgcgggagctcggttggacccagtggcaacctgatcatagtggcaaccgtttccatcttgacgttcatcatacacacatatcataccatcctacgcacaccacatagcacatacctagtcggacgaagatgacgacgatacgatcgttccaatcagagatcgaggttggtctctggcttcgatggtcggtggtccatggtccatctcgatcactcagttgactgaccatctttctgcccttcccgcgttcatacccgatggtttgtttgtaggaaattcatgatcgtcatgtcgctcaacaaagagagcatgccaaggaacttcaggctaagcagcaagagttgaaggcatccaagggttctctcggagcaaaggacaagaagattcagttgaccgatcccttagctgcgtcaggtctaaaagcagtgaagaataaggtagagatcgtagctggaggaccctcacaggtcaaaccgatagacatccacgaaggagggaataaagaagagcctgacatcgaggccgatcttaaggtccgtccaagtctttaaactgtgaccgatctcttactttcaatattgactcagtctttctactgttcgcgaaatgcaacaaatagactcttctgcttcttcctacatcggacctgacgacatcctccatcaaggcgcacttagctcctcggctactccgcgcgcatggagagttgatagtcccatttggaaagcatcaagacctgaataagctgtatcatgagaacaaggcgctgagtgatgaagaagcaggctacgtaggtgacgagttggagggcggagagaaggatctggagaggatatcgagcagactgatagaggttgtcaaagatatggaagttgaggtttgtttaggatttctcgtttttgtcattctcctacataatcacagcaatattaaccccggctcttggtgtcgacattctataaatctaatttgaaaggccgtagtattggataaaagtcttactccctttccgcattgtactatgcttatccgtacaaatccttcttccatagagcagatcagtcagtcctgcgttctttttcaacattggtagctttgattacttatcagtgtcctaatcaaacaacagccgagcttcggatggctgtgattggcaacgttgatgcagggaaaagtacgatgcttggagttctcacccgaggagggcttgatgacggaagaggtaaagcacgagtaaatctgttcaggcataagcatgagattgaaagcggacgaacaagcagtgtcgggatggaggtatgggcgcactttactattctgacttcgcgcgcgtactttgtaattgatgttgatattcctcctcgatgcttatcaaacaaacgtatctcaaccagatccttggatttacttcaacaggtcaagcggtcatcccctcatcacatacgtctgtcgctcagatagctgccgaagaatctggtttcataccttcgaccggcacgagcgcaagaagagaaaagctttcctgggatgaaatctgcaaacggagcgcaaaggttgtgtcgtttatcgatctagctggacatgagagatacctgaaggtcagcggtcaaaccgtatagtcagcatcgactgagaaggcatagctatgtctacgatgaactgaccttgggttctttacacattgcagactacgatctgtgtgtatactcctctcttctatcctaagtacttttcctcgatactgaaatttcaatatttattcgcgttgcgaccccacttatagttggtatgactggatgttcaccagtaagaactaaatgtatctgttagctctttctctgtgtagttaacgctcttgatcgttccacgcgtggctctatcaggactatgccatcttgatggtcggtggaaatgctggtttgattggaatgagcaaagagcacttggtgtgtggattggtttcatttttttttatctcgtcatctacgtatagcttcgcccgatcaaacatgcacacgcatacttaatgtgttgttatggcgtcacaggcggtcacgttagcgctaaacgttcctgtgatagtttgcatcacgaaggtatgttctctcgatgtttcctcttcgttgccacaagtggcacgcacatttcgttcgtcaaatttcaaagtcttacgctttgtcttaactcggatttgttctcacacgtagatcgatatgactccaccacaagttctggagacaactaaaaaacaattgaccaagattttaaagtctcctggttgtcggtaagttcctgcgctgagacggccttgtttttgcaatgttttcgatagatagtgatgcatattgtctccccgttccacagacgaactcctgtgtttgttgagtcagaacgagacgtcattgcgctttctcaaaacttcgtaaaggaaaggtacgcctctcatttctgttttacctctcatcaacaatgtctacagctcatctttcgactctatgtgatcatattcttcaatcaggttctgcccagtgttctgtatatcaaacgtgaccggtgccggccttccccacttacgatcgttcctcaacttactaccttcgagttcgtctcaaggccattacgaagtagatgctccgctggagtactcgatcagtgatgtcttttcggttccgtttggtgagttttgcgaaatgttgggatacatgtatttttatatactcttactgaggagtagtgatgttctgtctacctttggaaatcaagttggaacggtcgtggtgggtatatttttcttctttttggaaacactacgctctttagattctgatttcactgtatcaattttttatctctgaagagcggagtgattcacagtggtgttgtcaaaacaggggatactgtacttctaggacccgattctgtgggccagtacgtgacgactgccgtcaagagtatacagcgtaaacgagcttctgttgaaagtgctgaagctggccagagcgtcaggtaagcctattgattcgtttgcggtgactattgatatcagttatggtgttcaacccttgtctgtttatatcatttccaaagctttgcattgaaacgagtcaggagagcagccgttcgcaaaggtgtgtgtccattccactcttttcttcttagcgtgttgggttgcttatccagcgccctcaaattttccaaggaatggtcatcctggccaagacggaagaagctcccaaggctgtaagaaggtttgagggccagatcttagtactatagtacgttgcattcactattttaccgatatcggtactatttttttttgttttcagaaccgattttcttttcaacagctggttgattgatatgcttattgcttatcacagtcacaatacaacaattcaaccgagataccaggctgtaatgcattgcggtagtataaggcatgttctatatctcttgttttcttgttcggccattggctgacagattgttctttgtttctttccaacgtcagacaaactgctcgaatcctttctttgtaggtctctttgtcttttcttcctattgcagaacatcatgtgttcaatatgcatcttgactgactttttacttctatgcagggaccatccacgagggcttctccgaacaggtgatcgagcgaatgtaacgtttgagctagtgtcaagtcctgaatacctaaaggaggggatgaagctcttgttcagagagggaaagacgaagggtctcggagtcataacaaaaatattgtagggataattctcaatggtgcaatagaccggttatctctaccttctctttctttttagcatggtgatgtttgtactcaattgtaaacatattgcatgtacattctgcccagatttggttgttcctttattccgctcttgcgcaaatagtcgtgaacttgaatgtgtggacttagtctcttgcttggttttttttaatagaggaattgtagatgcatgagaataagacgactggttgaatgatgcttatgctgttgatcgaatcgaaaactcgggagtcgatagtttaatactaagaatagtgtataggtaagtgtcggattcagacgaatttcaagtaagcaaaggaaagaaactgacgaggtagggaataatccgggacttgacgatctcgcagtactgtagatgttggtcggtttcatttgcgtacggacgcacatcgaataataagcaaagatccaacatgtgaaaaaggaggggcgattaaagaagatgaacatactcgatcccagtccttgccatacttcttcttgcaggcatcgtcgtcccgacgctgtcgatgaacgagaaggattgcaaaatagatgacgtagaagtaggtgaacggagtatcaaatccagtagggaggcaccatgcccaactaaaaagggatgttccgtcattgttgcgagacaggaaaacacgaagatagatgaaagcaacatgagctgaattgatcatttgagtgggagtaacaaagcacaagaacgtatgagaacacatacgccatcgtccaatctattcagaaaatacagagttcagggagcagtaacgatgaaaagtcaggctgaattcatcttaggtgaagtatatcaggaaactgaagaaatggagaaagagttacctcctaggtagttgggatgcctcgatcgcccccaccagcctgaagtaagcaatgcagttccacgctcggttttcatcgaggtcaagtctataccggatttttcaatcgagaaaacacaagtatgcgaatgtccaaattcaagtcaatcattctgtcctctgtttgtgccctcgacccatcggtgagggatgaggtaactatgccaggaaaagaagacacatactcctagggttctttcctgctctaaaccactctttctccaagttggccgcccggaagatgtagtagcctccaacctcaagtccaatgattgccagcacggccaaggtcgagagttcggtcgggtggaaagcgaggtatcttgcctgaagcgaatacgtgaatggaacccaggcgagatcaccgagagacagcatgaaaccaaagccatcggtggtgatatccatctgggtaaagatcgcagtctagattgaggaaaggaaatgagatgatgtatatcaaaaatatgaacacaacgtcaacgatgtcaaacagaaagcgcgaacctcgttgtaaagcgcatcaatgacgtagattgagtggaacacgacaacgaggatcatggaagcagcgaggtatccatcgcgggtgtactgctcacaagccatcgagatatcaatgatcatccaaagaatgagtcctggccgaagctcgttgaaagtcttgatatcgaatgaaccaatggagggattgagttcccgacccatccagaactgttgtcccatggcatgtacatgtgatatgaaagtgttcagctatcaactgagctaacagtgacgaacagcgttggagagaagaggcaaaaaccttacgtcgtagaaaaatcgacctgaatttccagcaagggccatcaatcgctcgtccgtgttccaatagctgacagcctgacagtacagtgcttgggcgattgacattgccaaagacgcggtaatgaggccaagataatgatcgtagatgaaagtgaaggattggggaccggcatgaatgattcgaccgaggacaaggccgagagagaggagaagggttgaaaaccctggattgggatcaatgagagttgaggtcggagggagaagatcgatctatcagctccttctcaattttgtgcgcgatcatgaaagaacggcaaaatttgagagcacaaacataccattgagcttgtagagcttcttcttcccgtccctcatagcagctccctcgacccattcgcctggcaagatataccaacacgcgactgtgaacgcgtaccaagcggcgtaggccttgaacgcctgagcgtcgaagagttcgtccaaccacgatccggccagaaacctaccgaaccaggtagacaatgggggtggacatccagagtgggccgaagtagtaaagtaaaggaagtatatagcaaacggagtgatgaagttgaggccgaatgtaccgatgtgacctccgaactaatggatggtttgtgagggatgcaagaaaaaaaacacgtataagtacttgatcggaagagacgagaacagaggcaagaaagattgaccgacctcaagatcatgatgaggagtcaccgggttcagcaccttggtgtccttggaatcgatatcagccatccagaaaacaacaaagaggaagatgaaaacgaaagatcgagatcgtcgttgctttcaaacaagaagagacaagatgtggaaagtgaaaaatgacaacgatatttaatcgaaccacttttcagccatccaccatcatcaacgataacgacgacaacaagaacgacgacgatgacgacggcaacaacatcagcatctttatcagctgcgtcttctatcactgccaacaggcaggctggttcttccttgcagcccaaaccagccggtcatcagatgcgaatcgcttctcaaggaacgctcaagaactatgttacctttgctgttaattttctcaaagtatgtctacctccctcttttcctctcttctgacatgttctgatgggattacgctcatcgggttcatttgctcgtcgtccacgttatcaacattattttttctggcgcttgagcaggaacacccaacccgatctctgactctccatactctcccgttcgttcctccttcgaaagattcggtcgattccgcctcttcgtccgaatcacggaccacgccttcgaatcgtcaagcgagcgcctcgtcgattcctcagttgatctcagttgtagaactcgttaagcggacgttcctttccctcttgtcgcctcttcttgatggctctgatgcctcttctggtgagaaagtcgaccgatgggtagaacaggcaagagaaaggggcctgtggcagtacaatgagacgggcatccttgaggatatcgagcatgaatttgtcttccagccacaagacaagaaggctggtgaagaaacagatgaggcagagcaagctttagagaagctgaagcacatattgggaggaaagacagggtatgtcttcttccgtctctctgcacatcgtttcctgtttgattttggaaaaacatactggtttctacgcttacatcgcccacatctgccccctcgttgctcgaaccaaagtcctaaaatgatacacacgccatatatgaagattacactctccactgttcccattccttctcttgcctctcgaaaggaagtaacgtaagttgttctctctcagcagccattacacttgctcgctcatatgtattcacatcactaacgagagaacaaaacaatacatcttatccatgcacttatttctcaatcttcactaacaaacaaaaaaagctgccaatccattattctgcctccacgagttaaaaagtcgaaaaacaaaggtcgacaagcccgacgacaaaagcttaaacaggccctgtgtaggaaaaccgatgaatccaatacgatctccgctcaaacgaatattactacccctctgtctgcactcgctgctgtttctgaagattcttctgctgagggatacgcggcagggactaaacgaactagcagtcagacagatggggagaagggggtagttggagggaagaaaaggcgaaaagtcctggcttagaggggacttttcgaaactctcttttctcgtcccaaaggcagagaacagaaacgcgtctgtatgagagagtgggaa

SEQ ID NO: 2608 - DNA, 27680 bp, Xanthophyllomyces dendrorhous
gtatgagagagtgggaagggtagtaaaaggaaggagggagataccgactgtatccctcaacacaaatcgtgatcacacgccaaataccgctctgacctcttcctctaaatctctctcattcaagcttgccccccagccgtcgaatccactatcgttgtaatgaacaccgccagcaataaacttggcacttctctcggctcgaagggtgagatcgccaatcaataatcgggcgggtgttggtccaagaatgtcgtgtactgtcttcctggatagaaagacgggcgtaggatactggaagatagggaactgtgtgtgaagcagactttggtatattcgtgaaacagataaatgaatttccggtggacactcgtcagctttattctatgtctgaatggaaataaatgcatgtttgagaagatatgagtgaaggaacaggcttacgtcgctagttccgaggcaagtgatagatgggtcttcgatgcgggaccggtaaagtaaagttcacccctttgaggatcctcatgggttgactcggtattgtcaaagtcatccagatgatggttgttgtatctgttgagaggggccatgttcgatgggagtgatcttgaaatcgccgcctctacctctgtcgccgtcatcgtcatcgtcgacccggttgtcatattctgggacatgttggtcggactgacagcagccgtggccgtcgctgtagcagcatacatatcatctctcgtttcaaagatgctgcccttccgagctgtcttgttgacaggaacggaagaccgtcgctgcttggcaagagaggaaagagaaggtcgaggttgaagttggaaagcaaacggtcgatcgagtggtaccggtggggttgtgtgcatcaggacacaagtcaggaaactgacgagcgatcgaatgtggatagttgggtagtctagttttgtgcagcgaggggcaaaggaagagtaaattgttgaaaaaagagacccaaggaaagcttcttgagcaaagataaccgactaaagtctgagagaaagagaaagattcaaaagacttacgacccgagccgtcgcctaccaggccaactctacccatggtaaggacaaggttgatcaatcgagggatcccactccctattctagtaacccccggaagatgaccgtagatgagcccagcagcaacaacgatcgtttggatcgaatgcgagtttgactcgagggccctagattcgttgaatattcaaaagtatcagtcaaagataaacagaataaacagataggtaggtcagactagatgaatctatcaaaagagaacgatatatagcgaatatgatcagtgacgaaccaacgaatgataggagttgatggatgactcggagatagatgcgacatcacgtctggatccgtatcctgttgtcatatcaagccgtcgtccgaattccaagatcgtaaagcaaaatcaatgtcaggtcgactggattataactcagctcagaggatctgagccccactcgagatgaagagaatcaaacttgcgtcgagttgcagctgtcccgtattttgccctttgactcgcaacttgagctcctcttcctctgtaggaacgaacgcgtcaacgccggtcaaatggatcaacaccggccttctcctcccccgtctctgttcaacccgggtggtcatgccttcgagcacacccgacatgaggattgggcaatctgagtttgcgagagagagcacgatatcaacatccgagctaacctgagcgatgaacgtccggtccatcaaatcaccccggagaggaaagactcgaggatgaatcatgtaagaagggaccctgtggtgtacaatgaaaaaacgttcaatagctcgctcggatcagagccaagcgcgatgcaagagaaaagaagaaggaaaacaaaaccaacgaggatgaccgatgaacagcgacgatctcgtatccattgagagaggccaattgagataccaagaaggatgaaccgacgtaaccagtagatcccaactaggtagtcgagcagattatcgcgaggaaagcgcaaaaattttcatcataaagatcagtaaaagtaaactggatgatcctgaaaccaagatatgctaaagctgaaaagagctcaccaagagaatcctgggtttgatatccatttggagggtcagactgagagacgtgttgggttgttgggttgtagggttgtagggttgttgggtcgaatagatgtttgaaagaatggtttggtctttgataggtttcactaagcttctgatgtagatgtgcgcagaagcatgactgtctctatccgagcgagaagagattgaagtgaaggaagcaaagggagtagagggagtgaagggagtaaaggagaggaagagcgagcgagatggacagaagagtcaagacagagaacaagaacgaggcgaatctgtgagcaagggtgaagaaggaggagaagtaagtcagcaagacccgttcggtctcttttctatgtacaaagaggagcacacgaaatcattgaatggttcggagccggaaagatgacaaatcgaaataaagtgagttgacttttttttttcctctttctttatttttctgcttttccgatgttgttccattcgaccaagcatgttgatctcgtcctgtttccatctatagtcagcactggacatgaatatatacacatcgatgcagcacacatgcgttccctctttacccagacttgtacagatcagctcttctgttgggtatctgcgaggtgtgagtgagaatgagggagcgcgtgcgcataatctagccatcaggcagcttgcctcgccgcgatttctctcatgcttatattcatccggcccgatttcggaccgttcaagtgacaaatcacaatatcagatttcaccattggtttcgtcatatgtcatcgtcaataaacagaaaatctatacagaacaagccggaaggagtcaatacaggcgaacgtatccgacagaaacgtctcgtgggcaagaggaagaaaaggaagagctggaagataagaagacagtcgttaagagtataactaaaagtgaaagatgcattccaggatctatgtctccctcgcatggaccgggcaacttctccctcgagagagccaagcgctgagacagttgtcatcgaacgtacacaaacagttcaatcgggccaccttcgatcctggctcaaactcttccaaacagatcacacattccatcccgatcaacgtcgagtctggtgcaagctcgtacactgccatagccctcaacacagatcagttcgggtagatctaaacatgaatccgtgatggaagagatgcacgacgaaccaagatatctcccggtctgaacgaccgtttcgccctcgagacactcctggacatgtctttcttgagcacccacgtctccaaattcggctagtggcttcaaacatactggacagctatgacacccagacaacatacacacacatatggacttatggatcagtcctctctacgcaagtagcttctgagcggtgaaacaaattgatatatatatatatatatatataaacagacacatactctgctagatcactcctcgacgaactgatcgtggcccctgccacactgcctcccgctgtttgaccagttcgatccctcccttggccttcgccgcctttgttaaaagactggccgatccttcctaaaggcaggatcatctcggtaaagcacgggtcgcatactcggtggggcacatgtatctgatctgagatcatcgagaatgccatcgatggatccaacacaatctccgccggcaagagtcgtgtcgtccgacgttgggaacacgagtgacacacgatctgaccacatcttctgcaatgatgttttcgtaggaaaaagttgaaacctcggttgcatcgtctgcaggccgacacgtcttcgtctctctcccatacaggaccttatcgaaagaaaatcaaagaaaaatccgaacgtcagcccctcgccatacttcacttttcccttcctctctacgtcgttttcatgaggaagaaaactcacgatttactattggatttaaccccaggccaacgccattccttctgaacggtataccagcctccgtctgagggacaacgaacgttgcgctctcagaaagctgggtttcgatccctggggactcgtcggttacctgatagaattctgttgagagtgaaaccgaggaagatcgagtcgagcctcgcccttggggtgaacagatcgaaggcgataccgaggccgattcgcctggaacgaggaacccggacgtttcagatccagaatcacacatctcggtttcttctacatctgagcattgagagttggatttaacatattgtcaacaataaatcaaagacgatttgtgtttgagctcgcccctgtcaaaggccataagcacataaaaggatctaaccttcggggtgggctgattcagagacgacgagccggagcgcatccaactctatgtgaagtgaattcaacaacccttgggctgcttccgctctgacctcatccgagtcccctgtgatcgcagcaaaagaaagagagtaaagtatacggacctcaacgctcatgcaaagcatattcgtcgaagggaataggaaaaacatacgttcaatcccaaccctcaacccactcaccgctctctccaacttgcctaacgttatcttcaaggtagccggcgttcgctcatccgtgctccttccaggggttgtcccgccacttcctcttcttcgtccacccgccaaatatctcgccctcgctagatagtcctccgtcttattcatctcaagttccattcctctaacggaagactcttgctcgactggaagtgcactagccgaatccaaactttcattcttcctgttactcctgactcgcgaaccgtccagattgaatccgggagtgctcaaaccgtctggttcgagaaacggcaatgcgggcacgtctaaccgacgtttcgaaattctgacccaaacccgacgacggacccacttggcggcgccttgttcctcgattgaacttgtattcggtagggggatagacagagacgacggagagggaagaagtgaggaatgtaacactggggatcgaccggtgagtgccgaacttagttcggcgggtggatgagggagccattgatctgcaggtgtagagaacgtaggagcatacatccagccggtatgaggatcacatcgagggtttgactacgattatatataaatccatatagaaacagtgatgacaatgagacaccgaattgaaaataaaaataaaaataaaaaaccaagaaaacaagaaccacagaccagatcaacttcgaactggctcagccagaaccagccttcctcttcctctacctctcgagttcccggaagaggcatcacaaagggtctttccaacgaaggcaggttgatatcctctagctcttctattggcacgacaccctcccaatcacccggcttaccaatcgtgtcgaatgaacctgtcggaacccttaactcccagggagatcgtctgcctttcttacccaggccagaactagagaatcggggccggccggttgacatggcgagagtcttcaagcgcgcgtcgagtctgagaatggtttcaagtccgaattccaaatgagcaatgagaggcaactctgggaggaaactcgaaaacatgctgaatattacctttggttctcatacaccacaatctatcctcgctcgaaacgaatgcttagtacggtggaaacttgtgcgttctcgacagagctgagtcacgtacaggaacgctactgtgtactgctaatacattgtatggctccgcccgaggtacaaccatgtccggccatcgttcagcttcgaattgttgcaatgcctaagtttaccgtcgtcatgtgaaagaaaagaagaggtaattatcagtacgttacctccaacctaggcgggatgacatcatcataagaatgcctacatacctcgcagataaagacctcaaacacaccagcacaaacatcaaaagctgtctctccaaaatgatttctcatcagtggatccgccctccattttgtgactaaatagaggacgactgggaggtgtccgttcgcgcaggcacacactatagatcaatgtcacaacgcatatttagcattcagtaaggtcggaatcaagagatggaacagacaactcactgagcggtgtccaacctcctttggatcgtttgtcaacccctttcgttctttcttgaccaccatctacagcttcagccgggttatacgtagcagcagacgaattggcacactgtattcacaacaaagaacatgttcacttgttcaggagaacttcttttgaaagcaggcagaagtgaagagaacgaaccaaaaactgaacgatatccaagtatcctctggaacaggcgtcatggagcgcagtaaatccttcagaatctcgagcgtgcggatcaactttcttctcttcaatgaggtaagcgatgatatctaagtggcccttcagagaagctttatgaagtgccgtctatcatcgcatgcgaagaatcgttgaaacaaaaagatactttctatatcagtcttgccagagaataacaaggaatatcagccaaacagacaatagtcagaaagacaaacctccccttctgcgtcctgtacatctacggccgcgccctcctcaatcagatattttaatatgtccagcttgccatgcgaggaggctagatggacaggcatgataagtgtatgaggtgtaagcggctcgtttgctagagtgttgttagaagtctgtgtgtcctcgtcagccatgacatcaaacaaagacaacggcattgaggacccattcgacgtcagaaatatcgttcaactggttgtctacctcagatccagatcaggggagacgagtaagcgtacagggaccgatgagaatattctctgaaccttgtagagctctcccgcggtaatagcgaatataagctcaggtttgacatccctgaccggctcttcattgtctttttgagaaattgacggagcacctaacagcgatgttcgaggagaaacgggtgactgagtgattctagatacggacacatctggaacgggatttgacgatgacgaaggtaaatacgagaaggtaggttgagtggagggctcagaaggatgctcgaacgagccattcggagaccctaaagagcttggttcgcccgtctgttcatctgccttcttcttttccttgatgatcttatcgtctccatcctgtttcttggtcttgtcattcactctgctatccccttgttttaaggttatgttggaagaattagcagatgtggatccaacatcctctccttcctctttgaccagtaggtcctgctcgtcctctggttttactatcttctctagccgtctagaatcaccttgaacggatccatccttcttgttttcaggggaagcaggcgatacagaaggaggaagggttgatagtcgatttaatccccaaatagcctcggctgagtctatctctgctggaggaaggtcactaccaagatttgtgagggatgctttgaatctatcgacagaagagaaccgccagaagaaacagaggtcagtgaccagatggttatctacaagatcatgcacaatatcaaaaacccacgctggaacaaagggttttgagtgtggattcagacccatctcagagctacgagcgatacagtcttggcgtgaatgttcaaatgagataaaaagtaagtgagcaagggtgtgaagtctattcgaaggtcaatatcaagcagttcttcctcacacgatctctccagacatcgatgataacattggttagtcacctttcgtgtcaggatttgcgttatcttttgtcgttaaagaatttactcatgttctcggtaggacgtgtatcatccgttcatagctctactatcatggatcgtctctactgttctgtttctctagagtacaaatgcagacaacccactcattgagccccaattttaactcaaacaaacggatgaatctctttaaaccccctttttctgattatgcgagctcgaggtatctctcgacctcccaactcgtcaccgcttgcttccatacgttgacctcatgctctctaaagataaaagatgtaagcaagagtcgtacaggtcttcgtcagatgatcagaaagtctttaaggatgagaagagaggagagaaggaaaaacggacctggtacccgcaaagtggtcgacaaactcgtccccgaaacattctcgagcgatacttccctctcgcttgaaggcctggacagccgcatctaaatcggtggccaatttaggaagtgtttgaggagtcaccccaggggcgcctactggtccgtaaggtagcgtcagcttttgctcaatcttgaattgtataaatagcgaggagaaagatgagtcagtcagagcgagaagaacgaaagagacgacaaagatacatactcctctgagacccaaagcaaatacggcgccaagagcgaagaagggattcatctatttgaatgatggaatagtgagatgttcagttacggaacgtagatataaaactgaggtggatcacttacgtcggctccaggaacccgaacctcgacttttcattataaagtgcaacaccacacataaactgttagtctggcaaggcgaaagagaagaaaggaagaggaaacctatctccctcttcattgtatgggtaaacaaaaaagaggagaaacgtacatctagttgcttcaggtgctacgccaggaggaccaatgattcgaatggaggccgctcgagagtcgtatctgatttgaccagaacacagcctagatcagcatttattctagaatagatgtactagctagacagaagcagtagaagcggacagcaacgatcgcaagacgtacccataggatgccatattgggggcccagaaggcttcgccagcgaccaaccgcttgtacgagttgatcgtaggacacaacattggcattatatctggcaaccctcgaacgacaccagccaggaactgttcacctaattcggacagatacttagtgtccttgaaggccgcatcagaccgcccttcgggacaggcgaacagattgacgccttctggagaacgaagggagacgtggatatggctgaggtcagaataaatgagagatataagaaacggaacaaaagttagccgatgaatctgaaaagggtgggtctgaaacatagggtgcgcacccagagcaaccggggagctgaacagacgaatgatgatatcagcaaggtgatccaaaaaccgtcgcactatgtagaccgaacaacaaactcacgtttccatatggcttggccatgaaacttgggataattcccttattcactccagccgttttagcaagcagcttgaagagaatagcgttatctgaaactctgagcgcgttggtgtatgccaacgcggtttcgaaaactccaggtccagtctcggtgtctgagagtgatagcgttatgataggcgcgttcaaagtgagtacgggtaacatgtatagaccgaattagcggtacgtacggtgggcctcgatttgaatgccaaacgcctctgccttgttgtgtagatcgtggaagtactcattattcaaaagcggccggagaacggagtaaccgtgacctgtcaagacgcaaattttgggcgtcagattgtggttctctagccaagtctaaataaaagttgatgcagcttaagatatacccacgtccaggcgtcaaagcagtcaaaccggtccactgcttcttttccaatgattccggggtctctttaaactgaaagtactcatattctactccggctaatccatccgctccgtcgactagttttcggaccttgtccattgttcggcctagaaggcccctaggacatgctgagaccggttctttggtgtctgggtcaaggaatgtaagcaaaaagaacggtagattatactcgaacggaaggcggcggctaaagaaacgaaagataggacaggattagaagaccgacacatatttaggatgaagataagggaggacaaactaggtcgagagatctattctggcaaggatatcccggtatccgttcttgataagaacaaatcggtaaaacgatattttagcatacaaagtagtggagatcaggacgatggatcactgcatcaaaggaattgctcggaaacataggaaaaggtagatgagtagtgaagtaaactcaccgccttgtttgagatgagaagctctctcgagtatgtctcatcatgaagatcccatccaaaaatgacactacactgttgacgacagagaagtgaaagtgaggggccgagatggtccgtcggttaaatctttgaaaagaactgctatccatcagagcattgaaacggacgtacaaagccaaaatcactcttgactgcactgaggaacttcgacttactcatatactttcctctgagaacaccatcgacttgagacgttgatgccaaacgacaaacgagtggccgatgggcgttgaagaagtagatagatagatgtcagttgtcgaattgaaggaccatgagaaactcgaccgccttcgtttgtgggacttaccgtccactccagcgaccttgaccttgatatcatccttgagtaactccttgagctcttccaggttggttggtgcattttcggtagccatgttgtctgtgtgagaggatttctgcttctgcttcttctccttttaagctttgtagatgaagaggtgagtgaagagtgatgatggttatggttatggtctgaaatgttatcttcttatcaccgcggccaatagccgatgacgctacttatcgcccgtctgctattctgaactttttcggctaacacagagatctatcatgaacatctctgtcgtcgccaacatcatcatcttcttcttcctcgttgtcatctatcatcatcaatcgctatgatgaccgctgtagaatctgcacactgaccaggttgacctaaagtcttctgaaaagtatatgaaccttttagactgatacgattcagctgaccaaaatactgaaagtcctgtatccagccgattacatccgatgctctcacatccgacgaacgagaccggaatgattcgttccggtcatggacgaacggtaggtataaaagcaagagatgaagaccgtttctcttctttcttctcttgcaccttgcaccttctttgcgcgttcaactctgatctctatcaagacccgcttacttgctcacgtacccatcacccatctatctacttacctatctacctatctattgatcatgtctggagctctttccgtcgtccctgtgagacttgattaagcttttccctggtttagagcgttaaatcagtactgatgcttctcgttcttgcctcgttctccatcaggctggtgtccttaccggagaccaaactcgaaaactattcgagcatgctcgaaccaacaaggtgcgagctttgtttccaggatgtcttagttctacaaggttttattcagttgtgtcccttcgatacctccaagacagtatgctatccccgccgttaacgtgacttcgacctcaattgtgagtacttgtactcatccacttatccagcgttctcatgatcgcaacactgatatctcgttttgaaattgagattaggtgaacgctgtgctggaagctgctcgagatgtcaactcgcccatcattctccagatgtctcaaggaggagccgcctagtgagttactgactcggattttttccactagtttttctttccttgtttacagtgcactgactctggctgtttatgacgtgtcggacgagggaatagtttcgccggtaaaggagttgataacaaagaccaaaaggcctcgattggcggggccatagctggtgctcactttatccggtccgttcagatccatactcggttatcatttaatgacccacatgaccggttgctaagacatttgcgttcacagagccgtcgcacctctgtatggagttcccgtagttcttcacaccgatcactgcgcgcacaaactgttgccttggtttgacggcatgctcgacgctgatgaggcttatcacaaggagcatggctatcctctcttttcctctcatatgttggacctttcggaagattccaaagaagacaacatcgctacgtgcgtcaagtacttttccaggatggctaagatgaaccgtaagtctcatgtcacctgatattcgatcaaatggaagtcgaatggtaacctgattacttgagtgcaataacagagtggctcgagatggaaatcggaatcaccggtggagaggaagacggcgttgataactcttcggtcgataacgcctctctttacactcagcctcccgatattgtgagatttctgttttgtcgtttatattatacactcaaagatcgttggcgtctgaccatttctttatactcgggtatcgtttactcgaatcagtatgatgtctttaccgctctcaatgctatctcacctaacttctctatcgctgctgcctttggaaacgttcatggtgtctacaaacccggaaacgtcgttctccgacccgagattcttggcaagcaccaagagtatgcggctgagcagctcaagaatggagacgataaacctctcttcctcgtcttccacggtggttggtttcttttcacttgtgtcataatatatgcctgtgcatgtaatggttctcaaattacaactttggtctttcggttccaggttccggttcctccaaagaggagatcaaagaagctgtgagcaacggggtcgtcaagatgaacgtcgataccgacactcaggttcgttttatcctgatactatccttcgactttgctcattcaactaattattatggacgactatgggttgatgtgtttatccgtcagtttgcctatttggagggaatcagagatttcatcctcaccaaggctaattatctcaagactcaagtcggaaagtgagttttagcccggcatttgacctgtcggattaaactgatcttgattcccatatctttcctcgtcaagtccggatggacctgataagcccaacaagaagatgtacgatcctcgaaattgggtccgaatgggagaggtcactcttgccaaacgggtcaaggtcgcttgcgaagatctcgggaacgtccacaggaactaggaaaaaggcaggatgtctattctagcgtagctcgcgctctgtctttcctcttgcttccactctgtgtcatatactttgtgctttatgctttgtgctatgttgcaatatgttgtactatgtggttctgatagtgcttgggtggttgcaactgtaccttgactcagattggtatgttgtaaagtgtttgatttctaacagttgagcgtctgggttgatttgttgcaaccggacaaacaatgcccttctcaagaagttaactatcaacagaattcgtcagaagaatgctagccacagcttcctttggtgtcaagcttttccatggattgttactttaccccgtacaaacgtctaggtgcatcacatccttgtccctttcggacacacacgtaagggtttccctcgtcgtcagacggattgcttgacagatagcatttcctgtcttccctattggtgatgaagcatgtacaaagacagtcagttgataaggaaacaaagaggacgactctttgtcttcaatcctatctagtttcatagagtgataaagtatggcacgaactgatatgggcacgggcactcggagggagtcggcacgcaggccagagatgacggacaaacaaacccaccacagggagctgaacaattaataagctgatagtgagtaaaaaaaagccgtatgtgtgttccaacttgagtacaagttgagcaggtaagacatactgtctttcatagcttgccaacctcgttgtccagcttgaggttgctgctgttgctgttgctgttgttgctgttgttggaacatgtgaccaaagggattaaactgcgctgtggcgacacttgcaaggatccacaagagagagagaacgaggaggcttggtgaacggctgagcatggtgtgctgttgctgctgatgatgatgatgatacgaatgtgcttcatagaagagatcgaaagaaggcatctacctgggtgacaaatctggtgccagtctgacatcaggctcatcacctgactggcactccgccactctttcatcgttttcttctctccacctccatcatcttcatctctatctcactcttccttccttctatcattctaacttgcaaagtatcgatatcttctggcggttcctttgcttctactgtccctatttatcacagctgaaagcatattcctccagagagcaatgagttctagcatgcaggtcgacgaagctaccatcgagtatgtctatctttttttccgtcctttcttcctcgtttgtctcggataggcatcatcatcggcggattcctgaccttaatcaatcttgattgaatctttagtgagggactttactctagacagctgtaagcttattctcttgctctattcatcttcacctcaggtgtctttcgagaagtcataccaacatatatatttcattggccggatacgtgtcaccctgtcagttacgtccttggacatgaaggtatggaaacctttctggacatcatatgcgacaaatctgatacgctttgaattaaccatggttttcctggtctgtactggttcatctcagctatgaagcgaatggcgctctcaaacgtcttgatcatcggcgttcagggtcttggcattgagattggtacgtagacctttcttcaatcgtcttattcagctgagaactgttccgatagctgacaatctccctgctctcttatccgaatcccaaaccatacgatagccaagaatactgtcctggccggagtcaaatctgttaccctttacgatcctacaccgaccaccattgctgacctcggaactcagtactaccttcgagcttcggatgttggcaagcctcgaggcgctgtctctgcccctcgattggcggagcttaactcctacgtgcctgtccacgacttgggaggaaaggagagagagacccttagcgaggagactttggccaaatatcaggtcatcgtgcttacttctcagggagctcaagaggaagctatcagaatcaacaagtttactcatgataacaagattgcgttcatctggacgacgaccaacggtctctttgggtacgtcatcttattttgtctgtttagtacatagatattcaggcagccagctgatcggattcaacaatgtctaccacaggtctgtcttcaacgatttcggacctgccttcacatgtgtagaccctaccggggagcaacctttgaccggtatgattgtcgaggttgaaaacgtatgtccaaccgtttcttttcctctcccccgggacgtgccgctagaatcttcctgaatgttatctatctacacttgtcaaactcgatcagggtgacgatgccatggtcacctgcttggatgagacccgacatggtttggaagatggcgattacgtcaccttcaccgaggtggttggtatggaagagctcaacggatgtgagccaaggaaggtttccgtcaaaggtacgatattgtgtcattttgtatgtacaaccgaatcgtactgatatacttggacacacctcaatatgtctccacacaggtccctacacgttcaccatcggagacaccaacggtcttggcgcctaccagagagggggaatctttactcaggttaagcagcccaaggttatccaatttgtgagtgccctctagtcgttggaagcagttttcaaatgagttctatcacgcatgtctaatcactcgtctttctgtatagaaatccctttctgagtccctggcatcccccgagttcttcttgaccgattttgccaagtttgatcgacctcagaccttgcatgtcggtttccaagcgctctcccagttccacacaaagcatagtcaattacctgcccctcgaaacgcctctgatgcggcagagctcatcactctcgccaacgccatccatgcgtcttcttcggcctcagaggagaagctggatgaaaaggtgcttactttgctcgcttaccaggctcagggagatcttgctccgatgaacgccgtactcggaggattcgttgcccaggaagttctcaaggcatgtacggcaaagttccacccgatggtgcagcacatgtactttgactctgtcgagtcgcttccgagagaagaaccgactgaggccgattgccagccgaagggaactcggtatgatggccagattgcagtgtttggagagtccttccagcaaaagatttcttcgcacagacaattcctcgtcggttcgggcgcgattggttgcgagatgctcaagaactgggcaatgatgggtctggcgtccgggccggagggaaagatccacgtgaccgatctagatacaatcgaaaagagcaatctgaacagacagttcttgttccgaccgaaggatctcggcaagttcaaggctgaggcagcgggtggagcagtagtcgagatgaatcctgatcttgtcggcaaggtggaaactcaccaggaccgagttggtgctgacactgagagtaggtctttcttcttcttccgtctttgagcaatcctttagttgagtgtgttggctgacgtggttttctggtttttcctctctagacatatatggggatgagttcttcgccaagatcgatggtgtcaccaacgcgctggacaatgttatcgcccgtaagtgtcggtcgtttgggcctctgtgttcctatcttggttcggtaagactgattctcttctgctattgttttgccttctgtccgatgaaaggacaatacatggatcgacgatgcgtgttctatgagaagccgctgttggagtctggaacgttgggaacgaaggcaaacacgcaggtggtgatccctcacctgactgagtcttactcctctagtcaggatcctccggagaagagcatcccgatgtgcacgctgaaaagtttcccgaacgcgatcgagcacactattgagtgggcccgggaacggttcaacgcgttgtttgtcgacccggcgactaacgtgaacctgtacttgtcccagccaaactttgtggagacgacgttgaagaactctgggcagcacaatgagcagctgaaccagatccaggagtatctggtcaaggacaagccgctgtcgtttgaggagtgcgtgagatgggcccggctaaagtttgagaacgattacggatcagagatcaaacagttgctctacagtatgcccaaggacgcagtgacttcgacaggtgcgttgttctggtctggcccaaagcgagcgcccgatgcgctcgtgtttgacgctgagaactcggaacacttggcatacgtgatcgccgctgcgaacctgcacgcgttcaattatgggttcaagggcgagacaaaccctacggtgttcaagaaagtgttggccacgatcgaggttccagagtttgtgccaaagcaaggactcaaggttcaggtgacggacgcggagccggtggagaatgaggcggatgaggctgcagatgcgacgacgatcgctgcttcgctcccgccgccttcgtctctcgccggttataggctgtccccggtcgagtttgagaaggatgacgacacgaatttccacatcgactttatcaccgctgcgtccaacctccgagcggccaactatggaatcaccccggccgacaggcacaagactaagcagatcgccgggaagatcatccctgccatcgcgacaacgactgctttggccaccggtttggtctgtctcgagctttacaaggtaggatttgcattcgcgtctcgtatttcaagatatattttgctgacaaatgattttgttcgaaacggaacagatcattgataagaaagacaagttggaggactaccagaacggtttcgtcaacctggccttgccattctttggattctccgacccaatcgctgctagcaagaacaaggtaggctttttctctttttcctgtattcaaggttgagtgtgaaattatcttctctttcctaaccagatgttggtatatgatttctcatgtctataaagtacggtaccactgaatggacattatgggaccgattcgagtttttcaacaacccaacaatgcaggaggttgtcgactggttcaagaccgagcacaagcttgaggtcactatggtctcccaaggggtgtctatgttgtggtcggcgtttacgcctccaaagaagagccaagaacggttggccatgaagatgtctgacttggtagagagtgtgagcaagaagccgattgcgccttggacaaagaatctattggttgaggtcatgcttagcgatgaggatgatgaggacgttgaggtaaggagaggatgtgtttacatctcttcatgtttctctttcttctttgatcaattgtgaaccatcacagaaaggacgaggctgatgtccttttctctctttcgcacaggttccttttgtggtcatacatatctagacggccgaactttttgtctttgttttagccctctcgcccgtttccaatttcgaaaagcttgtatgaatgattgcttcttttctctatagacaccaggctttcggaataagaaggattctgagccgacccgcagtcgattgttggtcgggaacgactggggtggcgactgcgcccggagtcggctccctccttttctctttctcttttttataacacttttctctctactcctcgtctgaacgcgtcgctcatctgctccttcgcttctgctcatggtgcttgctgtgttttgaacagactcgcccgatgatactgatgctttgttgatcacgcctcgtgctgacgctcttttcactgacgaatggactattttctaaatttgtttcctgaattcttccctctttgactgcgggttttttttctctgtttctgctctttcttattcttcgagcaattcatgatggttattgctcaccctctctttcttgttcttacgagatctctttcaaaaggaaaggaagactgtgggaaaagaaaaagaagtactcggatgggactgtccaattcagacctctcctcttcctcccttcttcaacctgaacactcactcactcactcacctctcgaatgatggacagaggaatccatatggacggctcttggtctgcaggctcacagcccatgtacaacaacaccagtgacaacattacctcaatcactaacgatactaccagtgtccccacagccaatactagtgtcaacatcaacaccaatgccaacatcaacactaatgctgatgccaacaatgcttctaacgacatcgagcccccttcgttatcgacatcttcctcgagacagatggacgatccaacggaccgatataacgtaccttttctggccctggcacctcggacgtcccgtcggtcgttgaacaactcatcggaaaccgtctacgccatcgccgcctacctgaatggacaggcagacgtcgtgtttgactccaacctggtcgctagccattaccggacggcggtcgagaactcgtttggagggagccaacagtcggttggatctggcaattccggtctaccgccaggtgttccaaacactcaatcgatcctcccgttggcccaatcaatagagtacatcattcgtcatcccccaccgccatcggctcatgcctcctcgtcctccagcggcccttcttacccacaatcccagttgtcggtcgagatgagcagaacaaacactctgccgatgaactattcccatcaaatcaacgatcaacagctttctgccaggtccagagctgatgtcgagcatggtcgattcgatcacaataatcgacagacgggttcgtatcctacatactacgaaccgaccataggatcctattctacaatcgctaccgaccccctccttcagcctcaatctcatccgcagcctcccatcgccatcggtcaacccacctggccgttcccttcgtccggtctacctgctcatcaacaacagagacacgcgctctaccagtcttccggccaatcgcgttctcagccggattatccaaacgtattctcccaaacgttcccgttccagcccaactacactgttggatcctccgggcaaggtcttgaccccctgtcgactgaaaactccaacgccagcggccaatacggccaccaccatcactcagggttcgatccgagctcgaccaacaatgcgggcctttctaatgggcttttgcggaaaaaagggatgttatccgggccagcacttgcagctcgctcccgattggtttccgattctcttggcagggtctcctcgtcgtcggatgcagtaacaggcaaggtggtggacagaagacggagtgagggatggaccgatccgggaggatcaccggtgatgcctctggtctcgattggagaaagctctaatatgtacgtccagaagtctcgttctgttgtttctttgtagactaaggagaacagagagattttttatcttctttatatcgccttgcaagacgaaatactcaactcatgacatcccccttattcttcttctcttccctcgcctggttcaagctcgactccacaaagttcacctcaacaaggtcgccggaagagtcgaaagtctagtacgagtttaccggtcccatcaacggggacctatgtcggtcgagtggaagaaatgattccctggaacatcgaggtcaccgctagggatcctagaaagacccatgtctgcccggtctgcagaagaggctttgccaggaggtttaacctcaaagttcgtaaccctcctcctctttttttcctctctttcttctctgctcctttgtgcctataaccaggaagaaagactcaccttcgtgagacacacggcgcgaacggaaccaaacaggcacatatgtcgacacacgacccaatgagaccaaaaccgttcaaatgtcaatcttgtgataaaaggttttcaagaggacacgatcttgatcgacatcaacagagcattcatggttggttccctttctttcatattttcgttatcttccagttccatgcctctctttggcttttgaaagaaaaaatttgtctatcagcgtttttttcccgaccttgggacgagagaaatgaaagcgataaacagaaacaagctgacttgaactgaacttgatatctcgacctattagcagataccatcaaagtagaaccttccgaacacgtcaatctccaatcatctacctctgcatcaacatcgacatcaaccgtcggccaatcttcccaacctcaacctcaatctcaatcgtcttctccatcctctctgtcttcttctgaacggtctcaaggtcaaacccgaccagaagcacaagaccatggacaaggaaagagactcaagacttgatacggctggtccgtcaggaacagaagcaggaatggaaacaacctaaaccgtaaacaacctaaaacgaaacgatgtggccttactcttccttcttcttcttcttcttcagatgtttatctagttttgcccttccgtcctctttcattcgacttttcatctctttccttggtttttgttttttgtttttctttcctttttccttttccctttctttctttgcctctatgaaaaggaaacattgttgttatctgtttgtgagcttatttatggacgatcagaagttgatataaaaatagatgtcttttctttattaatttttctccttatactcagctcaagagaagaaaaatgtattctttttttttaaatctctaaaataaagaaaatgtggagttaagagaaacggcagacagtgaaatcgttgtgatggagcaatcagagtgagacagaaacatggataaaagaagggaataaaagtgagagagatgatgaaccgagcggacttccatcagtctatctaagtgtagaatttccggttctgtcattcagaacaaatacatgatccaatcaagtcaagaaaaataaagtcagacatcctagacttgatatcagggagagaaggagaaggaaaaagagagtgggagagatctgacctcgttcaagccaaagagatctgccctaatctcaggaagcatctttttttttgagggaggagagatttattcggtgagcgcaagacaacagagaagaaataacgtcagtaagtgtttcttgattccaagtggattgagaagagataatgaagtagaggagtctcaaagcaagaaatttcggaaccatcttggtctcctctccgtagaaagagattataaaaaattaaaaaaaagcaccttgtcttccaacaaagccaatcgctcatccaccgtgttattgaccatgattcggtttcccgctccgttcaacttgacacctccagcactctcggtcggaagttcctcatcctcatctacgttaacctcggttgttcggccagagatctcggtgtattgctttgaagctgcctcggctgccttcttggccatctctcgatcttttgctcggaccaccaaagtgcacgagggggagagcaccaggagcaatccctatgtgtttgcgagtgagaaagaaagatatcgtaaagcccaaaccgggaatgaaatggaaagaaagcgataaagccagacgtcagaatagaaccaatatgaaggatagaatgttaaagcagatgaacaaagaggcgaacctgcagaatcaagttctccatcaactgggcgtacttgccctcatcgtttgccaggtcggtgatctttcctcgggcgtcttcaaaaagatccgaaaggaactgctctcgagctcttaagattttgagtcgggacgtgttcaaagcagtggattgggcactttttttcagtttcccatcagaaaatagacggcttgtcagttaaacgtgaaggctggagatcggtatatcgacaagaggctgtgactgggagcaaagatggaacatacatcttctgtccgacctcggcttgctttcgcttcttctcgtacagagcgtcgatggcaagagactcctgtcgaacgatctttgcctataaccaacccgtccgtcgataaggtttttttggggggagggtgatttttgttccaatgtgatataagaattatcatcagttcctgattgatcatgaccatctacaataattccattttccattgacggtcctatccgagcgaagatgaaacaggacaggtgtctgaaatcaaaggaggagaaagcatataaagacataccttctcaatagcaaactcttcgtcggccttgacttgaagctctctggccttctccttggcttcttgagaaatgaacgagacctattacacgttccatcaccaccggccgaaacaaaacgtcacacccaagccgacccagacggaagccaacccgggagggaggagccaaaagaagcgtcaaatacagatcgttggtcagacacatgtatacacggacaccatttgattgtaagagatatggatagataacagaggctgaaacgatagctctctgtgagattgaaggaaagaaggaagagagaaagagaaatcgggaacgcttaccatcttgttcatctcgctgaggacctcctggtcattcaaaggtcgtggggcagacatggccgatcgtgtgtgtatgtatacttctgcgtaggtgtatgctctgtatcagagacaagaacgaaaagcaaaggagagcttgtaggtgaaggatgaacgatactctttcggctgagaaacatcgatggagaggagatgagagattgcatctggaaggatgtggttacggttttctggttatggttgatagtgtaaccactccctctcgtttgccttgtactgatagtgactacgtttggttctctgtgtgctcatcctatgaatgctttgtctatgtctcattactgtattcgaacatctcttgctccggctgcttttcacacactgggttcaaagaaagagtcggccaaaatagcaggttcgatcaacgaagagcgcaatgagggagcatgaaggcgtgtatacggattctctctcgaacgtgtcaggttgcgctcagcaaatgctacaatcactgccagaggtgtgtattgttaacatgcatgtcctttgtgtttgagcctgttccatactcggtgcttgcactttgttcaatcagggtgatagttctttcgggagtcaagatgcgtagattgaggctggcaggagttgaatggctgtatatcgaccttcaagaggcttacggcaacatgatgatctaggcggtagcagcagacggacgagcctgtcagttgtatctgttagcagatgatggtgacactgaaacaggtgatgtgactgtcctgttcgcctcaaagtaggtcatgaaagatggtagaaaactgaacgattgatccaaaaaaagccatattagacatgaagccattcgaccgcttaagcagaggcggcagcagccttcttggccttgtgggcaactcggatggccttgttggcagcggccttctcggcaactcgcttggcaacaatggtgttgtactcggcaacctgctccttctggacctcggtctttcgcttcttgatcgacctgaggtgtcttcgtcgctggagtcggaggggggtgacgagtcgctggatggaaggactgcagggcagaacggcagagaaaatagaacacagaaagattaagcgtcagaaaatagaaagcaaggtaacgagagatcaagaaaggctcaagcactcacgccttggtgtagggcttagctccctccttcttggagacgacctctcgtcggacaacgaacttcctgacgtcgtcctccttggtaaggttgaagaatcgtcggatcttggtggctcgcttgggaccgagtcgcttggggaggacctcggtggtaagaccctcgatgtcctgctctccctgcttgacgatgaccaaagagaggacggcaatgtcgtttccgacgatgcatcctcgaacagactttctcttcctctctccggttcgtcgggtcctgtagcaggagtgaccgtcggcgaggaggagtcggactcggtggggaaggaggactccctgcttcatagggaaaccctgcttgtcgtttccaccagtgatcctcaagacgtatcccttccactcatcaccaatgctattccatcatgacacccagggaaagagaaagaaaaaacaaggaaggacagggatttggagggagaaggacaacaagggcgggagatttggatgttttggtttgttggtttttgagaatgttgtcgaagaagaggattacagttgttggagcaagatgtcgttggcgatagaaaacacggatgagttttagagcaggcgggaaagattatgggcgtatatccaacggtttttttaatgaaggagacagttggcgaatcgatcacggagggagagagtagaagcacaaagggcaaagattaagcgtttctcaacttttcgtcggaaactcgagacagagacgtacgaatcggctgagacctcctgggacatcctcttgtcgtagaagactcggactcgtcgctcgtcatctgagtgggtaggaagaaagatttgtacagagtcaatctttctgtgtgactctttgaatatcccccttctccttcaaagatctacaacactccgtccgaccggctggatttttctcatcttttctcttgtgtaaacgctttcaaaaactaaccaatgtcgaggagcttctgggccccggtggcggggttggcgactgtagacagaacggaaagagagtactgttgagcgggtgggaaacctaagagtgtcctaatccggagaggtctgttgctgcttactgttaagcttcatggtcgaatcaaaagatagcctggaggtcaaacgtcaaaagaaacaagctggacgtaagtctgtgtattcttttgtaggtcattttcccctgcttccactgcttcggccgtcttttttttttctcaatttctcaattcttctcctcttgctctctgggacgtatatccctgtctgtatgtgcaccatacatcccatcacttttcagcaaaacgaactcactttcttcaactgatcttgaagttgctaacggcttgggcggctggacaagaaaaaagcgatcttccacccgagcttcagacgcgaccttctggccgagaggcccgtgcggcaaaagtcagatggcgcgggatgacttccgaaaatgaatgattgatgattatcttgtttacataagtacatgttcggccggctctaactctaaccctaggcagtaaccaatttaccgcacttggaacgccgatgtaatgatacaggcttcgcaaccaaggcagaccggaacgttaaaggttctctgaatagaaggtttctccaagctgaaccctctgttgagatctcctatccaaaaaggcgagagagcctccccgttttatatcgggacctctcgcgcatttgatctgcgactggatagatacatatgataaaatcatagagcctcacgatcacgagaaccaaagagagtgaagcatgaaccatgcgaaacagagcatgatgtcaacggaaggataagcattcgaggttgaaggaaagaacagctagcggtggtaatacaggatcccgaacacgtggtgttgaacccacatccctgacaatgagttgtttttttgtctttttgacgatctcacaagcgaaaaaccacagagtcgtactgtcgttgtacagtacctttacgatgtgacataaaccccatacattcaagagtacctgacggccggctcatccttaatacactcacgaaactcccagccggatatcttagtgtagcaatggccttgaatgcaactgagaggctcatcacttttcaacatggacaactcacagggagcaaacgggaagacccagagaatccctctgagctcgaagcaacggactcggcatgctgaccatcgagctggcagtttgagttttgatcctctacttcacatagacggatttcgcgtacagagttcgtattttggatattccaggcatcgtgcatgtgccttggcttcacccatcatccacggttttttgtctataacggatccggacgatacgcttccgctttgctctttgctatcgagcaatcctttgccagtgctgacggtggatggagcgactaagattagagtagactgttgttacaggctaggtgactaacgaccagttgaaatgaagtgcttggctgaagacaagagaggttgacccgttgtgccggactagaccaggatgtcgatccacttcaccggatatattcatcagatgtggtcctacctcatcgacttggtcacaacctcgcctcgatattctaacagacgattcaagtctttcggcgccttctggatgacagcctgttctcgcttcaacccaacttacatcggactcccgatttgagcttctgcttcccctgacccaaaacgctcggctggatgtctcgttatccctgaaacatatcatgactgactcgattcttgctgatcccagtctg

SEQ ID NO: 2609 - DNA, 1545 bp, Xanthophyllomyces dendrorhous
  misc_feature (444)..(453): n is a, c, g, or t
catcatcctcgtggccctcaggtgagttgtcgttcacacttgagaacacgtttgatagcttcttgtatgacgctaccgtacggttgaaacagaccatatatttggacgttcccgatgctgctaagcgcccatgcgacatctgttgccgtacaacgggtacatgcgcgctgacagggactagccgcgccttgagtccgggttgatccttatcttggatgccgaaggaccaccaggaaatgtcatgctgggaaaagaaagtcaggatcttgtcgatctcgtcctcccgacgagtcattcgatcagggctgatagtgatgactgtgatcggtgtgctgttggtacgtctttggatgagagtgtgtcgcaggtggctacgatcatcccatgaatgcgcatgggatgatacatactcaacgaccatgaaagtcgattactggctgccgnnnnnnnnnnctgctaagcgcccatgcgacatctgttgccgtacaacgggtacatgcgcgctgacagggactagccgcgccttgagtccgggttgatccttatcttggatgccgaaggaccaccaggaaatgtcatgctgggaaaagaaagtcaggatcttgtcgatctcgtcctcccgacgagtcattcgatcagggctgatagtgatgactgtgatcggtgtgctgttggtacgtctttggatgagagtgtgtcgcaggtggctacgatcatcccatgaatgcgcatgggatgatacatactcaacgaccatgaaagtcgattactggctgccgatctcgacgctctgtacaagagtcgaaaactgtctatcgacactgctcgatccagttgatacctcaagtgtactagacctcatagagaaacacacgtcactcggagggacttgtgctttgtttcgagtgtgggacattatatacgatgcgatcatgtgcgcttgcagatgtgatgaagaagatgaagacaaaggaaaggtaacattgtatcaaggatgaacttatatgggaaagctctcgagcgcacagatgagccaggagcagaagatgggcatcgacaggaacgagcgttgacaggaaagaaacaggaacagcggccgactggtgttcagccgtcaaagggaggttcgcaggcacagccggttgagttcagggcaaaactcgagcaggtacacaagcgatcgacatcttgtcctgatgacgttctctcaagcatatttagccaccacgagagaggaagtctctgagctcacagacagagcgaggaagctgacggtgcctcgctgttcctatatctctttgcctctttgcctctttggtgcttgctctcagacttgatagaacagagatgtcaatgcgtcgcgcaacatgctgcacctagcccttcaccaggagaagaacgaaggggcgagaatgctagggttcgacgctgtcactagtgaggctggggatgaggctagcagaaactaaacccatgacccacggaaaccttggtggttcgtggtctgagggcacccaagtccaaaaggatcatgtatcgatcacc

SEQ ID NO: 2610 - DNA, 9729 bp, Xanthophyllomyces dendrorhous
aagtcgattactggctgccgatctcgacgctctgtacaagagtcgaaaactgtctatcgacactgctcgatccagttgatacctcaagtgtactagacctcatagagaaacacacgtcactcggagggacttgtgctttgtttcgagtgtgggacattatatacgatgcgatcatgtgcgcttgcagatgtgatgaagaagatgaagacaaaggaaaggtaacattgtatcaaggatgaacttatatgggaaagctctcgagcgcacagatgagccaggagcagaagatgggcatcgacaggaacgagcgttgacaggaaagaaacaggaacagcggccgactggtgttcagccgtcaaagggaggttcgcaggcacagccggttgagttcagggcaaaactcgagcaggtacacaagcgatcgacatcttgtcctgatgacgttctctcaagcatatttagccaccacgagagaggaagtctctgagctcacagacagagcgaggaagctgacggtgcctcgctgttcctatatctctttgcctctttgcctctttggtgcttgctctcagacttgatagaacagagatgtcaatgcgtcgcgcaacatgctgcacctagcccttcaccaggagaagaacgaaggggcgagaatgctagggttcgacgctgtcactagtgaggctggggatgaggctagcagaaactaaacccatgacccacggaaaccttggtggttcgtggtctgagggcacccaagtccaaaaggatcatgtatcgatcaccatcggttgagatcactctcaccatgcctaaggcatatgttttttttgggcatatctgttgctttgattgatgattcaacttcgcgcgcttttcgcgtcgagatcacgcgtcaagaatacgtgtcgacctgactttttatgtaaacgcaaaggtcagcgaatatgaacgtaacaaatcatagtcaagtcgtaaccactgccctgagagttgagctcggacctcgcggcgttaattcagaaagatcgattttttcttctttttccgagtcggccagtttacctcaagtccctcaagaagagtacgtgtgtttgtgtttggagagaacaaacaggtttagctagcgttgcatgcgatccatcccatccgcctcttcttctttcccggtacccggtcatatgtgtggtggtgaaggcaccctccccggcgtaatcctttctttcgaaacgcaccacgacacttctcgacaaattttgggttggcgagggctgtgggaatttgtgtgattcgtgaaccgttcagctgcctcgcctgattcttgaaacgttgtccgttcgatgttgaggaaatggaagcagcttgttcggagacgccaaatacctgcaacaacggaaaatgtcgacgagtgtcgagaagaaaatggaggatggactagtaagagacttggcagacgacggcattagcaggaaaatcgaccatacacgaccctaggaccagttgaagagagaccccaacgacacggtctcccctgaaaaggaatgatctctttaaaagaagaatcgccaaggtttcgaggacgaaacctgcctcacgatctatcaccaaacttccatccctcttcgcacgcaacgctagctggacctgtggtctgtcatcatcactggccttctttttatagcaaactgacctgtccttatccaccctgatcagaactcgccatgcctacccgattctccaacacccgaaagcacagaggacacgtctctgcgttcgtagcctatcttcttttcttttttccctcctttccttctcgactagccaatttcttccctcaacagttcagaaactcaacctatctactcctatctttcttttccttgaccaccaaacagcggtcacggtcgtgtgggaaagcacagaaagcacccaggaggacgaggtcttgctggaggacagcaccaccaccgaaccaacttcgataagtaccaccctggatacttcggaaaggtcggaatgaggcacttccaccttacccgaaactcttcctggtgccctaccgtcaacattgacaagcgtatgttcttttcttttttcgcatcgtcttgtccttacaccctttgctcatgtttcctattcttgactgtacttgctatccagtctggactctcgtccccgctgaggagaagaaggacttccccaaccaggctgccgacctcgtccccgttgttgacactttggctctcggttacggcaaggttcttggcaagggtcgacttccccagatccctttaatcgtcaaggcccgattcgtttccgctcttgccgagaagaaggtcagaccatctgctttatttgaatttttgtgttcgtttgtcacctcgacaaggactgacgatgcatctcgttctatttatccttctatctacagatcaaggaggctggtggagtcgtctcccttgtcgcctaagggtttttagcttctttcgatgaatgagtcttttcgacgtggatctaaaccgtcccttaaaagaaaacagagaccacgttgtcaaaggatccagaaaagaggtcttgcaagggcctgtttggtgcgaataatgaagagagtgtatgtacactatgactcagtgaccctagggacaacagattaagaaaagaaattgcagacacatgtctttcgacgtcaatgatcatcaacaccatcagtgatggtagcaccaaaaatgagagatgttggttgaaacatcagtcgaccttctgtttgaaccattgagactagcagcctgatgacataggagccatactcattctcgagtatcccattgtttctgatggatgaaagacattgattgaacgagccaaaatgggcaagagatttctttgtatcacaaccatcacccatcagccagcatggcgaaactcgagcctgtgtcttccgttcaggatcaagcagaagcagcaaagcaaaaggttgacctcaatctgatcttttgacgtgtctgctgagcaacatgctgatcgtttctcgttcgacttgttactttcttaaagggaaacgatcactttagtatgttcccttcctaccaaccctgagtgacgttgtaaccagaagcacaagtcagcaagtagctcatgaacgattggtttccatccggcttggtcgatcttcagaaaagaaagagtatgcagagtcgataggtgagtgtgtatgtgtgggtggtgattggtcttggtagttcatcgagcatcatgttaatatctctgcttcctctgggtcaggttgttattcgcacgcacacatcctccttccttcgtcagctatctatccgttgaaccgagctcaggcatacatcaatctatccaagtgagttctctcgccagcttgtttatattcacctgcttgttctgtccattccacgctttcgctcagtgctaaagggatctttcgtccctcaggttctctgatgccgagcgcgactgttcgacctcgatctcgctagatccaaagaatccgaaagcatggtttagacgagggatcgcccggcgctcgttagcagactgggcaggatccagagcagactttacccaggtgctcatcctcgacagatccatggaggccggcgtcaagactgagcttgagaaggtcgaagtcgcggagaaagcagagaaggagaaagcaaagggcaaacaggtttgcgcatttcttctctctctgcgaacactctttctgatgtgttcttttgggcccctcggtttgatcactgacatgcctctggctgatggaccaagaacaagaagatctcagttgtctcccaaccaaaggcctcgcccgagtcgaccacgataaaaccgattgctattccgatcaagatgacctatccgacatcggactcgtctgccactgatgtgtcgtccatccctctgatctcgcccagaaatctaaggccgaattcttcaccagtgtcctcggcctcggcctcgtcttcaccttcaccttcacctcctcctgtctctttgaaatctcattcctcgacagatgatggtaccccggccttgtctggatcgaatcctccaaaagatccgacgtccgctatatttccttcttttcccactagatctaaaccgaagccggaatctgaacttgtaccgggtccgattggtaaatctggtttctcggcgctcaaggcggcgagatcatctaaaggcatcatcgccaaagtcgccggtccgactggaagggacggtctgtctctcgaaggggaagactctgaggacgacgacgacgacaaggaagaaaaagaagaggaccttccgagaccggagagtgtgcattcgttggtgagggcgttaaagagtctgaacgagagaagatcatggctggtgctcaaggtgtgtccttctccttttttttcatctcagtcaggctgttttcatcgttgttttacatctatttcaagtggtctttgctaaaatcttccttccctcgtattcgttgttgtgttcaatctattcgataataatactaaacgaaacaacagaacatgcctgtttcgcgccttccgacgctcgttggatcctcacttgaaccgccgttactcgaccacctgttcgttttgcttgaaagtaaaaaccccaaagagaagacgacaaagaaagcgctggcggaacagttgggaagcttgaagcggttcggactgaatttgtgcatgttggaaagggggtccgagcggtggaaaataattcaagagacgtatggcgcttgaactccaaaaagatgggatcggaaggtaaaagtgataattaagaggtcaaaaaaccaaggagattaaggattgatgatgatccggatggtctcaaagaactggctcgactcgttccgctttcttatatgtcatttccttatataggtacaaagcatacaccccgaagtttcacacaaatacacatcttcactctctcttactgagagcagcgtttctaatttgaaaaagattgaaaaagattaaagaaaacctaactgttaagagtgctgctcttattttattttattttgttttattctctttctctccccctaagctgagccatctcccaagagctcttcctctccctcccatgcttcgtctgggacgtgaccttgaacctcggtcaatcctccccaatagagatagaggaaggtcgcgtttcgggtcggaggaggcgccgcttggtagcctacgggcgtggcacatcggggacacagatggatatgttgaggttcgagcaagtcgttctctctaaaaggatgtgaacgatgtgagaaaaacacgcgagtttagctcgacatgaacgatacccctcgattgaagaaggagacacagagtgagaggaaagcctttaccgtttgacgaattgtttacctccgtctaccgagttgagtttgaacactcgaggggcgaccggaggagctggctctcctgtggaagacacggttggtctagaagaggccttgcatcggacgacgatcgtattatccgtcctaagaagagggaaagaaggaaggaggatctgggttagaaaggtgtaggcagaaatgacggaacgagacggaacgaacggtctacgcggaagatgcctaacatctgtgtcaataacgagctgttatagaagttcaccagaatagaaagtgagggaagatgttgtatcatcgacgcttgtcaggatgtaggctcttgggctatcttaatctcaaaaaaacaaacaaacaaacaaacaaaaaaagtcggaagagcagaaggacataccaggaactctccacacagacagaaataggttttgaggatggcctgttgggtggcagttatcggagcatccgaggaggacgagatagctgctcgggagatgaccttgggcatggctgtacagataggcttggtggaccagaaagagtggtagtgatgatgatgatgatgataatgatgatgttcgttgttggatatgctttgaatccaaggacgaaggaaacactagacgctgaacggactgttagggttaacgcgcgtttttctttctttcccacttgtcttcttcttccccttgcggacgttcaggccgcactgatactcgctaaccagccccgagctatctgtttgtctgactgatactgagttggattcggctgaacaagatccttctgatgctgacttgcttgatttttagtttcatttattttgatagaaggaaagagagatcatggaagagaacagaaggacgcgaaacataacgatctgcttcggctctgtaggcatcaacaggctggtaggatgtgtgtgcgcttcaagctgatgatgaacatgcccaagagaaaggttgatcagggagaaacgcgtgtattcatcaaagacaccagatgatagagtagaactcgcctaggactcgaccgtacactccctgtcctatgcagcgtctgaccttctgtgtctcccggacgcgtccgagtcgagccaagagatcggaaagcgcgacgacatcgacgacatcgacatcgacatccagaccaacatccagaccaacatcgcggtcgacaccaacgcgttgcgtctgttcccagacgtccggctggttttgtcctcttctggaaacaggctgatattctctgtggatcaataacaagggcgcccgacagcagctctctctttctttgtgcattgtaccgacgagttctagaccgtgtaccttggacctgtgcacctcgtttcctgcatcctcagctgcgtccctgatcgtacagttgcactcctgtaatcgccgaggtgcgctcggcataaacattctaggctctgggcggacggatggcatgagagatggccctgggcgatcgacttgcatgatctcgagagttttccgcgatcctttcaaccttcctgttagtcctcccgctgcttggccctcgccctcgccctcgccctcgccctggccctggaacccggcactcgtactcactctcggcatcctcggcaccctccccgggagccaaacctccggccggatggtctaccggacaaaaaaacgctcagaccccgtaaattaatgccatcctttcttttgtttctccttctctcctcctccatttttcaagggtccacacagtcaacgccctccgctcttttacgcgctcatcctttgcctcgctcatagagatctcttcaaaggcatgtctaggatgatgaggagtaccaagagcacctcgtaatttttttctagggagggtccccaaactctcttgttctccgtccgttcttccgcccacttggatctcgtgttctcttctccagaaacatgttctttgccgtcggttctctataaaagacctgcccttcgcttgcttcactggctctttcgtcgttcaactcgttctcttcgcatcgctcttcgcttcggtcgacattcaagggtctttctctcgtttcttacaacacttcatccacacacacactctctccttcagcttagcttcttttgaaaagaacgccgctcgggtcatactttttgccttcctcattcttaccgaaaaagaaaagaaaacaacaaccccaagttcaacagcacccactcatacaatgctttccactcttgccctctttgctcttcctctcttggcttcttctgctcccttgaagcgaggaggtgacgccaagttcacctactagttcgttctcttctcatcctctctccctctttttgaaaatacatattccgggatcctaacagactcctccatctctttcgcgcattgtagcgatacctccgtcggacttggctcctgcggcttgctccatgccaactcggagtacaccgtcgccctcaacaccgctgactgtacgtaggatatttctctgtcgcgtctatgtaaacaagtctgatactgacattgctgggtttatctctgttacttattctcagggagctcgtacggttccggttaccctaacccggtctgtggttccgagatctggatcacctatggatccaagaccgtgaccgctaccatccaggacatgtgccctggatgcccctcgaacggactggatctgtccgaggatttgttctccgctttggcaagccaagaccttggtgtcatctacggttcttggggattcggttcgttcctcgttctctttcttctacaattctattcaggccatcttgttaaccatctttcgcgctgtctccttgcttctcctcatttataggctccgccgggtcttccaacgaggctgctaccaccgtcgctgccgctgctgccgccgttaccacctctgccgagtctgctactcctgctacctctgccacctccaccgctaccatcgttaccaccgctgctcctgctgccgagtctgaggccgccagatcgaacgcttctgtcgagtacccctggtcagctatcgatccttctgaggcttgcgtcggatctcagcttgttctctggaacgagacctccgttatctacaacggcacagtgtctgaggccgggctgaactctaccgagctttccatcgttgagtggtgcttcgatggggtcctcagtggaaacctgaccgagctcacctcgttgaacgtcagcgctagcagtgtcgccaacggcaccaccgccttctaaaacgcagagagaaactctgagagtcctcttcttcggtcctttcctttcccttcttttctttgtgtttatatctatctatttatctgtttgttctagtatcattgttggggtatcttcagttcatcacggtatctggaaaaaaaaggaaggagaagaaagaagaagaaggattgatctcatagttctttttcttttgggaccccttcctctgaatctcattctttccaattctttcccctctctttcgtttcattttcacatccgttcgtttcagatgatagatcttctttatcttttcatctttttttgtatagagaattctcatccccctcccttcattccctccattccctccattgcactcaattcacctcgcccatacatacacacatacacacatccatccatccacacattcattcactcactcactcatccatccacaaatccttagacgtatgaccatctttcccttatctataacatgcatctcatccattttatcttggatctcgctcgtctttcgttcttaccggaaccacggctctaggaaaaatgctgcacgagggagtctttgtttacaagaatggattagatcgaaatcgaaaccggaacaccaacaagaaggaaagaaagaaagaaagaaggaaggaaacacggaaagaaagatgaaaataaatggagacaaggacgacagaaaggtgagaatagaggtcgagatcaaagtcaaaggtagtagaatagtgtactatgcatatagcgatctagatgaaagacaacttgcgacctaggatttatctcagattaacgaataaatcatatgtacacaaaaaaaacaaagaggagagacttatatggcaggggcaattgaaacatatatgcaagctagataggacatatgagatataaagtaaagagagaagaaaacgagagagaagaacaatgtgatgggtacatacatgcgccaacagtcaatgttgatctgtgtctgtggaaaggcagaagggtacataaaaacgaatatacgaaagaaaggaacaaagaaaggaagaaaggaacaaagaaagaaagagaaaaagaaagagaaa

SEQ ID NO: 2611 - DNA, 14775 bp, Xanthophyllomyces dendrorhous
gaaaaagaaagagaaaaagacagaaataatcagtgggcggggtcaaagaagaaaaaaaaggtaacgtctaccgattataggacctgaggcataggttactacttatagatacgtacatatccgtttgtgctgatgataaaaagagaagagaaagaaaagcatgaacagagcttccagaacagaagaaacagaagaaaccttacggacacaaacagtcaaattaaggattcaacgtcgacaagcaaggtaggaaaaacaaggcagatgaggaatctcttgagaggaagagcagtacctagggactaccattcaagagatctcagaacatgctctcgattgtcgtacgaagtgggatcattgtactaaagaggtccaagacttgtggaacggtcatgttgggcacatccagcatctccgaatcgaccgcctgtgtactcagtttgacaagggaagaatcgaacgaataagtccaacatctaaaatcaaggaagaaagagtgaggggacgaacgacaaaagaccggggccattggacgtgctgttctttgcttgataagttctgctgatcagaagaatgccacgaatagttgacctttccgtccggttcgacagatcgatctataggatctcctttggatctgatgagcataagaagaaccgactggaagaattgggcctggcatgcgcagagatcaaacggctggaaggaggcgacctggcagtaaccttgggcggcatagagagcatccaactgcacgagataaccagaaggatgtcaatgagaatgtacaagtttgacatcgtgaaggaagagaaaagaagagattatttacaaactcagtctcgtactgagccgggagttgattgaaattctgcgacatagaggatagtcgaaatgaaaggtgtcagtatggttcactgctcgtcgccgatgagccaagatccgaagagaagaacgactaatattcacctttgctagccacaccgtcgccgaggccgtgccgatataggtaagctcgtgcatgattcccaatactgatcttatgtcctctatccctctcacgaccttaagtgcactttccacggcttgaacgaaacactttatcccagcaaagtttttcggaggcgtgaccttggattcttcgtcgtccacgagagaaagatagaacgtcggcgctttggcagatgtggcagtacttgagctgaggaataggaggtcgaagtcgaattcggcaattctggaatagtgattgatgagtatctgggaggcgggaaggagcttgtacacatgcgcctcgggatcttgatcttgaaggccagagaagaaggatatggaaggtttagcagattgatcgtcggcaaaggtgatgaccagtgacgttatctgctcgctcgtgcaaatagaaataggaagaaaagcaccaaccaagtgattcactggagtgcccccttttcgacaccttccacctttctttccagtgttccatctgatccttccctctctcgaccaggagcgttctaacttttgcatcctgtgaggagttgagagagttgagcccccagtataggttagtaagctcccagatcgaggcggtgtgttggtcgcaagggttcgaatatttcgggtggtcgacgatccaaagacaaggatctaacatcgctcttcgattgatcattccaggcctagggagcggcactaatatcagcaactgagccgtcaacaaacatgaatgatgatgggacgaacagcagatggtgaacctccaacaagttttcgaaggcagttaatgcataaaatgtccgctctctatcctgaaggaaagaaaaaaggcagagatacaagagggcagagtttgagtgtcaggtttcttgcatggatagtagaaggatgcaactatggtttgtgggtcatactagaacgagccgagcttcgagcgcgtcttcaggaagaggccggacatgctcgcgatggagaccgagttcataagctattcggatagctacattgataacaaagatcacgagtgtaagcacaacaagaagagagaaaaagggaaagcatacagcataaatggcgaggcagatagcggaagaggtcagcgacttgagtgtgtatgagcgcttgcttatcctcttctaagtcaacacacacacacacacacacgcatgaatcgctaggcccatgatacggaacatccgttgctagatatagtctagataggctgacacgagcaggagtgtgcgactcaccataaccaactaatttccagccaccaccagcgacttcgtccgttcttctccagaaaccgagcaggaataatgcttgacaaaggccaatttcacaaactccctcggcaaaggcgaggcctgagagagatttagcgaacattcggagacgggcgtgccggtcaactagggttagttgcgtcgcggccatgagaatagcagtgtacaagacagggctcgtcgagcgcgtccactcgggcgtatgcaatacggaatctctgtcgaagaacgataaggaactgtcagttcaagtgtggtgtttagataggtaggagaacagagagcaaacgcgcactgacaggagtgaacaaataggatttaatcggttcataaatctgagagaaggtatgagagtggtcagcatgcgatgtaagcgcttatcaactccactcgctctggtagacaatgatgagagaaaaaaaaggaaaggaagcacagacatacacagaaaacagtgtttttgcctccttttctgtcacaattccctcgtccaccggtgtcttccaatccttagtcgtcttgggcgcagagccagaaaagatctttttaaacgactgcttcggcctttggtccaccgatcccagcctgcctagcttttctcggtcgtctccgcccatgacgaaagacctgctgccatgtgaagctctatgagccattgaatcggtcgtacgggttgggcttgttgtcgtgtctgatgttgtatttgaggaacgggcgacaccttgactgtttcccagagactgcgtgggaaaatcttcaagcggaggagagatatacggcgggttgaacattggctgttcgttttgagagataataggtctagaagttagttccctaggagtagggaacgagtcggcctcgtacgggctggaaaagagatcgtagggatattcgacctgcggtccatctaaggagaagctaagctcctcagaatgcatctcggatggagagttatccatatacgagacgggctgctgttgtcgttgctgttgctgttgttgttgttgttgctgctgttgtgagtgcgaataagaggacggattattgtagccttcatattgatttgattgttgcatcgcgacagtgctgttttgttggtacagctgattccgcggaacgtacggatacgtcgtgtagaggccaggatctggatatgtttcagattctggactgaaagagactgagctctgagaagattggtttgcgagatgttggcgctgacgtagttgctgctgctgttcttgctgtatgtgttcttctgcttgcaggatccgttgctgccgttgctgagaggtggaaagtgatgaatcggcaaagtaagccatttcggctgactccgagctgaattcttgacaagccgaatgcaggcaattggtttgtgtttaatcgataacccgaatcttgtctttctgacaactgatcagcctaatgagcaagaagagatagagaccggcgatagtgagtggagatggggatggggatgagagtgagaaggagatggacgctgatgtgaagaagaaaaaaaatccgaagaaggcctagagaagatatgggcggcaaggaaaggaggagagaaaaaggaactgatcgaaaagaaaagagggagaaacaggaacaaggcacgcggctacaagcaagacgatgtgaaacgagtgtgcctgaggatgaagaagagcaccgtggatagacaggacgcaggaagcaacgagacttgtacgaccggcggggggcgagggagcccgcctggggagagagggggcggtcaggaattatatttactaacgttttagacaaacaaatctgtcccactctgccatccaagcctgaacacgcattagtgatcaataggataaatatcgaaattcaagtgatcggccgcagcaaattgaaccatccgatcgtgcgcctgcctgtctgacacgtgtattcttgtctcttcctcatcattcgcctccagcctgttcctcggagatacgttgttgacagataatcctttatagattaagcttcctgatctggttatgcacatattgagtcattaattatcaaagacgatcaagcacatcgtcaaagagttgggtcaggtctgaggagaggtgacatagagataccgtaaagacggaactctagtgttccggctactcgctcctcttcccatcgcgggcaaagcattgatcctttcttctaacgtggcttgtatcaaagagagagaagagtgattggaaatctttccgggtatgtcgaccggatagctccaacggccgtcttccttttcttcttctctccatgtgtttactctttctctcttcttgggcagaccgtccttcggatgaacgggcttcctcatcaccagtaatctatcgagcgatactctattattcctccacgaccgtcgaccaatctttttttcttcaacacagcccatttcttgatcctgaaacagacagatagccaagcacagtcaaccaatgatcaaacagatccattcctccgaatcaatcagctcactcgtgcactcgagcatttcttctccaattcgtcaaagagcactgaccatatgtccatcttttgtcgagaaccctgagagcccacattcactgtaggaatcatccgaggctctcctggtacggagagcgcaaaacacgtcaactctgtgaacgagctaggaggaaaaataataaaaatggaacatccggcagaaggagaagaaagaacccggatcagagttttgtctatcgttccgctgtgacgagaaaggcgatgacgaatcgagaaacttacctatgctccgaatacgggactagcgagaggggaggaagatcacatcagcgggcagaatcgttcacctccacgccgagtccccttacaccgtgcgacgccagagccacagttagcaaagtgcttgatacttacctccgtacatggtcactttgtcagaagatcctctcgatggcttgagatccctcgcgtcgaatgttgcctgttggtcccttgcgatcagcatgttcagatccgcactggcgctcatgttggttccgccatttggagtgtatctgccaagtccatatatgtctttgagccaagctgttgggaagcaagaagacaggtagacaagaggaaagcaaaatactgacgtccacccggtcggtcggaatccaatgattcgatcgaacaaggtagtgtgtttcttcagatatgccgtcaaaccttcatggctaatgtcatgcaaagagatcatatgaacttgagactagacaatattgacaggcgttaggagactgccagaacgtagagaacaatacagactgccgaatcgttctcacctgggatggattatcagtaattagctcattcagctctgggtcctctgtttggtcattcacaatcgctcgcttatatgcatcgcaatagatcctcgagccgagcgcgtgagcgatacctttcacaattctctcctttccgatcgagtacgttcctacagcgacaagcgtcctaagccctctccgacggattcgatctgcttccgtttttttctgctcctccgtatcaaacttgtggagccagtcggtcatcattgatttcgactcgccaggcgaaccggtgatggccgaccgggagtcctgcgcaatattcatcggaccaccctggaccaattcccgcgccaagagagatactgattcgatcaccgtcggctgaggcggaaagcagtactgtagtcaaagaatgaggataagaggaggaagatgcaacattcagtcctaaacgcatgccgaacacaaatctttcgtgcatccgcgcaaagcacacaccttaggattcagatacgttgtgtccaaataaatctcgtccagcttagccttcctgatggcagggtgcatgacatgctttggacaggctcggaagtctccacagtggaggtatcgataaacctttggcccgcctaatccttgggcaacgtaaggagagtcgccagcatgaaccgttcgtctaccttcaaacaagaagatggctgatcccggacctgtcaatagaatgacaacaagaaatttaagaggatgttcactgaaaattcttattgaaataggaaaaaggaaaaagaggaaaagacgggtcgaaaaagccgcaagaaaacttacaatgattcgcctcgatcatcgtacagaccactccgcccgttcccggcaactctgtcggtttatcgaattctagtggtttgacccatttagaatccacaccaagcttccgaatgatcaaattggctgtcgtttgggaacaatatatcgggccatgcttccatgttttggacagtttggtgtagtggtcagaatgagcactagacatgaagaaaaggcatataggaaccgctgtcaaatcctaagagccgttaagaagaaagatgaacggaaccacttactggcttaatagactagaaacatcaacaaaaccacatatatgtcagtttgagaatgtctaaaaagaaatcgtacagagacattctatcgagcatggtcaaactcactaagcggttacctttgggatctttccataccggaacccatcgacgcatataggcattcctgtgagaacctaccgaacgtctcaaaagtggcagtcgcattagtctttgtgcgcaccagtcaaagagaaggtagcaatccgatcgaaccttgaaaaaaggagcgcgtcgtcgttcgccagctttaatgaccttgcctcctcgtttgatcgaccggtcatcctcgacgtctttccacacgtcaaccgttttactcttggtcatcatcatcgcaaatgcgtttttcgtcggtggtggtagtgatggtttggttttgtaatcttcctcaatgctactctcatcttcgtcttcgatcatctctaccggatcctcctcttccccgtcatctcctaagccatatcgttcgtaatcctcctcttcgtcttctccaggatcgagcatgccttcctgttcatcatcatgcatcccaaacccttcatctctgtacagtccaggaagatcatcctccccgggcgcaatgtcagacatggctcgtttctcttggagtacgccagagaacgtcaggtcgatcgactcatttgccgcggcttgagacgttgtttgctcccaattcaggcaagaacgcggacgatcgttgataactagtttagacccatcagatacagtagcagctgatggcatatgttcgaatgtttcttggtctataatgatgattgaatgggagtcaggaccggtagaggattcttcagccccggtgatcttggttgatagttttgaggcggatggcggatgagaccgtcgagtggtacgaggtagggattcagaaaccagacatcgatccaagtccaaacagttctccgtcgccgctccttcaacctttgggagtcctggaggagaaaccccagaggcattcaagctaagcttgaaatcactagatgagctctcccgtttttgtcgttgtttcccaccttcccgtggttcgataagttcgacctctacgagatcctcatcagacgagtccagcaggcagacaggctcgtccaccgttccctgctctaacgaaatcttcctcttcttgatcgaacctgttactaatcgaccgggccgtctccgtccagatccatccgacaaggtatcaggtggtatccggggtttcgatggagaggacgtagtcgtcaaggtggatgtggaggccaccggttgtttctgaaagaatccaagaagactggtctgtccggccagactcgagggaggcggcggggccatacgtgagcgtgttttgactgctttatttgagggagaccggatgaagaacgggtgggcggaagggccgatggtgtttgggttgtatgttttcttggatcatccatcgctgggcgcggacgtttaaacgaccatgggatcaacgtcatcattgaggtctctgccattttggatatatcccaaaaacagagtgcgaaacgcagatatcaaacgtcaaacggtcaagacatagacagcagacaagtaaataaacgagcaagcatcagatagtcagattcacaacaaccagccggcccggctcactcattctcttgtataagtcttctttccgttccgacgcgtgtctgtcacatataccagtacatcagtttcaacccgaaatctcattcgaaacgagcacgcgtactacaaaatggcttcagatcgacgcgttatatacaaaaggaagaacgtaaacgacaacgaagagaaatgcgagggatgaactgaagaccgaactagacagacaacggagagacccagatggtagatgatagagtagagagtaaaattattagaagaaattttatatgaagaggagaaaaaagaaaggagaagaacaagacaaatctgtttagtgcaagagggaatttatgtttggaaagaatcggagggttattcgaatgagaatcgatagaacaagggaaactatgttgggaggaaagcgacacatgagtaaaagtcgggaggcaggaagagaggaagaacatgtatggaaattgaaaggagaaaagaaagaatccccaacaaattgtactggtaagaacgacgagaagagttaacggcaaggaggacatatgcatctaaacttgaaccaaaaaggaaagaaagaagagagagaaagaaaagaaaaaagaaaaagaaaaatgtacatctacttagatgtcttcgtcttcacatatgagaccctcaatcagggcttgcctccgtgctcagccatcaagtttgcacttagctgctgagcctctgagactctcctcgcccgctttgtcgtccctgctcctgtcccggtcgctgtggtagaaggtccggagagaccgaggccaaacccattggggtttgaatgggagaacgaggacccagacccagactcggagctagcgttctggcctgagctcgatttcggtcgattgccaacagagaccaatccagccgagctctttcgttgaagcgccgggtctttctgaccggtgatccggttacgtttcttgataacgtccgttttgagggacaacggtcggacaacgccatgaagcttatagaacaacccgcaggcgttacagagcgggtttccatccggatctcgtctccaaagaggagtgttggtggtatgacaatttgaacagatcgtcggaggctctccggcctgtccaccagtggcaccaccggtactggccgaagcggtagaggacgaaccctccggtgtgtttccttcggagtttcctccacacccaggcccaggtgttaccggtttggactggtcgcccttcggcttggaagtctgagagctcggggtggaaagtgtaccgagagtagaagaaaatcgatggatggttgccgagttgggtgaactagtcgatcgggaaagaccaacacctcgacctgcacccgagtttttccttgacggatttctcgaaccggacgcgctgtttgatgacggtggtggtcccaactgaaattgctggaacgaagagctgaccaacctggaagggccggccggtctgacggctgaagagctaccaccacctatactctgtggagaatctgccaatggggaggtgtacgctccgctagaggaatcactaagtccgttgaaactgatgctgtcgtacaagctgtcaccattgcccaacgtctgggtcgggttgatgtgtgtgaatgtggtacctccaggtccggtggtagctccagctctgactccaaccggatgggccgtggtcgggttgattggagaatgaggctgagagttgttactcgcggtgtagaacagattcatcaggttttgcatgtttacacctgaaggttcggccgatggttggcctagagaatcgtataatgatgcatccggatgatggccgcctgctggtccatagcccggggaagcatcttgagacgtaggtgtcgtcgtgatggatgtcgccaagttgaaccagtagtcctcttggggagtaccggagtctgggactttatcattcccaccgacgcccggtcgttctccaggggtggaagacgaggcagaaggatcaagctcgaaaaaggcacggtagggatcggacgaggggtattggaaggtaaatgtggaagacggaaagatagtgtctgtcgtgcccggagattcggagggagcccgggtttcgacatccggaccgtacgttgggtctcctctcggcacgaactcggccggtcgtttttgaccctttatgcgaagtgatacgcatcaagaaaaaggggagggaaagaagcctgggtcagccgtcggtcgtcgtggaagaaacaaagaaacatgagaaaagaatcctggttcgggaactaaccagtaaactactgatctgaacgtccccatcggttgttgatgtacccagcctagacgctcgtctggactcagaaccaccggagccatcataagggcttgtaccgaggcctgagccggatccggaaccagacccggtctgatcgcctctgagaaacatctgggtagggtaggcacctggtccggagaaggcgatatcacctgaagaatccaaaaaggaaaagccaccgagatcgttcccgccgaggtccagcattgatctcgggaaaaagtgttggctgtcaaacccaggttcgaacggggccatcgattggaaatggttctggccaggaataggaatcccttgggatccgactaaggacgcggttgccggttgatgggcatgagagttataggcaggagtagcgttgaggaagtccaaggcgccgaggagataatgtgaatgagcctcgttgtgttcgtattcagcgaacggggctctcgacctggatcgtgaggccgctcgccaatccatggacatcctcgatcgggatcgactctttgctcgccagtccataacatcagagtcttccagcgtgcttgattggacaagacacccgcacgcgagagatagacgcatattcaaaaaaaagcatcaatacgtatacgtatagggagcgcacatgcgcgctttgttgaaacaagagaaaagaaaaaggagtaaactcaccttgggttgggactataagcattaaatccgacgatcctggacgttcgctgtcttcttcccctagtgacctcctctgccaagacgtcttccttctttttcgcttcttcctccagactcacgttctccttaccttcctcctttaacgtttccttttgctcatccttttctttcgagagaaacgagctgccgagcgaaccgggcggtttgtgggcatccccgatcgcggcaagcgcggcgtcggagagaaggatgttcaatgagagatcagactctgtctttattggcttggcgtctacagtggtcgacccatcgggctttccggactggctagcgacggtcggcacggtcggtacgacggcggaagccgcttgggctgcagcggcctgttcggccaactctttctttctcaggttcattgccatcatcctccacgtcaagttctccatccgttggccgttcggtagctctgatttatgtttcgagtacatcttccagacctgagcagcgacaggatcggtgtgtgggttcggttcatctgttcctatcgtctgtgctgttggcgagttgagttcggacgagttttcttcctggacgggtgacgggtaagatgggtaaggtggcgaggtcgaaaggttcgggagtgaatgatataggccgccaccggatggagcggttgagccgagggaagatggggtggaaccggacaggcgtctgctgttggcagagttggttagagtggtggaattgttgctgttgttgctgttgttgttgttagtagtagtggtggtggtggtggtggtggtggaagaattggcagaagtaccggtggagccggtagcgttgctagtggtagtcaactttgtactggttgaggctgattgagaaggagaagaaactacgcttgatgcagatggctttcgagagaatatcacgtcgctcaagatgtcagacacgatcgactttttatcaaatgacttgccaagcccggagggtgaagctgtcgaggagttgagcccggtaggaccaccaccaatggatgaatccgtctgatgcatgctcgaaccactcgtccgtctgagatgttcaggtctggatagaccgacggacgatctgggtgaatccgcgagggacaaggtcgaggatgggaacaaacctatgtctccccatcctgacggatgttcactcagcgtaggcgagagcaacgctgcaggcaagttgcccatcatgtttacgttcgttctgttcttcccgtcgcctggagaaccattaaactgtccgccaagactcatcccgatacccatgcccacacggatggccatagcgagggtgtcgttcccgttggcgcctacacctgcgcctgcgtggtttccgttcagatactgggcgagtgaaaagtctgaaggtagctccggtagattcaccgtcggagttccactagagttctcggaattcatgtgagcaggtgggaaggcaaacgcggggagctgatgtgcggaaggcaacgtcgtggcgggacggggcgagggttgctgttgctgtgaaggtggattggtgcttggatttgagttggtgttggtgttggcgttgggattggaactgggattaggaagggcgtttgtcgatggtctgtgtggacgggcacgcggaaagctcgagggctaaagaaaggaagaaagcaagaacaagaagaatgttaacaagaccggatcatcaactttgtctttgcagactctgagcgaatcagaataaagggaaatcctgaaactgacgccttcgtttggactacctaattcactagagccgtcgggaccgtctgtccatctgccgttgagcggctgtttgttgccggttggtggtggagccataggtctaccggagaggtagggagatgtactaaaactggatccttggtttccgcgttgagctgagtttgacgacgacgacgacgacgacgacagcgacggcggcatattagtcgagaggggtgaacggctattggtggccgtcgacggttgttgctgctgctgctgttgttgttgttgttggagacgttgcgtcaacaaggaaggcacaggctggttggatgtgtttgtaggtcggaaaggtggctgatgctgctggttctgttggatgaatgaaggaaacccttgagtggtaggagggacgaacgcaaagggcgagggagatggtggctgagtgcttgtcggcgagacaaatgccgagctagaagcggatgcagagaacgatgaagaagcttgatgatgagccctgtacggctgatgggcggcaggatgatgctgactggattgggagcgagcaggtccggcgggtctggctggctggttggctggatcgtgttccgtaggaggtgtgcttgacggatcgagcgtggctagtgaggcgagaacggttgggtgaagaggtagggaactaaagtctaggtttgcccaatctacggacgacatccatgctgatgaggatgctgaagaaaacgatggattaccctgatctagatcgactggctgttggaccgagggagacgacacggacgagatgtttgacggaggcgagccggccatagaatttcgatctagcaagagggaaagaacgaaggaaagaaggaaggaatagggcgactttgtaatttcctatcggccgacacacacacacacacacacacacacacacacgcacacacacacctacgagaagacggctggatggacgtatactacgagctgaacgaccgggccaagatgaactggatgatgatgagaacgaggatcagaagaaggaacaagaaagaacgcgaaggaagaaccacttggattacagatgagctttaggataggaaaaggaccaacaagcgaaaggagaaagcaaaaagaaaaagaaaaaaagccagaggaagggaaaacgaaagaggcgaaggagtggaggctttttttttctcgttctctctctcgtgcgcccacggccggggcatcaggcgtgcgggcgcgggtgatgagtttggcaggcagctcacccacagagtgcggggccggctcaggtttcatagagatggttacaggagatctgagccgtttcattccgcagtaggtaaaaactccgtccgggtcactttctatagtccgtccgggcaagttttcgactgcgcagggtatgatatccgtaaccatgccatcgggcctagacaaccgacggtcttggtcgttgtctttgtctttgcctttatcttttcatctctcggatgatgtttgtttgtttccagggatctgggtatgtttgctctgttgtctgcgtgtgcttgcatgtgagtctgagtgcgcttgattgtatgtgtgtatgtgggtgagcgtggcagtgtgcgcgtgttcgttatcggatgaataatcaatggctgtcagggtccgggttcagagggtaacgg

SEQ ID NO: 2612 - DNA, 1447 bp, Xanthophyllomyces dendrorhous
cttggtagactatgctatgggtggcaaaggagacccatcttatatatcatccttagactccaacgattatgcataagagaacaggtcatagaaggtgctagaagcacctgcgctgcaaggtcatatacctgcatgttgatgtaatgagagagcataaggaataccgaggcaggagaaacaacagaaccaaaagaaggttaccgaggtgtaacactcaggtcacatccctgacaatggcagctttcaacattcacatgtcagacctttttttacattatatggctttggctactagaaagcaacctcaaccgatggtgatcgatacatgatccttttggacttgggtgccctcagaccacgaaccaccaaggtttccgtgggtcatgggtttagtttctgctagcctcatccccagcctcactagtgacagcgtcgaaccctagcattctcgccccttcgttcttctcctggtgaagggctaggtgcagcatgttgcgcgacgcattgacatctctgttctatcaagtctgagagcaagcaccaaagaggcaaagaggcaaagagatataggaacagcgaggcaccgtcagcttcctcgctctgtctgtgagctcagagacttcctctctcgtggtggctaaatatgcttgagagaacgtcatcaggacaagatgtcgatcgcttgtgtacctgctcgagttttgccctgaactcaaccggctgtgcctgcgaacctccctttgacggctgaacaccagtcggccgctgttcctgtttctttcctgtcaacgctcgttcctgtcgatgcccatcttctgctcctggctcatctgtgcgctcgagagctttcccatataagttcatccttgatacaatgttacctttcctttgtcttcatcttcttcatcacatctgcaagcgcacatgatcgcatcgtatataatgtcccacactcgaaacaaagcacaagtccctccgagtgacgtgtgtttctctatgaggtctagtacacttgaggtatcaactggatcgagcagtgtcgatagacagttttcgactcttgtacagagcgtcgagaccggcagccagtaatcgactttcatggtcgttgagtatgtatcatcccatgcgcattcatgggatgatcgtagccacctgcgacacactctcatccaaagacgtaccaacagcacaccgatcacagtcatcactatcagccctgatcgaatgactcgtcgggaggacgagatcgacaagatcctgactttcttttcccagcatgacatttcctggtggtccttcggcatccaagataaggatcaacccggactcaaggcgcggctagtccctgtcagcgcgcatgtacccgttgtacggcaacagatgtcgcatgggcgcttagcagcatcgggaacgtccaaatatatggtctgtttcaaccgtacgg

SEQ ID NO: 2613 - DNA, 511 bp, Xanthophyllomyces dendrorhous
agttgatcttggagttgacgataaagctgatttcgagtacgaacatgaagatgagaacgatgataaagtccctcttctcgtcccactggctcctttggtcccactccctccttccaacagtccacttcaacttgccgcaacgtccaggttgcaccagttccagagttccgtccagcaccatatcgaagctcgccaaatcgagcgcgtcgtcgtgctcggccggacatctaccttctccaccaagcaagtctcgttggacgcccaagtaggtcttctacaacatatgctaggcgacttcgaaggagatacccgtatgctggagtgcaacggagtctctgcatacgagcatgactatctgctcgaagcatgcaaaagagacgagaaggtatgtttctgcctgtcctacctttatccgagtctaagcttcatgctgatctgccttccacttgatgtcgtaatccagactctggtccttgcgacctcggttgatcgcgtctgccgcaacccagct

SEQ ID NO: 2614 - DNA, 353 bp, Xanthophyllomyces dendrorhous
gcgtctgccgcaacccagctctcatcgaagataccctcggatcactcgatgtgatgacattcatccattgtgacaccgaggcgaactgtcgaacgctcgcggatgagtggctgaacactctagacgaaagcgaccaacagacttggaggcccatcctcgagaggcaattgtctcacaccacctcagtcaagacagcagggatcactttcccatatatttggaatacaccatctgtcagccttagggagcaactcaagtctagggtaaccaaagactcagcgttctgttcctcacgaggaccctcacatcatttctcaaagcctcctctccttcctggcttggccagctacact

SEQ ID NO: 2615 - DNA, 42046 bp, Xanthophyllomyces dendrorhous
  misc_feature (1498)..(1507): n is a, c, g, or t
  misc_feature (20479)..(20488): n is a, c, g, or t
agcgaccaacagacttggaggcccatcctcgagaggcaattgtctcacaccacctcagtcaagacagcagggatcactttcccatatatttggaatacaccatctgtcagccttagggagcaactcaagtctagggtaaccaaagactcagcgttctgttcctcacgaggaccctcacatcatttctcaaagcctcctctccttcctggcttggccagctacactggacgcaggattggcttcaatgacaacaggatggaactgtggaaacagatccatcaggagtacacaggatgcacgctcgacgtacactacgagaacaaaggatggacttgcgcatgccacggagatgtctgcagagacgattgcctctgtgactgcggtccttgtcagaatcgagccgcaatgggatgcgtctgtcgtcttcaagagcgttgcgattgttggatctttgacgtctgtcgatgtccgatctgtaacccggaaatacgacgacggaaagagaaagcagagcagaggagaacaagctgaaggcggagcagaaggcggaggagtggaggctgaaggcagataaatggaatcttgaggtagagaggatgcggagggaactaaaaaagcagtctcaggcgcaaaagtattccggggtccaacaaccgatggcggctgcaaagctagccgaccgacaacaggtagcggcagatatagatgcagtcgtcacggaagctgcaggtaaagtatcggccatagtgggacgcaatgaaatatacaatgcggtctatcagaggacggccatagtcgcacggcagaagatctacgagggaatatcttgtcggataaagactttcgcagagagggctgcccaacgaacgtcggatccggtcgtgcgacggcaagggattgcagtcgtgcgggacaggacgatcttagagactcccatgcggctgagtctggaggctctgaagcaggagacattggagcgaaagagactgtggagtgagatgggatggatggagaaacatatgacgtcagatgagctggatggaaaatggacagagggacaacgactgaccagactggtagcttgtgtacagatcaagcagttgctggacgaggagaagggatggagggtcgaagagacgcagttgagagagatacgtgactttttgggtgcagccgacgcaaagtcggaggcggattcggccagtgtgatgctgaaagagaaagggcgagagatgcacttgatgtcgatcaagtacagggaggaagaagaggaacggactagggagagacggcagagagaagagtacgtccaggtcgcttcattccttctactgacttggcggctgtctttttctcacttttcctacgtaggttggatgagcagctgcgtgagtcaccttggtggcggtctatccgacagaagaccacagcgaaatgtcttgagcctgaattgtaaagtctattggagattggattcgatgagtgataaagtctatgnnnnnnnnnnggacgcaggattggcttcaatgacaacaggatggaactgtggaaacagatccatcaggagtacacaggatgcacgctcgacgtacactacgagaacaaaggatggacttgcgcatgccacggagatgtctgcagagacgattgcctctgtgactgcggtccttgtcagaatcgagccgcaatgggatgcgtctgtcgtcttcaagagcgttgcgattgttggatctttgacgtctgtcgatgtccgatctgtaacccggaaatacgacgacggaaagagaaagcagagcagaggagaacaagctgaaggcggagcagaaggcggaggagtggaggctgaaggcagataaatggaatcttgaggtagagaggatgcggagggaactaaaaaagcagtctcaggcgcaaaagtattccggggtccaacaaccgatggcggctgcaaagctagccgaccgacaacaggtagcggcagatatagatgcagtcgtcacggaagctgcaggtaaagtatcggccatagtgggacgcaatgaaatatacaatgcggtctatcagaggacggccatagtcgcacggcagaagatctacgagggaatatcttgtcggataaagactttcgcagagagggctgcccaacgaacgtcggatccggtcgtgcgacggcaagggattgcagtcgtgcgggacaggacgatcttagagactcccatgcggctgagtctggaggctctgaagcaggagacattggagcgaaagagactgtggagtgagatgggatggatggagaaacatatgacgtcagatgagctggatggaaaatggacagagggacaacgactgaccagactggtagcttgtgtacagatcaagcagttgctggacgaggagaagggatggagggtcgaagagacgcagttgagagagatacgtgactttttgggtgcagccgacgcaaagtcggaggcggattcggccagtgtgatgctgaaagagaaagggcgagagatgcacttgatgtcgatcaagtacagggaggaagaagaggaacggactagggagagacggcagagagaagagtacgtccaggtcgcttcattccttctactgacttggcggctgtctttttctcacttttcctacgtaggttggatgagcagctgcgtgagtcaccttggtggcggtctatccgacagaagaccacagcgaaatgtcttgagcctgaattgtaaagtctattggagattggattcgatgagtgataaagtctatgaacgagacagactgggatcagcaagaatcgagtcagtcatgatatgtttcagggataacgagacatccagccgagcgttttgggtcaggggaagcagaaacgatatcgatagccgtagtttaggtggtttgtttaaaaacatttcatcatgaagatgctgtgatgagacttcttctttctttcgaatgtttcgagcatcggtgaaccctcgttaacccttcttttcccacgtcgagtcatgcgtgggcgtaacgaagcattccaaaaaggtaaatcagccagcttgcctgaacacaacaaggaatgccccggtgaaatggttcgttccctcctcaggagccaccggccatgtgagaatcagagcatgagttgccccgtatacccatccttttgtttaccgtttaactattttttcctacgtcctcccgttcctatgctcgtgtgttggggagagatagggaaggatatcaataatgagtatcaggagagagagagagagaaagaaaaaggaaggaatattagataaaccccatatcagaaccttatccggtcaaggaagaacatgaatacaacagacaataggttccggcagcagggccatttacggatggttagaacatcaaaaagaaagcaagaaaaagaaagaaaatagagaggaggaaagcaaacgaagcacaaaaccgaagcaacctatagctttccttttcgataagggcaacccacaccgtccatcttcatgggcttgtgtccatcctcaaacgcttccttcggcgcgagctgttccacaggaacgccttctttttctgcctttttgatcaaatgggccagaccatcttccgatctatccactcctaattctaaagtacccgagtgagagccataatcagaaatcatcccatctcaacagagatcgcagaagaaaagaagaaacgaggaaggtgcagagtaaaccaacgaacctaaaagttttccaaacgcctgtgttccgtccagacacatcagccaagatgtccattgtgtcagctcttccgctgtcgctcgtaaagaaaacaaaagaaaccatcgaaccttggcaaagtcttcaaagaacacgtccttgtcctccgcgtagatttctacaaactctcggaaggccttgtcctcgatgagcgccatatcggtcgggagcatcataagttcctgtcctagtagctttgtctcgaactgtcggagatagagaggagtatccgtcagagaaaaaaagatactttgtttcaagggaaactcaacaagtaaaagaagaaagaacaggaatagcaatcccttacctggaaaggaccgtcccactttttgggagcccattttttgctgagcagtagcttgaagtactgattcgagaaccgagttggatttgtcacccacctgatggatatatgtacaaagccacaagggaagaaagtatcagacagtgtgttgacccgcatcactcagttcataattctcacactcacggtccttcaaatccacttcggtccgaatggcatctgcccaggttgtgagctccgctaagagcgacaatctctctatcagtaaaacccattcgaccaaagatctcccggatatgatctgcgcctttcgctccgtccggcagccggttcccgacctctcctcggtgactggacgctgcctgttcgtcagagtaatccgtccggcctggtgtccaaggaattttagggccgcccatagtttcgacagccgtcactccagccactgtttgattcgcaaacgaagacttatatcagccttttcgaataaagaacgcagagaaagactagaaaacaaaatttggcacggacacgtccagagatcagagtgcgaaatccacgaatgtttagcctggacaggattgaggaaattgatggcgtggaacaacccggcatctgagaaggtatagggtcgaacgattagctcaaatatataaacctgtcaatcatgacacaaacaacaaaaagaggaggaggagaaagagacgaaactagctgggtcaacggactcgggaggaaacctatttgttcaaacaggaataaaccgccctggtcatttaaacttctgtctcctcgtatcgataccaagagagaaaaacaagcccggagcgaacctcatgcctgccccgttgcttccaccagtgtgttccactagtgaataattgccacttgcatgccaggccaatctgacgaacaccggtccagcactaccgtcatcatatcccggctggggaatgaccgatttgatatccttcttaacagctgcataatttcacattcgatatatccgccacgatgagtgcagacaggaatgagagggtccgttcagttcatcgatcagggttttcagaacaacgcacaaaatcaacttgatgaatttaccttcgtaatctccaggcttggacatgttggtctctatccttgttatctttgtgtttgtttttagtgataccagtggtgctgtcagcagcgatagttgtatagcaaaaaaaacagaacgggttggaaggtgggtgaaagagaaaaatcgaattccttcctttctgcccgcaaatcaccagcagcgtattaatatcttcggtaaaccgggtatcagatcgaaccggaggagtgtaggcactatggttacgcgcttacgtaaacgagtcgctcaaccccgtccgttatctcctcctactcgatcagagatagcagaataaacatccagtgatgaagacgtgaagagacagagacagatggaaagagaaacagaaagagacagagggatatatcgtcgagtgagacgtcagtggtagaagaacatcgggatacaatcgttgtatgaacagaacacagatcaatacagacgacgaatagacatgagcaacatgcatcatagtccgattagagagattgaccatcactatacaaacagcttcgagaggcaaacgacgcgcatacactcggctcggtggcaaacacgacgtgtgttccatccatcctcttagtcgatctgttcactttccttagtaatccaccatctcgccttccatctcaccgttggattctgtaggatagactctaatcggtcgcttctcttgtagctctatcctcgacatctgctcaatgtctaactgctctatcagatacttcatatcatcatcttctcctctcagctctcatgggccttctgaagagattccggtctccaagtgggcccttgttcctgcttctccatcaccatctgcctcgaaagatgcactaattctcctaacgctgttccagattccaacagctcttctcactttcgggctcaccgccgggtcgttctacatgttcactagatcgaaaggagcccgaggtctcacctctgccgccactacgtccgctcagcaagcggtcgcacgctcgggagagtctccccgacaaattctcctgaaacggctcgatcgactggagtcattatcgaacgagaaccagcaatggtctaggcaactcgaaggaagactagagaaaaacgtcgctctaggagtcgagtcgatcagatcggacttgagtcagattagaaggcttctgatgaaggataatgacaggttcgttccttgtttactcttcttttctcccgataggtcgttcttcctacctgttctcgtcaacttgtgacttatcacccgatgggtctgttcatcttgaccggctataactatatattttagacttcaaagcagtctgagcaggatcgaaagactactcgagcagctgcctcaatcatctactgccaatcagatgactaagatatcaagcgatgattcttctccgccatctggaggcctcacggcgccaacccaaaaggtaggaccatcacggatgtatctgcgtcaccgcatgaactttgtcgtcagaatgtttgttgatcgcctggtgatgcacttgaacgatcttgacagctcgtctcaaagcctgtaacttcaaaggaatctatttgggaggcagctagagatagctccccgttcctatacgggcagcatccttcgggcggaccggcaaaatcggtaggtctcaggcagactgtatcttttcgaaatcacctcgcgttgtgtaaattaacatgttgtctcgttctatgtcagccggccggtccgatcttgaccgatcaatcccctaaagaggaagatacacccctgaagtatacctccgcctttcgccctacagtccagtcatcagataagacccccgacaaggcagatatcgctcgatggtcctctttattcaacaagaagaaacaagagcagaacgtaaagggtgtcggctttgagtccgagatcaaggaagcccggcgcaaagccgaggaagaggaggatcgagtggctcaagaggaagaagactggaaagctcagaagagaggttgggtacgtctttgtttctgttgtgtaatatcattcttccagcgcggccgacaggactaacgtcgtgagctgatcaatcggatatagacagaggacttgaaacctactcagaagtcgtttgttctagtcaataccgacgaacccagcaacacggtcgtttccagtagcccaattgaagtcaactctgaccatcctgcctcgagttccactcgtactgacgacatccaccacgatgttctacccaaagggattgtcgaagaaaccaggccaggcgagtcgaaagaaacgcctgtgaccgagacagcgcagcctgagcctcatgtagcttcagaggctgatcctctccttgtccatcagaacaatgatagacagtttcgtagtcttgaccgttcatcgacttctcagacctcttggtcccaaaccccccgatccggttcatctaccgactcctcgtctcctgatgatgcctcgaccgctgcccgatctcagctcaagcctgaaaaggctgtcaacactgacaccaccccctctacgccctcgattactcggccttgtttcccgtttggattccagccgcactctatggcatctgcattcgcgttccactttgaaaccccccgggcattcagatatggattcacccatccgtttactagagcagaggccgctgtaaaggagaaagagaacgacaaggcgagggaacacgagggacttccgttaggagagatcaagacacacggccagggttgttcttactggacgatcatcaacggagtcagagtgaagagggtctctagctggaggagataggagggagtttctttatcatgagctattgtctttcagtgttatggccttttctttgttgtttcttattgtctcatatctttaagtcgttgtaaactccactctactcgttgtatctttctatcttgtccttcttctccacagtttctttttttccttgctctgtactcttctatctctctctctcttcatttttatggtttttgtccttttttttctctcttgtttgtaaacctgccctatcgcatctcccccccctctcatatcgattctgttttcctctccttcattgtctgttcactctatagtattacatgaaagattgcaccctatctgttgtccgctcagatggacgatcggaattggtaggtcatcatgtgatcgttgaataggaagaaataaaaggggatacaatatttaagagaatgaagaccaagacgaagatggaccgatgaagaacgaaaaggatttgaagggcggaagagatgccgtctagggatgcttcattaatgaacatattctattttcagaggaaagaggaggagaaggggaggaagcggagaagattcttaaacgaggttggatgggtaaaggaagtcgccaggagcaacaaagttttccttgatcgatcgagcggactgcgcgaaagagaatgcaagaagagagcagtcagtattctgtttgggcctgatcgtttacatctatgtttggcttcatgaaaaaagagagagagggagagaaagagaaaacagtggggacatacaacgaatcggtagaagatcgagatcgaaccggccttgtcgttagttcccgaacctcgggctcctccgaaaggctgttgaccgaccacggctcccgtgcacttgtcgttgatgtagctgtttcggacgaagaacgtgtcagagaaaagatatacacgacagcgcaaaacagagcatgggaggaggggaaagacatacaagttaccggcagagtttcggagcttctgctgggcgacgaccacggctgctcgctcgctagcgaacaccgatccggtaagggcgtagtcggtcgtgctgtcgatcaactcgcacgtctgctcgaactgatcgtcctcgtagacgtaaaccgtgatcaccggtccgaagatctcgctgaccatctggcagtccgagcaagacaaaacagcattgattagtatcatatggttgggataggatggaaaggaatggggaaaggacaagagatgagaacatacggtgacagacttgggatccttggtgacaatgacggtggggtcgacaaagtaaccggtggaggagtcagctaagtttggaagtcgagaggcgaaccataataggtcagttacacgttggctatgcttggacagaggaaagtgataaacgagacgaacaggttcctccacagaggatctcgcctccctcagccttggccttggcgatcaatccggtgatcttgtcaaacgaggcttggttgctatttcatgaagagccagtgcatgttcaaggttagctcgggaatcggataaaggctgagagcgagagaaactagacgcacataacaggtccgacaaagttggaccagtcgctgcaaggcccaaccttgattcgagagacctccttcttcatggtctctccccatccggcgtcccaaagcgatttggccacgtacactcgacccaaagctgagcacttctgtccagagtattcgaatccagatcggatggactgcaacacggtctccttgatgtctgcactcttgtggatcaggtggaagttctttcctccggtctctccaacgattcgggggtacgacctgtagaggtcgacgttgttggaaatctgcttccagagtcccttgaagacagcagtcgaaccggtgaagtgaagaccggcgaaggacttgtggtcggtgcactgcttgacgacttcaggggccggtccaggaacgaactggatgaccgatccgggcacaccagcctcaagaagaatctgctgggtgaggtagttggcgtaggtggccataggagaaggcttccagatcgtcacgtttccgacgatagcaggagcggcaacgaggttacctccgatagcagtctgtgaatgacaaagacgagcaaggtttagcttgacacatctgtgaccgaatggtacagcaagagacatacgaagttgaaaggagtactgcgattgaaagatagtaggaagaaagatttagcaacttgcgcccatggaacgcgcatctgaagattgttaaacacttacacagcaagaacgaacccctcgagaggccggaactcggttcggctgtagagatagacagagaaaacagtgagagaggttcgaaagatgtgcgcagggccgtttcaacttacttccacacgcccggagagttctcagagggctgctgagcgtaaagctgctcgacaaacttgacaccaaatcggaagaaatcggccatctagttggcgcgagagatggaagaaagagccgatcgattagcttcttttgtcagtcaggaggatgcgaatgaacagactacattactagaaaaggttaaactgacctctgcggcggcatcgatctcagcctgccaagcgttctttccttgtccaagcatggtggcagccatgagcttgtatctacgagggatagatcctttagtttagtgactcttcccaagcaaggagtgtagaggaaacatgcgcttaccggtactttccagagacaagatcggccgccttcaagaagatagcggctcggtcgttccagggaagatcctcccaagctcgctgggccttgagcgcaccagagatggcctgttcaaccacttcgggagtggcggcgtggtagttgcaaagaacttttttgtggtcgtggggagggttctgctggagaatgtttccagtcttgacctagatggatgggtaggtgaaacaaaggtcagcgcaaaagatccgaagaaacgacggagagatggaaagaaggaacgagaagaagacgacgaacgggctttccgtcaatgacacaggggatttcaaaaggcatctgggactccatctcctcgagagcatcctgaagagcctttcgctctggggaccctgcagggtagtttccctgaagaggatgaaaagacataacagaacgaatcatcagtgagccggtcggcgatacgtatacatgcgcgcctagaaagagatggaacgatgggagaacgtctgaaagctgtgatgcactgaccatcggctcgttggcgatcttggggatagagaaagaagcaagagaagccattctgaacgtgatagacggttgggataggatggataggagaagggatgtgtactgtttgtgggagaaagaagaaaaagaagagaacgaggagaaaatgaaaaagatgtgctcgttttaagctgactagatggccagattaccgccgcgttctcttaccgcccgtccggatttaccgctcaagctcatcttctcttttttgaataaactgtggatgagatcaaacagatgcgctcggtgagggagaggcgatgtgaaaatagtccgagttaaatacttgatcagagatggacatatgaacatatgagcagaagacctgagaggaaaccaatggacgattgaaaagagacagagagaatcgatctggcatccgtatttccttctcctctccgtccaggttatctcttatgtggtttgttctgatgtttcatcttatcctccaaaattcagtcggaccaagttgttgcagctaggtgtgaccttaaaccaggaaggctacatgttcataggctggagcggcacacaggacggtggatggacagatgaaggacatagacctatcgtagcaacgatgtactcctgtagttagcgggtctatcccacagtcagccagcaccaaccctgaacggagccatagaccggtgcatgctgatcgatacatgtgagatagtacaattatcttcatcatccacgtcttccttccaccttcttctcaactctccgtccgattctttccagaggctgagtgtagcgccgagggcgggaaagacgataaactttgtcaccttcgcgcttaaccctaacacatcactctttgactcgacattccctcctcaccttcttctcgcactcagtcatccgttataccacaccatgcagggcttcaacaaataccatcccccggactatgatcccgcaaagcatccgactcttaacagctatcacaacaagcatgctctcggagatcgggccaggaagatcaatcagggtatcctcatcgttcggttcgagcttccgttcaatatctggtgcggaggttgtcaggctcacatcggtgcgggtgtaagatacaacgccgagaagaagacggtcggaaagtacctttccactccgatatatggcttcaggtgcaagtgtcatctgtgcgaccattggtttgagattcgaacggatccacagaacgcccagtacgtcgttcatgacggagccagaaagaaggacgaggactgggatccagagcagaacggtggctacgctattcaaggtggatatatctcctgctctttcttttgatcttgtgaaaatggttgtgtggttatccgtctcagtgttattgtcgactgacacgatatcttttctcgttctctcgcagataccgagaagccgtccaccgccgccccggacgcgttctcccagctcgaaaaaacgacgacccaactgtcgacgactcaacagcgagagcagcgtttgtttgagctatacagcctgtcctcccaaatgacctccgatccatatacactctccgccaagctccggtcgaccttccgagcggataagcgagtcagactcggaaagcaggctcaggacgatgcggtcaggtccaaatacgggctggccgatagagttaggctcacgatcgaacagggaggttcgatcgatcaggatacaagccaggtggaaggcatggacgcatggaaggcaggaagagacgagatccaaaagagagaagtcgaaagaggcagggacaaggccaagaggatatcgtcacaggacactcaatcaggggtcgagaggctcaagaaagtcgtggtggggaacacaaagaggcggttcgacccgttccaccgacctggttccacttcttctctgtcctctgtttcttcttcgaattcatccttagacgggtacacattcaaaacaggatcctcttcttcctcctcgttacggtcgaaaggtcgatcgatcaagctacctcctccgaaacggtcgacttctacatccgtctctatcccagtatctgcaccagatcaaaagtccggtgggcttgcgcttatagaagagtatcagagcgattgaacttggtgctccggggttcgaatgtttcttcccctatcctgctttcctctcagtttttacatctcgtgttttctttttcttttcttgcgttcatatccgtttgtattcttacattttcactgtatccatagccctattcatccacaatgaatctttccgctggatttctatcctctgtcaattgtgctagccgtgactctgatccgagttggccaggctgttcttgtctccgcattaccatgtaaagatcatacagacttctctagataggctgataggatccctcacccgtagcggttcgacttccgaccggtggtcggtttgaactcggtgcggatcccaatctctggccttgaccttgaccaaatggctgggtcggtgctgatccgggtccgggttgactatcgctcggaacgttgtagcctccggggatggctgcttccatgtcggaagcttgccagactatcgtgtttggtaagagacgagatcatgaacgtttgtcagagtaaacacctccgttcacttcgtcaaagcaaaccaagacaacggcataggcaaaaaatcgaacaagatagagtccttaccagtctgagtggaaccggtgttcaaattgattcctctggaagcaaggaaaggcacgtcaattccaggagcttgggcatacgtctcatctcccctctctcgaagcgtgactacagtcgaatagaacgtagggatctaagtttgttttcaaattcccatccattgcaacaaaagccataatcggaagcaaaggttttatttgagtaatccggatcccagcctacggaagaagaaaacgaaacgaataccttgagaagcatatggacgagcgtcaacgtccagatcaagaaagattgtcgatggccataccggatgagccagatcaggtcaaccgggaacaagctcagtccaaggaatccggcgaacaaccgaagcggctgatttgtcgtctgaagctcatttgcgatgattccgaacagaaacaattcgaggtctagcagatcgacagaagaaaggacaaagtgcgttagcgaaaatggttcacgatctaatgcatctacgttcaagagacgtactgtatcgaggcgttttgaaaggcgataggaagagcgccaaggactagcggaatggatcatttatcgatctcagtatgatgttcatcgaacgattgacttttgaaagaagaaccaagaaaacggctcaagtgtttccacagagatgtgcactaacggcttgagtggatagaagcttccgagtatcacttttgagtgagttttgtttattcatacaaaaaggttatgccaaacagggtcagaacaatcgaagacatcaaacaaggctagcaagcggtatgatcagcgtacaatgtgaaagacattgagaaggttgatggtaggagaacagagtagatctcagagatggccaagagatgcgctagagttggcgtccggtctcaccctggcacgtcctttctacgcgtctcgcttcgcacgcgtctcgcgcctgatttctcttcgtcttctactgtttctccctccctccgtgtctgtgttgcaaaaacggagactcttcatccatggacgacctatctgatctgtcggactctgactttccgactctcacacagttgatcaatgcagatgtatacagacgtcaggtcgattctctatcatcaccgtgctcctcgactatcaccacctctacaacaaaaccaagagggagaggcagattcagtcctgactcaaacaacatcaatctgcttcgctctcctctcactgcttccttgaaccatactggagtcaatgtatctgatatctcaccgagaagctcgacatctgtgtcgtccaatggacatatagctcggaaaggatactctggagggaaattcaaaatggacatgctgtctgattcagaggattatcgcgaggctagcagtccatccaccaaactgaattcaggtaagcgaatccctcctgttactttggtcgtggtcgactcttatcatattaataataataaactaaatccttaatcgacgattgtttcaaacaggctcaaagaattcgtcggtagcgtcctcatctgttacgcctaacgcgcaacctcttcaatcctccagaaaacggacgactcgacgacggagcggccggtgcaacgcaggcaacctatcaccacctccttccgtatcctctaaagatgaacaggctacggctgataatgatttcatatccgatccatcatcgtcttattccagtccaaagcgcctcccacaaggatcatctgaacgaaccacccagtcagacgggatatctcgtaaagattcgtgtgttcttctcgagaaaataacaagtccggcgatctctcacgaagtgatctcactactttcagaggacgaggaagaagacgcggatgaatctgaatctgaatttgaaagagacgcggtcgaacgattcgtaatgggttgggcagacaaggacgtgcccgagtcatccgctttgcctagtccaaacataacgaaagatagagaggagactcccaccaagcctggaaagagactttttgggaaaccaaaaggatacgaccggttgggtacaccctcccgttctccatctgaaccttctttcacagaaaacccaggcgctctcctatcgtcgtccagatcaatagattctcctgcgatcgtcatcgatgactgggggtttcaggggacggaagatgggtttctcgtatcgaatgaggatgacagtgttctcagatggagtcctcctccaaagcggcccagtcctatccgagggagccagcctgttcatgacttgccacgtctctcgcaaccctcaccgtcgagcgcgacgccctgtgaacctcgtccaagagcgaaaccgcgctcaaaggtagcggagtctcggtctgaaccgagcgccgtcgatcctactcagacggtgatgaaagtcaactcgaagcattggaaggcccgtcgggagactctagctttgggccttgtggacgagcttgatagaaaagtcttcaaacaagccatccgaccgtcactctgtagaaattccgaagcaaacgagcggaaagacacgtctgagttggaaggtttggtttggacagggaaactgaggacgacggctgggttgagtaggtggtgtcgaaaagaaggacctgatgggaaggatgatcgacatatatgtacggtcgaactaagtactaaggtgagaagcatatctgatgggaagacaaaaggggaacaagcaggcaacgagcggacgatgaaccactgactgttctgtatatcttaatgttcgctatctttctgcctacagattttggatacagaagaaaaagtgctgagcacgacagcgcacgaattagtgagctcttctctccaatatacgatcattatcctcgttcatcatctaagaagagctttctcctacactctcggacgaaaacagtgccacctggctacctggatattcgatggaaagaacactaaaccacacggaaaggaattcaaggcatgggctcgaaaagtcatggactatagaaccgatatctcaatcaccgttcgtcttcccttccctttccatccctctcttcgttctttcttgtctgtattacctctgtcttattgggactcatcggttaatatcggccttctttttgatgtgtgtctgtgtgcgcgcgatatagacaaaacatacgttcgagattgtccataaatacaaatggatctgcgaaggctgttccgctaggtgtgttctctcatcatcgtcatcatcatcaccccattcgtgtctgcttgaacttactcaaatatatacctatctcatccggccgcttcataaaccgaacaacaccatagttacgggagagacacgaaatctatagatccgagcaaacaatgttgtgggaaatgtaaaggtcgactggtccctcagttcaaatctcagaacacgaaccaagaccaagagcaagggctgaatggttcgaacgcgactgcctctgggtcgggatcgatgacgcctcggaaaccaaatgcttatcgaggttcgtcttcctctttctcccttcctccttcatcgttgtcgcttttcgaaaagaaaagaaaagagaaaactcgactgatctcctgaaggaccatctttctatgtgtgacccaacttggaaatgaagagttcgtgaaggagaattacaagacgacggcgagtccagggatgtctgctcctcaagtgatgaaactggtcgccgagaaatggcgagctcaacaatcggccataccgccatcacccttggcacaggccgaacccaattccagcgccgatatcaatggaggagctcgaggaaagacgagagtagaaagaggggagggacatttatccagtgttctgagggaattaagtatctgagaggacaaaattgcttaatgaaccgagtgcttgtccatccgcccattcggaatgtaatacttgtttccctctcctacccaaaacctttacacagggtgtttcttgcataacaatatgaaaaaaaaaggaaatggaagaaattctttatataatcaagatcgctatgtttactgctgcttgcatcttttgatgagaaggttgagaaattaagacgaggaaaaacacacaagcgagtcgaggtcaggatggagccgaaatatgacctcaggaggaaacacgaaagatacagaatgggggcttactcttgagggttctgggcaccggcggcgggagcagcatcgtcgtcctcatcttcatcctcatcatcctacatatcggtcggccggagaaagcgagaaggatgagcaccgaagagaaagaaaaaaagaacgatagaacataaaggaaagaagaaaggaatctcacgtcgtcctcatcgagctcatcgtagtcgtcgtcctcatcctcatcgttgtcatactccagagctttaccggtaaagtagtctgagggagttgattgaaaaagaattgaaagaaatataagtaccaatcaggccatgacaaagtacatctaaaggaaaggagaaggacaaaccgatggctcggggaatgattcgctccttgaggtcctctccgacctggtagtcgagctccaatcgctgatcgagagtctcaagctcagcctcgtcgatatctccgttctcgaggtcctccatgtttggcggggaaggagggctgaagaagctgaagaacgagtcggtgggcacggtcttcttaacgattcgagtcttgcccgtgctcttgtttcgctgcttcttggtctcgatcgtcttggtaaggtccttgtcggcgttccagttgatctcggttccctcggctcgctcgtagacaaagtctccctggtatccaacctcctcctggtagaagtaggtcttgacgagttcggtgttggtgaaatactcattcggggcaaacacaaaggtgagcttgaatccagggagatcatcctcaaggtaggaaagctggatatcggtcaacgccttgaaagcctggtaggtgatggggaacgaagcaaacaaatttgatgtttcagcacaaacaatcaaaaagacacttctcggcgcaaggaagagactaacctcctcatcagcctcggtgatcaacgaactgattccgttgtggttcctcaaagcggtcaaccagaactcgggaatacccttgacatcattgctcatgcccaagtcgacgttctcgggttcctcctcatcctcatcatcagaaccgtcggcagcctctccagcggcgacctcctcagaggtaggctcggccttaccggcgatgatgtttgatcgtcgctcgtacagaggagcgtagagtttggcaaactggaagtcgaggagtggcgatgagaatcggacggagggtttacgtatacacataaatgagaacataccttcttctcgagggcaagaatctcgagctggagcttgttctcaagcttggagtgctcaacctggatacctttcaaaccctcaactcgagttcggactgcaggaggaagactagaaagcggcagaggcgatcgacgagaggagaacggagaagatgaaggaaagacaagaacggttaataatctgttgagacaagaacaagcggattccaaggtatgttgactgcttacctgttgatgtatccggaagactttccaacgagatctccgagcttgccctggacgagcgacatgagagcggggttctgaaggtgatcatgtcgaattgttggacaggacacagaaagtcgagaatcccaaggtcagcgttctgaacagaagcaagtcgtctccaggctggggataatatcgtccaacatccgtctctggatgttcttttggggtaagtctcggtcgagaggcggccagagaagaacaaaagatggacgcatatatggctctggagacgaatgctaggagtagagaacaaagacaaggccaagacgagactcacgttggcgagcatctgctgggcggactgctcgtcctcctcctcgacgtcctcaacggtgggctttgttgagttgggagcgacgattcctccgccgacgaacgagttggcgggtgtgggagcaccgtcaacccgagaagagggaatgttcaagttggaagacatgatggtgtgggtgtgagtatgagcgtgagcgtgggtatgggcctgggtgtgggtatgagcggtggtggtgatggatggatgggtgggtggcgtggaggggtccgtgcggcaagatgttttctctgggtaggagcgttctgcattggggcaggagaaaaaatagtgtggttacgggagatcgtggttacatcaagccatcgtcactgtaaggctctgtaaggctcggttgttaagaaggtaaccaagtgtaatcacttggttcgcggggtgacacttaggctctggcgattaatatatctgaagcagaccaaactattaacaatatactttggataagaggtttcaacaagaatctcagcttgaggaaaactcttatccaagaaggcgcgagggcgtccccgttttatatcaggacccctcgcgcatttggtctgccactaaagatatacatatgacgagcctagagaggctcgagatcacgannnnnnnnnnaaccatgcaaactagagcatgatggaaaatgggcgaagaggcataagggatggagggaacgaatagcctgtaggggtaacccacgtaagagaacacgtgatacttaacccgtatccctgacagtcacggtgtttcttgagagtcagtaatgtccagctgtgacctcacgtgactaaacccgacacgtgtgcttcgaccgaggtgggacgatcttttttttggggggagaaaccgagtgggacgatagagaggactacggagaactgtagtgaattgtagtgcgctcactacggagagttctagttgagcaagcgatgtgattttcaatacaatcccggactacaagctctctaatagagctctataatagaaggacaaaagtcgtcccactcctatctcccgcgcgttttaatagagccgattgtttttttccctaatgttttattttctttccccgatcggctcatttttcttctctccgcgtattcttcacacaacgctccctccatcttttttcttcttgttcctgttcctcttcgtctccttccattgtcttctttccttccttccttccttcttgcctctagccagcttcaacagcgacgtctctctctctctgtgtggtgatctccgactgtagtgtctctctcggtcactttcacgaatcaacttcgtttcttttctgatcgatcggtcgtctttccctcaatccgtgcatacactcacacttacactcacacccacacactcaaacacgctaaataatcagatccgtctccccttcttgatctccttcggcttaggcaatggcttccttgttcggcctccggccggtcctcaaacgagcagccgcgctctcctctgctcatccaatcgaagtcatcctttctacctttgtcgtggtcaccttgacgtactttcagttgatgtacaccatcaagcacagtaatttgtacgtccgatcatctatttgtcgtgttctccttagtctctttctcttcctcctttgtctttcgcgtcagcgtggctggatttccgtctccatgtcatttcccttatttcctcttcctgtcatttgttcctctacttttctttctctacctcctttccctgtcgtttgctttccctcgccagttgaccgatcctcaggattcatggctaacatgcccaacacaaacttgcatatcatctctcttcgtccacagtctttctcagacgattagcacacaatctaccaccagctgggtcgtcgatgcgttcttctctttgggatccagataccttgacctcgcgaaggttagtcagttgaccctctcatgcttcttttctctcagtcttgtgtgtgcgcatatacccactcatagacatcttcgtacgctgcactttccctcccttagcaagcagactcggccgatatctttatggtcctcctcggttacgtccttatgcacggcacattcgtccgactgttcctcaactttcgtcggatgggcgcaaacttttggctgccaggcatggttcttgtctcgtcctcctttgccttcctcaccgccctcctcgccgcctcgatcctcaacgttccgatcgactcgatctgtctctcggaagcacttcccttcctcgtgctcaccgtcggatttgacaaggactttaccctcgcaaaatctgtgttcagctccccagaaatcgcacccgtcatgcttagacgaaagccggtgatccaaccaggagatgacgacgatctcgaacaggacgagcacagcagagtggccgccaacaaggttgacattcagtgggcccctccggtcgccgcctcccgtatcgtcattggctcggtcgagaagatcgggtcctcgatcgtcagagactttgccctcgaggtcgccgtcctccttctcggagccgccagcggcgtcggcggactcaaggagttttgtaagctcgccgcgttaattttggtggccgactgctgcttcacctttaccttctatgtcgccatcctcaccgtcatggtcgaggtaagccttttcttcaagtttcttgctgtcattttcctttcgacacgtatgctcatctttcgtttccgtctctctcacctttccaggttcaccgaatcaagatcatccggggcttccgaccggcccacaataaccgaacaccgaatactgtgccctctacccctactatcgacggtcaatctaccaacagatccggcatctcgtcagggcctccggcccgaccgaccgtgcccgtgtggaagaaagtctggaggaagctcatgggcccagagatcgattgggcgtccgaagctgaggctcgaaacccggttccaaagttgaagttgctcttagtaagtaaacttcctttgttcttctcatcattctttatctccgaatcctgacgtcggacccttctcgattcaaagatcttggcctttcttatccttcatatcctcaacctttgcacgcctctgaccgagaccacagctatcaagcgatcgtctagcatacaccagcccatttatgccgaccctgctcatccgatcgcacagacaaacacgacgctccatcgggcgcacagcctagtcatctttgatcagttccttagtgactggacgaccatcgtcggagatccaatcatgagcaagtggatcatcatcaccctgggcgtgtccatcctgctgaacgggttcctcctaaaagggatcgcttctggctctgctctcggacccggtcgtgccggaggaggaggagctgccgccgccgccgccgtcttgctcggagcgtgggaaatcgtcgattggaacaatgagacagagacctcaacgaacactccggctggtccacccgaccacaagaaccagaatgtcaacctccgactcagtctcgagcgggatactggtctcctccgttaccagcgtgagcaggcctaccaggcccagtctcagatcctcgctcctatttcaccggtctctgtcgcgcccgtcgtctccaacggtaacggtaacgcatcgaaatcgattgagaaaccaatgcctcgtttggtggtccctaacggaccaagatccttgcctgaatcaccaccttcgacgacagaatcaaccccggtcaacaaggttatcatcggtggaccgtccgacaggcctgccctagacggactcgccaatggaaacggtgccgtcccccttgacaaacaaactgtgcttggcatgaggtcgatcgaagaatgcgaagaaattatgaagagtggtctcgggccttactcactcaacgacgaagaattgattttgttgactcaaaagggaaagattccgccgtactcgctggaaaaagcattgcagaactgtgagcgggcggtcaagattcgaagggcggttatctgtaggtctttttctcctttgaatttcaagccttggaggagaggaaagtgcttcggggtacaatacaggttgtgcaaacaaaccaagagaaactaaagaaaactttcttctcctctctctcccctcgacgtcagcccgagcatccgttactaagacgctggaaacctcggacttgcccatgaaggattacgactactcgaaagtgatgggcgcatgctgtgagaacgttgtcggatatatgcctctccctgtcggaatcgctggtccacttaacattgatggcgaggtcgtccccatcccgatggccaccaccgagggaactctcgtggcctcgacgtcgagaggttgcaaagcgctcaacgcgggtggcggagtgaccaccgtcatcacccaggatgcgatgacgagaggaccggtggtggatttcccttcggtctctcaggccgcacaggccaaacgatggttggattcggtcgaaggaatggaggttatggccgcttcgttcaactcgacttctagattcgccaggttgcagagcatcaagtgtggaatggccggccgatcgctatacatccgtttggcgaccagtaccggagatgcgatgggaatgaacatggctggtgagtgcgacgagttttctttgttcttcttgtgcggaccatgttttctcatccagccaattcattcttcattccttctcggtgtttggcaaccttttaggtaaaggaacggagaaagctttggaaaccctgtccgagtacttcccatccatgcagatccttgctctttctggtaactactgtatcgacaagaagccttctgccatcaactggattgagggccgtggaaagtccgtggtggccgagtcggtgatccctggagcgatcgtcaagtctgtcctcaagacaacggttgcggatctcgtcaacttgaacattaagaaaaacttgatcggaagtgccatggcaggcagcattggaggattcaacgcccacgcgtcgaatattttgactgtgcgtacttctctttccatattcgtcctcgtttaatttcttttctgtccagtcttatgacgtctgattggttcttcttttcacccacacacatacagtcaatcttcttggctacaggtcaggatcctgcacagaatgtggagtcctcaatgtgcatgacattgatggaggcgtacgttttttgttttgttttccttctttttccatatgtttctacttctactttcttcccgagtccgccaagctgatacctttatacggtccttctctttctcatgacgagtagtgtgaacgacggaaaagatctactcatcacctgctcgatgccggcgatcgagtgcggaacggtcggtggaggaactttcctccctccgcaaaacgcctgtttgcagatgctcggtgtcgcaggtgcccatccagattcgcccggtcacaatgctcgtcgactagcaagaatcatcgctgccagtgtgatggctggagagttgagtttgatgagtgctttggccgctggtcatttaatcaaggcccacatgagtaagtctgccaccttttgataatcaaaagggtcgtggtactggtgtcactgactggtgactcttcctgtcatgcagagcacaatcgatcgacaccttcgactcctctaccggtctcaccgttggcgacccgaccgaacacgccgtcccaccggtcgattggattgctcacaccgatgacgtcttccgcatcggtcgcctcgatgttctctgggttcggtagtccgtcgacgagctcgctcaagacggtaggtagcatggcttgcgtcagggaacgaggggacgagacgagtgtgaacgtggatgcctgaactggggactcccttttcttggtatcccttccgtttttctttcggcctttgaatcctgtattcttgtccgttttttcatcttctctttctggttctccttctctcgttcatctgcaaaaacaaaattcaatcgcatcggtctctggcattccatttgggtttcaaaatcaaatcaatctctatctactatctcaaatatctttttttcatcttttgattcatttctgttgaaaactgtcttgcccttctcctacttcttatctctgccttcttgccaaagttcaattcgttgtccatctgtgcactctgatctatcagtctgtatcaagtacgctcttaaatctgtaattggctctcggaggtgtctcgtcatctcacatatggctggcgatatgatgtgtcggtttcttcccctccaacaaaggcgacgtggctccttcatcaatctttggcgcaagctctcaaaattctccaaaacggctgactaagcaaggtttccaagtactctcaaaccgagcaaggccatccatcctcaaatcaacttgtgaaaccctttgtggatagaccgtccaaaccgagctcttcccaatcttcgcctccccttcttctctctgtttcccacccgttcgagtttgtttatttgagaatcagatggaagacgatatccctccggtagaggtagatgtagaggatccgtctggtgggtctagaaagaggaagcggccaggcccactaccaatggatcctatggctgttctcacttttgatcagctacaaaagaaattcgtaagagttccttctttcccttcttttgttgtacatagatagcaataaccgatgctgatggctggcgtctgcttctcttgattgatcgacgaggaaatcttcagtatcatttgaataaagcattactcacagctgctaagaaagcccaaaagttggagagtcaaaagttgatcaagagcaagtgagaatcctggtttctttctttccttctcgttcttgaccttcggtatcagaggaccgcctcttgagagatactcgagagaaagttttctgacgtcagcctgggtttgatgtcactttaattttcaacctgggactctttggattaaacagaaacaatcctaaagctacacaagaagaacagacagacttgagctctcagttggttgacgtcaaggttcgtttcttccctcttctttctcttttctccacggacatcaagcttgacataatgcttcgacgcagcttactaactctgctcatgcttgtttgattctctctgcggcaggctctatctctcgaaccgctgatcgcgttaaacttacacaaccgactgacgaaacttcatgtgattgaaaacaacccaatcatcgagcctcttgtgccccttcccggtctgccacacgacaacttaaaaagtaaagccgcgaaccgaatcttgagttccaaagctttcgcatcagagatgagttcggccgtcatcagggttaaaggatggttgtacccagagttcaaacaggcagagcgagcaaaggagagtgcagagaagagggctgccgccgctgctgccgccgccgagttcggcggtaaagaaggaagaggaggaggaggaaataataaggaaacagggctgtccagtcggtctaccggtggtcaactcgcttcctcatctgcgctaccacccccggcggttcgtcctcgatcaccctcgctcgtacctgaggtcgaccatgtggattacgatgatagcagaagcgaaggtggcgaatactctggatcagaggatgaagattccgattcggacaatgatggagctgcctcccgagcttcttcgtcctctggaacaggttcaggttcggattcagagaggcctaaacaagcactgaccaagaaagccaaggtggaaaagaaaccaaagaagccagagccggcaaagaagaagaaaatcgcaagctccacattcttgccttcactctccgcgggttacacgttcggtggatcggattcagagccggaagagctaagtgacgacggaggcgcaagaaagaacagacgaggacagcgagcgagaaaggcgtgagttttctctctctctttatccacaattctggtacacgagcgaaccactcatggcttccttaaaattcatgcttgtatatcaatcaaatttgggaacaaaaaaaaacaggatctgggaaaagaaatatggagcgaacgcgaaccatttgaaagcagctcgagccaacggagaggacaccagtctcgagtccaatgcgttcgtcggacgaggccgtggagggttcgctggtcgtggagggtcttccggtcgaggaggctcaacctcgtccactcgaggaggcagaagagatttctctgtgcctgcctcgacggacggaggctacaacactagtgcaggcggcaggggaggttcgttctcttctgccggtcggggcgggtcttcaatgggtggtggattctcgagcagagctggcgcgactggattctcttctggtccacctccaccgtcatcatcgtcagcaggagcgtctggcggaggccaaaaaaaggcagaaggagcgatgcacccgtcgtggatcgcgaaacaaaagatgaaggagagagaaaaggcgttgggcgatgtgagagctgcagtccaaccgaagaagattgttttcgattgatgatttcactatctctcttttctgttctttatcttcttgaagttgactagatatgagtgcaaacttaagtacaaatacagagctgagagatctgctcagagtggcctatcgcaattgagagtgtgtttacgaaattataaagtagagcgaatgccgaggttcatctgatttcgtgttatctttgactttgtcgtctctcttcgataaactatcacccaagccttcaacaggactgaatgaaaatcagctctgttctcacccaaactctgttttcgccttatcctacccgctctttttgtccctcgttccatacttggaaacatacagttgcttctcgttctatcctcgtttccgaaacccatcgcttcttccgtccgtcttgcttcggtcttgcccgatcatctcaccattctcacgtctctccttcaaccaacatacatcacatctccacaagagcgtttgcttcatctgtcgttgcaagtaagatgacgaagattgctgcttgtcagatcacatctactccggacgtagatcataatctaaagatctcggagacagtcatcagaggggctgtcaaagacggagccaaggtatgtatgatcgtgattttgtgctggcattcgccttttttaaaatacccttatgactgcagacgctctaatcgagagaagttatttggtttcgtaaggttatttttctacctgaagctgcagagtgcgtttctttgtttcgagttttgtcgttgtcggccagatgcgatggagattgtgatttctgatgttggtttgtcgacctcctgcatttcttcaagtttcatcaccgactcagcgcatgagtgcttcttattgtctgctccaatttcaaaccacacctatctagttcgtccagtctttatgaatacactcacagtcggaggaaaaagacggctgatcatacgccatatgttgagccattgatagaaaggaatccaatcattagcgaaagagttgcaagttacgatcctcgtagggatccatgatcttcccgagccaggatctgctgaggacaaggaggaagaagaagggagcgagcgagtgttcaacactcaagttgttgttggaacgcatggtcagatcgtagagatctatagaaaggttcgttagaaaattcaaactttcgattgtgcggcaggcggactcaaagtcttctcgttggctcgattcaatcaggtccatttgttcgatgttaaacttaaaggagataaaggagaaacctcaggaccaaacggaccatcagaggatacggatcaaccagaaaaaaggacaggagaaagtttgagaatccgaccaggtaaaaagatctgtgacccagtcagcacagttgctggcaaggtcgggcttgagatttgttatgatatccggtcagtcaattcattctttcttcttgtcagatctctcttattccattgtataggttctattctctcaccgtgaatttcactccttttcctttactggctcgttgaacgcttcaacacgggtagattcccagagattcattcgatcttgcgtgacaaaggagcagacatcatcgcgcttccatctgcgttcactctgaagacgggtaaagcccattgggctacgctacttaaatcaatcgccatcacataccaagtatttgttgtcgcagctgctcaagtgtaagggagtttctcgtgaactctggcaagatgcactcaagctctgtctgacccgactgtttttcttttctcttttcattttttccatctttctttcttcttctgattatatattgactgttctacagaggcgctcacacatcgagtcgatcttcatggggcgagacgttagtgttttctccatggggtactgaactcggtcggttgcgctcaatggacgacgtcccggaagacgaacggtcaaacccgttaaagccagagtttgtcatcgtcgatctaaacttgggcgaaatcgaggaggtacgaggcatgatccctgttgaaggtcaaagaagaatcgatgtctacaacgttccgcgagaggtctgtgtgattctataagcgatgcccctgttttttttttcatctgtacgggagattcgtccgctgactaccagaacaatgttctcttgtcacatcatcttggttgtgtcaggtctaggattacacacccatcttgattcgttgattcatgaatgatggacagtattgttgcatcatgtgtatccattgtgttatgtgttatgtgattggcctctctcgtgctcgtttcctgcgctctggatggcatagctttcgatcctctcagtcattttcttctatttgtccacctcgcaggacagtttgctcgaatgaaaagacgtctaaagctagaaaagaacgtattgttctagtctgatcctcgtctcttcaatgcctctctctaacgacctttgtgccgctcgcgttttgatgcaaagacaaagcctcacgtccttgtcctcatccttatcttgctcggcacgctcagaacgagcataattcccacctagtccaccgtttctatacaacatatgtgcacaaccacccagagttgacctaaatgaaggtcggcagaatgaacaatgtgttgttcatgagctgctagctgacgatcgaatgttgcgggatacatgattaagacggtttattcaaaaatcatttatttactttatttcatcccctctgtatcaactcttccccttccttgcaaacaccctccctcttctctttttcatccattcttttctccctctcgttaccttttctctcccggtcgtactgtgtgagggcttctgggtgtcgcatctgtctccctgtctctctctctttgttgttcttgtcttttttcccttcttcctggaccagtctcctagagtcccacagctagttcgcgaaagtcaagcctctctggcctgaaacaaccgcccggcatgcttcccaaaaacacaggttactcgtcccatcctttgcctcaacaaccatctcagtcctactcgcctacagagaataatcagccacccagacttccaaacgtgtctgctgtatcattcacagaacctgacggatcgaacctttctcgaggtccgaacgggccaaaccggccacaactctccacgacttacagctcgaaagggccccagaagagctatacgaatgacgatgggtcgatccaaatggacgaaccagtcgcaccgatcctgtatgctgatgcaggcgcgtatgctactggtggaggagcagacttcaagaagaaaaagagtctcatcaggccagacagagagagggtcgatccgggagatagattgtttcactacagacagcatgccaagtacgtgatttaactctcttcttcccatcttcacttcttttcccttgtttggctggtggtcgtggtctcgccctttcatctccctttgtctttctactttcgttctcgatctctttcaaatacataaaactgaacaactatctaaacacgtcggtatgatgttttccttcctcgcaggaatcagacggacgtgatggcttctggtacgtagctgtttgccccgactatatgtattcagatcttcatcaagattcgacacatccttcaatattggcacctccagtacttcttttacttacttgagctctcttgatttccatcttgatttctattttttagcaaccgggaatcttcccgatcccactgcggctcatgtcaatcgaggtatgcctcagcttcgtcgaggaaagtccatcctcgctcgagaagtcacgaatgtgtctacacgaacatctctcatagaagagactcccatcatcggctacgagaaaaaaagcgggttctgggataggattgctcctggaccggtggatggttggatgatctactgttggatcctgacatgctgggttcctccgtttatcatgcgggtagttttcggtaagactctcattcacgcattcgctatgccctgcatcttggacatttgcttacctcttatacgtgatttacgcccattaaggcaaacgaacccctgaagcccaacgtgcttggagggaaaagattggtctcatcagcatcattgcttgccttatggcagccgttggtttcttgactttcggattcactcagaccgtttgtggaactcctgcgaaccgataccatggaggccatatcgagaacggatcactgatcatgaatggttactcctacgatctttccaaatgggaccaccctgccggcggggtctttaacggatcacaaaaccctttatatatggatgcttggatggccggagggatggatgcaagtttcctattccaggatgtgaacagacactgtctcgacgtcatcaaacccaccaatgatactggcatcagcgttgactccaccaatcgaaacagaatgggatggtacttcccttgcaagcttcgaccccagaacggaactaacaccgtcgatgcttcaaacatcacctcttcatatacttgccatacatcctctgttgctcgggccaattacagttcgcttactccggctggccaggtttactacacgtgggcagatattaaaaatccccaaagaaatttggctgtgtaccagtcgtatgttggaatattcttccccgtctttcaaatatctctcaactcatctacctgaccgtactttcgcattgttcttattttgatattcaacacgatgtagtaacgttctcgatcttgaccttctcaactggttgcaatcttctcagaccacttggccacctctgttcgactatctgaaatccggaaacgcgacttacaagggtcttgatatcacaatggttggaatccgttctggtcatcaaacagagatgaattgcctgatggacgttatcacgatcggctttattgatactaagaccatcggatgtgttgcctcggacgttgttctctatgtttcgctcgtgtttattattggagttgttagcgcgaagtttgccatggccgtcatctttggttggttcctttcctggaaacttggaaatttcaagggagaaacatacgctcaaaggatggctaggtccgaggccatcgagaactggacggatgatatctaccgggccgccccgtcaaagtatcggccgaacgtcgcgtctggcaaaggaggcaagagcaaaggaaccacattcctgccctccacctctagattcagcaaggctgactcaatgatggtgactgcttctagacctaccaccgcatacggaggtggaggccctaacggaggttacacccgatctaataccactagttcctatggaaccaaaggtctcctcggcgccggtcggtacacccctcctggctctccgatgctgcactcatcccgaagttccaactcgcttcctttcggtggagattcatctaacgtgcatcagtcattctcggaggcttccctcgcccaggccagctgcccgttccctttcaaccccaacgtcattcctcagccctcaatcgactatgaaccgtttggcttcccgctgatccacaacattcttctcgtcaccgcatactccgagtcgatcgaagggcttcgaactacgattgactcgcttgccactacagattatccaaactcgcataaggttattcttgtcatcgcggatggaatggttcgaggatccggttcggccctcaagacacccgatatcgtactcggcatgatgaaggatttgatcatcccggccgatcaagtcgaggcacattcatacgtggccattgcagatggtcacaagaggcacaacatggcaaaggtatacgccgggttctatgattacgatgacgatacggtcgaagtatccaagcaacaacgggtcccgattgtacttgttgccaaggtcggaaaccctctggaggccaacgatgctaagcctggaaatcgaggaaagcgagactctcagattgtcctcatggctttccttcagaaagttatgtttgacgaacgaatgacgacgtttgagtacgaattcttcaattctttgtggcgagttacaggagtgtctcccgatcgatacgaaggtgttctctgtgtcgacgcagacacaaaggtcttcccggattccttgacaaggatgacggctgcattccagagtgacggagatatcatgggactttgcggagagacaaagatcgcgaacaagagtgaaacttgggtgacgatgattcaaggtttgtgtttcgataaaaatcttttcactggatcggttagtttcatatgttgactaattctctgttcgtaatccatggtcatcgccatcagttttcgaatactacatttctcatcaccaaaccaaggctttcgaggccgtctttggaggtgttacttgtttgcctggttgtttctcgatgtaccgtatcaaggctcccaagggtgattctggctactgggtaccgatcatggccaatccagatatcgtggagcattactctgaaaacgtggtcgatactttgcacaagagttcgttgttctttttttgttttatcatttgttcgtttcggtgtacctgtcacggcgtctaacataatgattgtctcttctttttaatatctcagagaacttgctgctgttgggagaagatcgatatctttcaactttgatgctgaagactttccctaagagaaagatggtgttcattcctcaagccgtttgcaagacggttgtgccggacactttccgggtcttgctcagtcaacgtcgtcgttggattagtaagtttttttccctggttatctggacggcttttctgatcaggcggttcttcttctactctatcttttctgcagactcgaccatccacaacttgtttgagcttctcttcgtcaatgatctctgcggaacgttctgcttctcgatgcaattcgttgtgtttatggagttagtcggaacactcgttctgcccgccgctatcgccttcaccttgtacatcatcattatcgccatcattcccagccaagtcactccaactctctcccttatccttctcgccattgtgctcggtcttcctggtctcttgattgtcatcacatccagaaagattgcttacgtcgggtggatgttgatctatctgttctctttgcccatctggaactttgtcttgccgagttacgcatactggcatttcgacgatttctcgtggggagagactcgaaaggtcgagtcggatggagccaagaaggaagaggttggacatggagacaaggacggagagttcgattcgtccaacatcgttatgaagcgatgggctgagtttgagcgtgagcgccgatggaagtcaggcaactcatcgcctcgtcgtctcgacactcgatattctattgcctcgacgatggaaaactacgaaaactaccattatcacggtggtcgaccctctgcttctcaggtgtctggcctgatggacggtctgatcacccccgggggtgcgtcatctgattcataccactctaacagcaccggacctttccaagatcaaacctcgcattcttcccatcattcggagttgacctcgccaggagagtacgacggtgaactaggtttcgacgagggctcgtctcggccaggcgttactttgcatgaccagggatacgctcctcaaccatctcagtcacaggacagggtcagacggattgcgagaaacgctcagaagcggcagagcggagggtacggaccgacagcgatgtcgaatgtggcggtacccccctcgtctgggcccaatggaggtggtggtgggtacgcccggtttgatagatctcagcaataaagagggctgagccaattcagctagtcatctatttggacgataatacaccttagctatacatcagaaggatgttcttttctctactttccgccttctttttgctttcacttgctctatctttcctcttcattatattcatacgatttgtctcatattctgggtcccttgaaggcctatcactgtgtcttttaatcttcaaacgtcgttcttttactactactgtgctctctccatcattttcattttctcgttctttcaatcactagtttctcctctcattcacgtgttctgttgttgaaacttatcgcagcttctccctctttttcgctgtctcttttgttccgtgggtttctgttctctctctattctctcacagacttttgtcacggtctttttcttctcgtctcaggctatttctctcgaacattatatccatcctgacctactctagccttctctttttttcctctcttttttttccaactcctggcgttgcgcccttctgtttatcttcttcagattctcttaggcgttacttggactttgtttgtctcatcgttctcagtgtctgtctcatcttctatccattgggccagatataagcatcgttcttatctttattctgacccttcagaagatcgttgagtgatcaaaacagacggggccgacagaaggaagaggaaaacaggagagagcatgtgccattatatctcttcagtcagaacggagctctcatcgttctctccgtatggccctctcggtactctttggcaagtcaagtatatggcccatccgttcgacctttgtcctcagatacctatccaactctacacttctcgtctccgatccaccaatcattccgacaccacctttacgagcgagccagtcttctttttctttcgctcggacttctgggtggaagacgcctcctagagatgtaccgagcgataaaggcgggggcgttccggcgagagagggcggtctcgttagagggaagccatcgggtttcgaatgagggtaagactcccaactcctaggaatcatcgacactcgttctttgattcggacaccttctgcttccaacccggccaccttgtccgggttgtttgtcatcaacctgatggtttctccctcgggaccgccgagtcccaagtctgccagaattccggccgcaaggtcgtacgttcgttcgtctgcaccgtgtccgagggcgagattggcagaaacggtatcatgacccatatcctgaaggttgtaagccagtaatttcgaaaggagaccgatacctcgaccttcttgacggagataaacgatgactcctcgaccgggtatccaatcggaagtcggatcattaggcctcgatcgagtaggaagcgagatcaaccggagggattcatcgagttgttctccgcaatcacaccgttgggaacccaaggtttcacctgtgaagcattccgagtgaatccttaccaacggtgcttgcacaggtgttggttcagcagcagtggtggtaccgttactagcgagattcgatcgggaaggtcgtaaagtaggtgtagaggtcgatgggttcgatggtttccctccaccttctctcaaacgaccaacataagctcctctgatcaatcgttccatatcggtctctcctccgtgccattgggcgtccaacgatttactccttatatgctccttgctttcctcctcgtcctccccttcaccttcggatcctccgtccggccccatctggagaggatcgaacacgatcgccaggtgttcttttgcgtcctggttggatttgtacaagtgaagaaacacgtgaccgtggggggttgggatccttgctctcgcatggcacttgatctcgaatggtctggaagaatgccggacaccattagaagcagcagaacgagaagtagtggtcgatagaggaggtgaaggaacaggtgtagggattgacgatgggaggatcaatgatgttcgtcggccggcgtgcttgccgtgttgatggtcggattgggaaggtgaaggtgaaggaggcgaaggaagaaagacgatcgtccctccaaagaaaggcatcggctgaggcgtctcgatcttgcctatttccgttattcccataaaaattcatgaccaccgtttgattcgtttccaaacagaggtagaaatgagaaccaacggatggaaaaagaagttgggcagatggctgtcaggacgtttttctctgatgtgaaatgtcaacgagcacgcttttctctttctgaagacatcaggaagagaattggacatcgagccgttcgagtagcaggaaaaacaaaagcttaccagacctattcagaggaacttttgtactagaagttgaagcaggagttgaggccgagaacgagttggaacacatcggtaatggacggacggggacgactctttccggcttgacaggctttgaagacgacatattcttgtttttcttttttggccaaggagatatgtatatgagttgtctagatgtgagagatgaatgagtgagcaagaaggtgagagagccagctttgtctctcctcttttgagtcctagaaagatcgattggttgccggttggacgtttggagcgaaacggaaaaaacccggctttgaagaatgatgaataatcaccgggcggacttgtcacacctcatgattcccaggtcggccgacctttctgtgggacatttgacaaaaacatatcttttctcacttcaaatggtgtatctctgattctcttttccgttcgagcaacaatcttgagtacattttacatgtaataacgaaacaaagaacccggtcttccacctctctcgtagccaaactagtcaaaagacagtttaagctcccttgacaaagtcgactcccttcttgatgttcttggcaagctcaggaactaaagagcgcaagacgcatcgaaaagaaccaaagaacgagcacaatcagtctgttgtcatagaagaaaaaaaggaaacagatcgagacgtaccacaggccttaaggagctcctgctcctcagacgaaagctctccaagaccgtggatctcggcaacaccgtcaggctttaggtttgaacagacatcgctctaaggattagtctctagcttctctgaatgtattcacaaatctggtcacttactccgagctcaacgttggtggagaagaaatcgagaccctcgttcttcatgatgggggactcaacaaaggtgggaatgacgatgttcttctcacccttgatggccttcatgagggcctcggcgaagacggcggcggctggtaatatttcgaatgaagatgattagtaacgaagcacgtgatgtaccatcgaccagaacaagtggatgaaacaaaccctgagccatagaaagggtggcagatccagctccgtccttggccttgacgacctcatcaccaccgaactgagttcggttgacaagagctaggaaattgaaacgtaaagaatttcagtcgaggcgcttccatcgagagtatgcagaggatgaacaaacccttgtaggcctctccagagatggacttggatccctcggtctgggagaagagggggacgatggtgggtccggagtgccctccgctgaatatacccaagcaagtttagtcagaatagctatccatcataagcacgtcttatcggctttctcttctttctctttgccatcgcttgcctctattcgactttgactaccgtgtgccctctcaaagacaataatctagaaaaggattagactcacacgacagtgatgtcaatgtccttggggttgcttccctggatctcagagacgaatcgcgaggctcggacgacgtcgagggtagtaacaccgaaaagtcgcttggggtcgtagacaccggcagccttgagaacctcagcggcgatggggacggtggagtttacagggcttgaaagatgaagaaaaaggagaaaatgacgatgagctgagataaggatgagaagggtggggatgagaatactcacttggagatgataccaatgaaggccttgggtgaagtctcggcgatggccttggtaaggtctcggacgatggaggcgttggtctagaacacggaaaagataaatataaagaagtttagagcagagaagaagatgagcatgttgatggtagatcgcgaatgtcttacgttgaaactggagaacaaagaggtcgtagtgtgtcagttaagctgctcaaagaaaacgttaaagagattagaaagataaacgaacagatcatctcgggtcattccgggctttcgggggacaccagcctatggcgcgaccagaaaaagaaggatgacaaaaaagatggaaagatagagcatgagactatgcgccaatatgtatgtcaaataaatccatgagatgaagactggaatacgaacggggatgaggacaatctcggcaccggcaagggcctccttgagctgctcctgagggtatcccttaacctgtatttttttaatgatcgataatcgttgatcggaatcgagaacatcggagaaagaaaattgatgtgttcaaaaagggcgaagaaagcggacacgatgttagtgacagacacgcaagaagcaagacacgagaagcgtttacacggagaaccacaaggaaaagtatgtccagatagtgtccaggatggacaagcgaagaaaaaaaaggcacgaacggtagagttggtgttgatgtgtccgatatcggctcccactccaggagctcctcggatatcgtagagggaaagctcagtgacgtttgggttgagcttgagaagcaaagagaggggctgtccgattccacctggggagattgaacatcaaacggaattcagagtggcctaattagtcccagtagattggacaaatcagaagagagagtgacgggagatgaatagaaggaaaagaagaacaagtcttcatactgacctgcggctcccaacacggccaccttggtaaggttggcaggagtagtagagaacgaccgggcggcggagagagacttcttaagagcgaacatgatagatacaacgagatggatggtcaggaaagaagatgaaaggttgttcttttttctctgcgggtgaaaaaaagattggccgggaggaggaggcagggcggagggaatcgggagtggttacagctatggttacaaagatctatgacccagtgctgcttagtaagggtacacgtgcccgacgcgcagcggcacatgttgtcaggaaccagggttaggtaacatgtactcggcagtgtaaccatgctcacattccattattcatcatgccttccatttcgttatgccccttctcttcactttatgcgcttgataatccttctcagctatgttcccttgatttgtgataggattagtgatctgttgcttgataatctctggttgataatcctgtagtttagtaatcgagtggcaaccaggtggccacttcaccgaagctagaacccataaaaggatcgcttgcgcgctccttcaagaggggtttcttcaagttaggatccttgttaaataacctagtagttatcagttctattcaatcatgattcatcctctcttccctgagcctggaagcctaaacctccgcgccttgaacatccctagtcaactccagtaacccttcgtaaccctgtaacccagcttgtaaggctcggttgttaagaaggtaaccaagtgtaatcacttggttcgcggggtgacacttaggctctggcgattaatatatctgaagcagaccaaactattaacaatatactttggataagaggtttcaacaagaatctcagcttgaggaaaactctc

SEQ ID NO: 2616 - DNA, 6370 bp, Xanthophyllomyces dendrorhous
taccctctgaacccggaccccgacagacacagccccttacacatgtcacggtcaagtcacgtggccatggtcccggctcagcgccggtcgggcaaagggaaaactggtctgttggtcatctagcagttgatcacaaagaggaagcagagtgtgattccctccttctttcttgacagacaaggctagagggatcaagtgtacgctcaggtgagtacaaccggatgcggcctgatctaggtatatcagggagttgtgccgattagaggttggctcgggataaaaatctctgttacgcccagagacagcaagagaccaagcttgctttttctttctctttcccttctgcctctggttgtccagtacggatggtcttcagaaaggacataggaagacacagagaactatagagggtcagaacgataggacggcatagaaaggagaaaaacaggttggaacaaaagagatgggagagatgctcgttaggtataatgacatcagtcctctcttcccagagatcggccgctgccatctgttcctctgaacgtctctggctgttcctgatgacttcagaggtaaaccgacggctcttcccatctcatctccggctttatctagctatcttatacatccagcttatctcgttggctctgtgtctcctatcgcactcagtcactgacccgtttcttcctcatattcgggaataatgacaatcacgacaacctttcagccatccagcactcggtccgttcaggcaaccaaactatcggaaccaggtttgttccgttgactgagatacttacaatccgttctgttagatagatagtgtcggtctccccgaacatctttgttccccttcctttcgtgctttttcattattatctctcttactgatatctcatcctttggttctcctaagcccttaccggctccttcttattagtcttcgtctccaccgatagatctactacgcttgtaccctaatagaaacaatcaataatggaaactccacccgttcaacccacgacgtttaccgcgccagaaggcgcatacaccttgaccccgacccatttcccggctacattcttcccaaccctatttacctccaacggtcctccagccataccggccaaggtctgtaccgtcagcgtttggtacccgcccaaaaaggagggcggccttggtggtcttctaggtatcggtggtggaggcacaaaagaggcgtctggagattcgcccacttttacctctgccggggaggacgcttcaggaggacccggtggtagcagcactagcggtggagagaaggacagtttctacggaagctcagtctcgaccggagtttcctataaagcaacctccacaggaaacaccatcagctcggccggaggatttcttggcagatccatcactggcatgacttccaaccactcctccagccatccctcgggcagtctttatccgaacggcctctctggaagcggcggcaaggaaggtatcgctcatcacggattggccgcttacagcgctcatccgagaccgagaagtaacgtccgttcgacgagttcgagtttcgtcaccagagttcagacccttgagggaatcaccaagctcttggccgagcgggccaaaggtggagaggaagtccggtggatgttttggaacttgggcagagtatggggatgggtagaggtcggttgtaaagcaaaggtcggttcctcgttcctatcattgtgtcccctctacagatctctcacacgaacctatcgtcggctgtcggacgatcgactataggaacctctcacgcgtatcacgtttgccgcgaacatcacctgtcactcggttagtcactcgaccgccagaccggatctcgtagacgtctttatcgggttctctactggagatattgtgagtggttcctacctcaatgactgacttcgtcctttctatgaagcgcagtgcgttgtgtacttactcctgcacacggcatcaaccgatcgaatgaactcgataggtttggatagatccgactactggaagatactcgaggttgaatgtccgtgcaccctattctttgaatggtcgactcttgtgatcagatatcgatttactaacatcataccctattcactcatacagaaagcagggatcatccatcctcacccggttctacacttgatcccacatccagcgagcccctcccttctgtttgcagtccaccaggacgggtgtatctttgtgtactcgctcgatcgagaagatccagtatcatcatataccatcccgtgggatgcctcttcctccgttcctgttcctgggtccgacacggatcctctcggtggaagcagcggagggctatacgtgtggaagaatctaccgggcgggaaagaaggcgagaaagagaaggataaagagaaagcgaaattggtaggccgcaatccggtctgtctttggagaatcactggcgcttggtccgatggcctagacggcgacagggctcatcgaacaaacgggtcgagtggaggatcggcaagttgggaaggctctttggagtcattcgaggatggccagagtggaactcactcgaccggttcgactggttcacactcggcccgtccgtccggaaatatagggcttagctcacctgcctcgggtacgtccttccaaccgaacggaggaccgcctaagaagaaccaacgaaaaggtgggaccggatgggcgttccgagggaaaggcaaaggcaaaggagggatcacggctgctgctatcagtcctgatgggcgctcgatgggggtctgtgatgagagcgggttgctgagagtaatcgacgtttttggaaacaggtttttattaacatttcttgtccttcctcgtccttccttcatggcctgacggttattcaatgctgatgacaagcttccttacgcgttggctaaatagggtgaccgacgtgtatgccgcgtattttggttcgcttacctgtctggcctggtcgcccgactcgaggttcctccttatcggcggccaagacgacttgatctctgtgatatcgatctgggaagaacgtgtggtggcgagatgtcaaggtcattcgagctttgtcactggactgaattgggatccggatagatgcgagcccgcaaagggacgttaccgattcggaagcgttggtgaggacggcaaaatactcctttgggacttcactcctgctctcctccgaacccaccatcttcatcaccggaacgttgggtcgactgcctcgctcctctcgcccgacacgacaagagacggccgggatagcgagcgggtcaagttccatcacgcgccaaaaagaaacgacgtgccagtactacaggcggtctgtttgaaaatcatggaggcttgtacgctcacagagatccatttcgtgcgagacgcaatctgtctcgtctcccgagctgcatccatccgattcttcgcaagaccgcctgccaagcagaagagcgccaacccggtgagagggagacggaagcgggcgtcctcggcggcgacaacgacgtatggcagttatgttataccctccggctccagatctggtgaaaacggaaagaacatttctggcggagagatcagagttcattagatctctcgtgagctggttgcctccagttcctcgtcttccttccttttccttctcttccttcgatctgtttttttttgctttcattcttctcttgcacacctctttcttgcgttctcacctggttgtataatctttgatgttcagtctctttgcttctctctctcccgacgggtgggcgaatgaacccccaaatgaaatctctatataccttcccacgttccttgctacttccgctttgcctctctgtttcttatttatctttcagtttgtcactcgaaatagaagaaaaagattgttatttttttagacggaagaatcggtcgagaaaaggcgaatacaatattggacaaacgatgcaagcagacagaccatgcggagacatcaggggataaagcgaagcgaggaatagggataggttatcgtgaaggcttttaaaagaaataaaaaagaactgccttcttttccttccttcttgtaagcagagcaagaagaaggaaggaaagatctaggaggagaagcgatcacgttttatctagaagtaaaagttaagcaagaggaaagaaaacccgaacaaggaccaaggagtaagaaaaaaaacgaaagagaataataaacgaaaaatgatggaagagctggaaatatcctccaagttgcactctacgaggtgttctatctctctatttaatttgtttttaggtggaggtaacgttgatgtacgaagtggtagtcttactgttgtcggcgcacgtgaaggggctaccgacggagccagcggcgaaagcgttcttgatgttctcaaccgaggcgtaaagtccaagaacgaggagggcaaatccgacgaccatcatcatggcagaaatcatgtaaatgatcttgttcctcaaagttcgggatccgtttggcttctcgttgtggttatcgtacaaccacatgagtcccgggataaggatggagaacatggaggcaaagacggcaccaacgagtccgatgagctcgtcgaagaagggaacgacctcggcaatgacgaagcagaaggcaatgatagaaacaatcaacccaagccaggtaaaccagtggactgcggtagactcctggagatgtcgggtgcctctaaggattcgaacgaagcagaactttgtggaaaggtctgtatgaagagggaagtagggcgaggaaatacctatcgagttagttctcacacgctttaccaaagttcacagagcagacagcctacttacgagcgtagatgatgggtccggcgagcaatccaggaatggcaacaccgtaggcaatcttcttgatcagaggaccggcagaaccaagagcgggagaggcgatgtactgtccacagtagtaccaaagcacagaggcgacagagacgtagagcgcggtagagaaaagctggcaggtgaggacggcggaggtgtagcccttggggtttcgcatctcggagatgacgggaaggaaaccagcagacccagcgtaggcaaaaagaacgttgatgatagctccgagaccttcgaccaaagtgcagtcaccgatagctcggagtcgcttgtcgtaaggaccagcaggagcgttcggcggtcgatcggcaacaccgacggcgatcgttgcgatgaagatggcgggcaagatggagcagattccgacgtagccgagccaagagatctgtttgaacgtccttggactggctcccagaccgatgacaacagcggcaacaacaacaaagacgatggtgcatgttccgtgatcactgatggcgttcagggcgatggaggtggcgaggataccggaagcggcggagaaacatctgtgaagggcagagcgagaaaaggtgaaaccctattcggagatccggtcttgcacgcatgggttagaaagaaacagatacatactcaagaagccagaaaccccaaccaaagagctcccgaccgaagactccagcgatgatgaagcctacgtctcccattctacacagtacacagggaatcgaaggatgagctttgtcctgacttttccacagacgaagatgagaatgaacatacgtgtgaacaccagggtggttctgaccaaactttccaatgacgacacttccaaaggtggccatggcggcgataaagaggatgatgagcataccgggctggagtgcggcagagggaagtgagaaacttggttagtaaccgggaagagaaggcacgggaacaatcaagagaccccaagaataggattacttacaaccatgccgctgaaggaaaggagaagaaggggagagcggtaacgtttgtttagccagagagaagctgtattaaatgaacacatcatgtgcgcgatacttacagtgtgttcaacaccttgggcaacgagagaacaccgagtccaatctgttgcttcgtgagaaggacaacggctccgaaccaactgacaccactgtttgagataggaaaattaaaaaggaacacaacacaggctgagtgtccataatcggaggcgcttagctcttttcaacagggcaacttaccggaaatcaggtccagactcgttgacctcgaaaacatcgtgtgtgcgcacgtaggcggtgttcttttccgtacccttctcggtatccttcaacggggtgggagagactgagtcttcgtcgacgtcggcagcgtagacggtggaaggctcgacggccgagggtttgtcttcgaatgttgccttttccatatctagtgtatgggtatgtgtatgagtatatgtgtgtgtgtg

SEQ ID NO: 2617 - DNA, 61535 bp, Xanthophyllomyces dendrorhous
tgtgtgtgtgtgtgtgtgtgtgtgtgtgtgtcgatcaaggaaagcaatgatgtggtgtgggaatgggtgactatgcactgtgggtgggtgacaagaagaaaagagaggaccgaaaagaagaagagagagagcaccgacgttcaaataagactcctttaacgggacggaaatcatatcgcaggcgacgggagaagagctgggcaggaaaacttgatgtgccaaaaagaaagaagaaaaggaaattgaaaaaatgatagtaaagaatttgttaagccgaaaaaagaaggaaaaaaattttctttttccgccggagcgtattgactcctggatgctttgttgattctcgcccgttcagtcaatgcttgtactaagtttgtctgcctatgtctgattgtctcccgaccgctttcggtgctctttatcttactctagctctttcctgtactgtccaatcctcacatgtatattccattcacacacaaacgtgttctcatgtatacccatggacacccgtatacactaatcatctcactaacgaaccctcattcattcactctcacacacattcactttctagcccacgatggctctgtcgtggtcacaacagtccaaagacgggcctgacccttgatcacaaacagcgtccctgactgagcctgaccacgacgaaacaagcgcgtgaattctaaacacggcctcgttggtcagaaactcaatcgaccaaccggagctccgaaacgagatctgagggatttctaaatgggataaacgctaaatgcaaatagagatcgattcttcaaatacattgagcggagtctccaaagaacggtcaatattcatttgatcatgcccacatttgatcttatccctcggcccgttcggtctagatacggcctaggcacggctgagtttcgctgctgcggatagtcttttttcaccctctttccagcaccgatcgttcagattcttggcttggaatattaacaacctacgggtgacgtcaccgacttggtcacacgtgaccttcagtttcacacccggatttccatgtccgttcgatccgttcagtcgccggttacgactttgcttacgagatctggttacgttcgatcctccaaagcgttacgcacccactcacccacatagacgctgccgtcatcactcccctcccactcgtctggccagctctcatccatctccattgcatctgcttcacctcctttgtatcttgatcaccttgccatcttcaagcttcatgaacactatgtcatcaccatcatcatcgtctacactaccatcaccaccatcaggtccacctatcaagaatgctaggcttacccctgaactcacacaaccctacatcgaagctgggctgatctcccagtcagacatcgacacgttcgcaaagggctttaaacgaacaatgacctagtggggtcctttccagtcgttctttccctattcttggctgtgttcgattgatctctcaactgatctctcgttatatgatatttttttcgtccttcttccccctcttattccctcgcatagctccaccatcgggttctgtatcggttctctcgcaccggctccgctgatatttacaaaactgaagacgacgttcctccagaggctcttgatcggaactgcaggaggtgtcggtggggctgtcaccgcgacctctctcggagcctggagaatgcatcaggatctcaaggctgcgtgagtgtctgtcccatccgttcatgtccttacacccggtgctggtgatgcttacctcctcttcttcttttgaattctccttccttaccacttacacctctacctcaggggaacacccaacattggtcaacggctaatggtgtaccaggggctgatccttcatcagaccgatccgatcaagtttcctcctcctccactggatctatccatgcccaatcggaacccacaacaaggcttgggaactggaaataaaccatttcctatgccaaaatatgacgatagagtagattcccaaggaagaccattccctcagcctcctcacattcagaatgagccgtccaagcctttctctcagacccgatcagaatttgagtccgatagtgacgacacccccgatctgagggagtttgaccgggaaaaggaaagagagaaagcgttaggtatcataggtggtggaagattaggcatggatgatggtgctgactatggaagtttcggtaggtcccttatattctcgtctcctttgccttctctcttcctcttgtttactttgacatcctcgcagatcgcgcgacaaaagagaaccccacatcctgggcccttttaagatctcgatcgtcccccggcacatcctcatccctgcccacccctctctcaacctcatctgctcctgtctcagccgagttttcgacctcttcccttcctcctccaaccattccctcctcctcgcttgacacgttttcgacggcttcttcttcaagagatcgaccgatgaccgatagggagcgagaacaagcagaattcgacaggatcgtcgaacgagaaagacatgcggtcgacaccggattttcctcagctagtccctctacgggatctagctggggtgagctcagggagggctctcaatcggccaacgcaggagcttcgagaggagagagtgtttggtaaaagatggatcaaatggcgttcggtggatttaattttcccatggcatccggtcgaatgcgccatgagtgtcaactaagaacatgagatgaatcaaacggactctgagagcgcgcgtgtgtgcactcacagagtacaaacagcatgccttagacgccagatcacatgactgggctgtgcaaccatgtttaaccctagccttggatcgctcacctcttatcttttcttggcctatagggatgctaagaataaggatttcaaccacgtttttgaaacacggtgaatttcatttcttggccttgtacacactagatgaggggtagaaggggaacgaacaaaatacgatcatgtgtaacagaaaagaggagaaagaggaaagaagagaaaaggaaaattaatcggacgatcaatactgattgatcgacttgtcttctcgtatagtcccaaggttctttttgtagttcatcgttccatcatccattcattcattatctattcggatcgtcaacacaatatggataacggtccttatacacggccgactgatgtagtgcgttcatcatcatccaactcttccacttcatcttcccaattatatccttcgccatcccaatcccaatctcagattgggactcagtcgggttttcggccgtcggcggtcaagaaacagagacaaccgggcgagaaaccggcactccgccgaaatcaagcatgtctaagcgtacgttctatacatactcggcacccattcggtttgaacccccttcacatgcatcgtctctgtcagtacagaatagagaaagatgtttacgcgttctacttttatcattattattattaaatattcttcttccaattcgaatatgaatggagagtagtgccggaagcggaaattgaaatgtaatgctgttagacctacgtgcggcacgtatgtccatactttccctgtgtttggtttctgtattctaggtctgacttgaaagaagcctctcctcttcggggaaggggatatgtctgctcggggatatttgtagatgtgtccgaagtcacaattatgcctttcgtgagtttccttcgtttcgcctggcgattcacccgactgtcgtttcggatggcacaacccggctgacgaacatgttgatgttctctcgaatactctccgacgggcaataccaaatagtacataacaagaacaaacagatcccttcagccatgcctagctgtatatacgaagaagaatcgagtgtgagcacgaacttcgagcccaactcttcagctctagcctctgcttctggttcaacctcgacatcggcgttggcgctggcgacgatcagtccgacggccggccattgtgtcaatcgggctgagtcactcataccaaccatctcagaattccaagggatacaacatcaatttcctggtatctcgagcgaaccttctatacgcgagcaaggagccaagaccgacgggtatgactatcgcgcgcagagtcctacgctcacgctcgggttgacagagccgatctcctccagttggacacaccccgttcatatcacagtaccaccaccaccaccaccgttattgtcatcgtctccatcgttcaagtctcttctgcgggatatcgatcaacgaccgttgtcggaagctaaacccgatacgtttttgttgaagaacccgtcggatcacctaccatatactgaaagacccaatatcaacgatccctctccttatgttcctcccatatatcaaaaacatatcggtgcggaccaaacagtaaacccacgagaacaggtcgcacctaaactggagcgagaatttatcgagggagaatccacggggacgtttcaagaacacatctggacttcgtcaacggctgacacaccaccaagatcagccaccttcggacagtcaaacaagattgaaacaggattgatatcgataaacaatccaagcgaggtactgaatgatcaaacgtatgatcgggaaaagataaacttatcagcgaatgaggaagcagagaaagcgaaccaggtgctgatgagcttgctgtaccctgggtgtgtctcgtggtctctcagctctcttccgactcgaccgccagctgatcgggcgaccttgctgacctgcttatgacctctagctggccgcctcatctccccaacccgatgatgcttgagcacatgttcgtttgtttttcttttctcttccaggcgtgcatctgccgtgtgttagccggcagacgtgtggcagacgaaccatacggaaacacaccgaaccataccaaaccataccaaaccatacggaaacataccaaaccatactgaacgatactgacctgcgaacgacattgcttcacacagcgtggagagcttcttccgctaccttgcctccgtcgccggcatcttcaacaatggccgcttcatggcccggctgactctggcgccgagccaccatgactttccacatcctgctgtgctccatgcgatctgcgctggtcagtgcgacagcgttctatctttgcggtgatcaccttgtatttttgcggcgcttaccttgtatcttttagtcgctctgacctctgatctgcggacccttccttcctgattgttcctcctggccgtttgccacgaaccgatgttcgacccttgcagtcacttctcggtttctcggtatcgtcagcagcacgccgccagcaaacacagcgttcgacggccggaaggtcgagaagccgtggtcgaggagtctgctgaacccggtggacccgaagccggtctgggatcgactgggcccgaagcctcctggtgtgctgggcgggttctttggccgggacggggactttggtcaggtccatttcagctggggaaagttgtacatccatgatgtgagctgtttatcttgtccggccatcggcgctctctttgtaggggttggtctgttctcgtttgactgctgaccggatgactatcttgcttgtctgaacgacagtcaaaaatgtttgcgtctgagtggattgcttgtattcaagctttagtcattctatcacactgtcagttgtccacgtttccatcgttcctgttgtttccatccttgccgtcgtttcttccctaggtcatctactaaaacatcatgaagacatcagattgctaccaagaagcccgttggatagaaggtaggtgctgaaagcgagcacggtcggaacaaacgtcgtccatgtgactcagcaacatgctcatcctctttcctccttctcgaacgttcactagcttggagcatgatcggagatgctgctcagatgacgagccctctaggattgcaaacccggaaatgtcataccttctcgacgaaccctaggaggggtccggtcagtttgctaccgcctcgtatgtgaaactcctccatctaactcagatcatgagatgataccgaaagctcacttctgatcttttatgactatcatgtctcctcatcgtcctcagccaaggacgaggtcgagatgaccgagcgacagaacctcttcatctgcctctttggactggacacgctcgccgcgtcaactagcggctgggcgcctgcgatcgacctgtccaacatggtgagtggcgtgtgagagggtggtgtctctctcttttgctcacccatgctcatccatgcttgtctttgccgtcctggttgcatctacttctcctcgttctcctcgttcccgtctgcgctccgccctgaccatcagacaagctggattctgaccgcactcgcgaccgtcgacccgacacaccagccgtcgtgccaggacttccagtcggtcgacctgttttcctctcatccggcagagacgactgcgtactcgctgctagtgaagagcacgatcctggtccggcgggtgaacgactatgtgcgtctggctgcggagcgagacgtcgatgaaccgacggagacggtggagttcaagcagctagaccgatggacgactgacttcaggtgcgttgttgatgacttgcagtcgaatgacgaaagtagtgggtcaactgaagtatctttcttctccttcttgttgtctcttgggtggatcggacgctgctctgtgttttccgacgcaggtctacttttccgcctgctctccgtgacccattcagaccgcccgctacaggcgatgacggaagatcggtggacgaaactctgttgagtgctcacactaatagcctgttgtgagtttgacttgtcgtacgctgtgtttggtggagatttagttgacggttctttctttggatgttcatgaatcctgtgccgacgcttctcttgcttactggcagagctatcatacaacttcacgatccatacgtaaacaattcctcgccgacggatgggtcgagaacacgtattcaggaggctgttgaatatctgctcatgatgatccatcagttacatgcaacgagtttcgatctctcgacgatgcaccctcgttcgtacagattctcataccagggcatgctcatcttctctcatacgcaggttgttatcgagagaaacttattgagattttgaatttttgatctgagatgtctcattcggtttacctgtcgcgtctcgaactaggtatgtgtttcacgtaagtcgggtttctcgccaaatcgctttctgatattcgtacaagacttatctcatgctttttcttatcactaaaatatgattcattcgatggcgatattagatggttcatcgccgcccgttgtcttgctcggctcatcagcactagtgatccctcgcctgaggtctatcgaatctctctacggaatagtatctcagtactgctgtgagagcttctttcccatctctttttttcttctcgtttttcgttctctctctttttttgccaattcaaaataaagttaacccacatgtccatgatgctgaattgtttatcttatcaacctttactctatctattctgtgttccgggtcaaatcacggtctgtagatcgacatcaacaagcataggtactcgcttgcctgtcggattgagacataaatggatcattgaccgacttgtcgctgattttgaaggacgcatgtaattgagcgacagagacgtgccattgttaagaagaactcgggcaagaagtcacagggttgaaggaggcatgggtcttgtcttgccaatgatttttatatgggtaatctgctttttattgtcactttcatccaggtttgctataagttcatgccactcattacgtagaagtcatgaagataagatgcagaagaaataacacaacaacgaatagagtgataacatgtcaagtcatgttctattcaccacgcgaaatgacgcaactattgaggcagggtgctcactaagaggttgttacatgatccaacaaacgagatagacgagcttagtagctgcgaagaacgtacacgtacaatcattttgccaaccataatgatccctatcagacttacttctcccaggctttgaccgatctgggctataatttctcctagaacccatctcgtttccgcccccgctatcaactgagcttgtcttcgatcttcctttgaactgacttcttgctggatccgctctgagcgctaatcttcgttgatggctcagcactacctgctgatggtgttgttgttgcttgttttgagaagcaggaagcctactgaagtctgagtcatcgttcatcgtcttgaaggggtgtgtgccagacgaagtcgatcggtgtggcgatgggccagattccggtagaaatcctacagaattattgagcttgggattgaaactaggactagtatcggaagggtttatgttgatcggcgttcgaatgttctgaattggtatagtgatggttgagtcgtcagatgtatgtcatcctttcaatgaagccaaaactggacttgagctctcacacgtgaagaggataatcccatctcgacagaagattccatagcagttcgaccttgttgcctgaacgaatttgttcgtggaagacgaccttgttcagaaacggattgaatatttgaatcattaaagacgttttctccggaccctacgagaaatgttctgcgcttaagctgtcgacacgaacagaccgatagaggcgaaggttagttgatcctgacgatctaacaatcttggtagatgatgcagagatcacgcatcgtaccttgtcataattattctagattgatcgtcaagtttgtgtacaaaaattctcagcatgataacgaggactaaaagtaggaagttacttaccttaagctttccatattccctttccttctccctggactgttcaagtacgtctcgaaccttgcgcctttctgtattcagatctcgttcgaagactttgggggagacctgttaagatttgtttttttaacgaccgaggaatgaacagaaactcaactgcgaagcttgtttgaaagcacttaagacgactcaaatcagcatgctactcacaatctacgaatgacattgagccgaaaggacaagaaaggctcactttgaatctctcctttagctgcgccagatcaagaaagggagacaacacataactcgttattaagagggatatatgctctcgaatgactcaaagacgcaagacaacgtacatattgcgatctccctttctagggccaatcctctatcttggcttttatgcaacatcatggcctgatacgctctgttcgaacatgagagtacggtcccgattagttatatgcgtaagtacaactgatacatgtatttgtttgacaaacgcttcctgcgtgatttgatattgccagaagctgagggctctattcaatagaaaataagaaatctcagcaggacacgcgtttgaaatttgagttgaaagttggaagagattacttaccgactacatatttccatgatgattgaaggtctaaccagataagaaaatagctcaagtaattatcaacagcccatgacgtccatatgtgcgcttcgaataaagactcacgacaatccactcaagacagacgttctgtagtcattgcttggattgagactgcaaattaccacatcatctggttccgagagttgggattcgcctacagataaccataataagagctcacgccgctaaaaaactcgtatccatagattccgtgtgcaaagacagataagtacttacaggctggacacagccgagaggacttgaaaagacgttccgcgcattcgactatatgcagccattttaagaatataggaggtttagagatgaattggtggatcagacggcgaggttacaaagtacacttactacaaaatatgtctgcatcaggtgttttcaacatacaacaaggcaattggtcgacccgaaatcttccgtagtgatgaactcatgaaaaagtgggcttacgagagcactatatgcgcaatttcagtgggatcaaaagcgtcagttagatatgttcgacaatgattgtcgatgacaagcacgtacagtggttactacggctctgccttgttcagcaaggagctttcgacaggagcttcgatagggagaagatcgaaggggtggaaggtcaagaacaacagagcagctagtgagttgatatcgaactggaggcaaatagttgaacgtgccagcaaccatcttgacctaccgtagattgttacatctcaattcgttctctgctgacattataattgagcaaaatgaatccgaggtcagaaagacacaaaggatacacaagatgatgagtgacagttaagagaaagaaattgatggatgatattggaaagctaggaacaggccaaagtggtgaagcagggttgacagcgttttcaaagcgactggctgttcttgcctaacttcatcagtttttcatctctcagaaggctttttgaatcttttcagactttcattctgattgttagtttgtcagttcagcaatctcaacgtcgtgttagtctgaacgagcgatcatcagaaacaattgtaacgagcttgcttggattcaatagagaaacgtcgagagattgacaaaacacgacgagatccagttgtccctaaggtggtcacgtgacgacttgaaaagcaacgtctcaacagaccttcaatcattctaaccatcacaaccataacaaccaaagcgttcattcggtcagatatggaccgaggtcttctccaagcatatgcgtccacaatatcccttgcgattcttccgtgggttagctatctcgcctattctactgttttgctcttcaattaaacaagctgatgttttgcgtttgataaatacatgatagaatcgtgatggggtctttcggatctctaaaggttagtctgtgccattctttataatgattatagtgatgaccagaaatgcgcagagaataccacctgatacaaaggttttcattgatccatgttgattttgtatgtttagacatccaaacgatcaaagcgccttcttcgtgagcggtccccaagacgatcgaaatccaaaaccgacgaagaccctggatcggatgatgaggatgaggacgatgaatacgaaggtgacgtcgaccggatttcgttcagtgatgcatggatgtttccaatccttggcagttgcatgctcggcggtctctacctgttgttcaaagtaagctcattcaggtcaatatcaatgagcgtcactgatgtctttgatgtttgcatttataatagtatgtagataaaatttggatcaattggttcgtaggatggtatttcactcttgcaggggtcgttgcagtctttgaggttcgttctttcttcactttcgtgtgatcttgcgtcctcagactcagagttttccatctactgcaatacacgaatagaccagttccactgtcttgaaatggattacccctggcgccgtatctacccgactaccggagtacaagatcgatatcgctgaaaactccaagagtgagtttgtttgtttgtttgatctatatgatagagacttatccacttacctccaatgtgtctaataatatgtcttatcagagtttttctcggctactttgcctttggtttccttggcttcaattccactttctctggctattccatacgtgtatgcaactcaacagaagccttggtgggccaataacgtgtaagcagatcattttcttggcgtaacgaagggagaaaattctcgagatgatcctcaaaacgtttacttctctttacggcagtctcggattttcgttcgcccacaccgccatccaacttatgaagctagactcattcatcacgggtgcgactcttctcggcggtctgttcttctacgacattttctgggtctttggaaccgaagttatggtgtctgtagccaaagggttggatgcaccggtcaagctagtctttcccaaggatccagggatgaccggtgcccaaggatactccatgttgggactgggagacatcgttatcccaggttcgtctgcaactgtattctcttgtttcctttgtatgaattttacttatgctaagctgggtaacccaacctcatacaacacaggtatctttattgctcttgctttgcgatacgatttctctctagcctctcgtcgatgcctaccgaagcctctgcgagcatcggcctcatttcccaaaccatacttcttggctacaatggtcgcctacgtgctcggtctcgtcactaccatcggggtaatgcataccttccgagctgcccaaccggcgctcttgtacttgagtcctgcgtgcggtaagctccagctgctccgtttagtaaagttcacagaatatgatccgtcatgctgactgtatatgtccgaaactctattcagttggcgcggtcgcgctagtcgctcttgtgaagggtgaatttgccttgctctggaagtggggagacggcgatgatgatgcggaagaggtcgagcgggccaagaaactcaagaaagagaatcaaaaagatgtggaggttgagagtgatagagagagcaaggttgagggaaatgaagaaaatacagaagaaaaggtggatttgttaggaagtgcattaagcgaaggacttggaacagagggaatgcggctgagaagtctgaactgatgtaaacatacaattcggtggactttgcttgcatcttgatttgctttgcgttgattcaagaatgaatcgatgattagatcaatgaaaataaagtcgtgtgtggtcggttgacaaaaacgcaacgatgatcgaatcgattacgtgtgcagtcggaataagaaaagagaaaaacaaccactaggacgacagacacctagtccaaatcgccaaactccttcttcctggcttggtcgtcctcccatctcgacgtcatccactctattcacccggatcatcaaccgattatttgaaaggctgaaagacttccaaggtaagatcctttccaaaggttttctctcttcattcagaattcgaatctctagccgtatgtatcttcgtcggcggtgcccggctaaacatttaccgtttctgctcgacaatgatatcgtccgttctatccatctgttcaactcatgtcagattgaaactttagtagtacgtacactctctcctggtcttccacatacattcacattcggtggatcaatagaggaagccaagatcgttgaccttatgtcggtttttgaaactcctctgacagacccttacatccaagttctttacgccccgatctatcctgcatctcttccctccagacactctgggctacctctaactctcaaaacaactatcatgtctgacgtcctgacatccgcatctccacccatatcaaggtttctgctgatttctgctcctgtagtagctggcgcccgaaagggcttagagatccttctctggagggatcctgagagaggctggagttggggagttatcctcgcatggtgggtcgtgtgcttaggtggaacggagattttgaagtttgtctatctcatttatttctatcaaagaactctactcgttcttcagatagctcttcactgttttctcaaaaagagtttagatgactgattattcatctgtttatactttccagatacttccttccgccactagtgttgttaggatatctatatccgtccctccctaggctttacgatgttctcctctttcgattcaacaaaagctcttcacttcgctacttgacccctcgtccagcatctctcttgtcgaaacccgccacgtctcagacgatcctacaggcggtctcaaactactcggctgttcacgctttgctcgcccagacctggccgcctcgctggctcagtcattcgaaagaagagtgggagaatggacactggaaaagagtcttgagaagattgattgggatttgggctgtctgggtattggcaggactgatactggggccaagagtagtaagtaaaacatatgcaccttcagtacgttggcgtcgcaaactgatgcgactttccaattctcgcaagactttgggaactgtgggagcagtcattctctttctcccgtctccatatgtacatcccatccagactgcttttcaatcatcatatcacctcaatcgcctgttcctctttctttcacttctcgtcttgggaccgtcagctagcacaccaccatcatctgaaacccagctgttcgcatgggcgtggtcggcttcagccacacaggctcttttgggttcggacagtggaagaggaaggactttaggtgtaaagtccctgctaatgggtcttaggcgaagtaccaggactacgggaaacacggacggcaagaatggaggcaccgtagaatcgacaaaggaagaagaggaagagaaagaatgggaggaggaaccggtcgtgtttaggttcgaggtgatcgaaaaccagagatggtggttagctttggattggacggcgaccttagcacccggggaccggcctgtttggtatgtgtagctcaacctgttcctcttaaagcctgtatgttgacctgttgatctcccggacggatttatgtcaggtgcgacacatacttaaatccaacccccgcacccccttctttcaccctccctctggcgcacacagtgactgtgcccagcactacccggccaaactacgatgaagtccgaacggcatcctggcgatgggcagaggacgaatggtcggtcctacgtaacatcgaaggccaattcaagtcatcttttgtgcctcctaagctgtcagaaagtccaacaaacgcccatcacccacttcccgctactagtggtcaaccttccagaaaccctggtagctcaaatggtgtttccagtggaaactcaagtggatccatcacgatatcgaataggatgtctttgggcgaacaagcgctttctcgtggtctcgaaaggctcaaagcagccacaacatcagctggtccttctgcagctcatcctcctaatggatcgtcgggctcaacttctacgggcatagtcggatcgctcagcttctctaatcttaccggtgtcactcatccggggggcacaagccaaagcccgacttcccaaccgaaacgatcgagctcaatctcttccgcgctttccatccccagttcaagttcggtagatggagagcgcaaaacattgttcgcgatgagcctccagggtggaggcgaggtcttagctggagaggcgaagaacgtcgtcggaggacatgggggggcattgggattaggaatggtcgaatgcgaagatctggaggcgaggactgatgaaatcggttggagctatggcgggaacaaatgggagggcatgactgccaaaggaggcttaggaaagttcacccgtcgtcgaagatggactcgtaaagcaatttgtaccgaacacgtcgtccttgttccgtcatcctacaaaatacccgaagcacccgcccgaccgtcgatctcttcagtcgacacaaccgttccatcagcagcacccatacttgtttcccatgatccttttttgacttccgcggttacgacctcatcggtgtcgattcactctgcaacggcggcagggacgatgacgacgacagaagccggtaacaaagaagcgatggcaacgactacggctgtgaaagagcctgtcggagtggctgtgccaagaccgagggcaggatcggaaacaggtggaggaggaatcaaaggagaggtcacgaatgcaggtgcatcagcaggtgacgcactaaaacttcgactgaaaagacttgtttgatatgctcatcaagtcctcaaaagaaaagggctttcttcacataaataaaatgacaagtatgctcattatgggcactttgtattcgatatcatgattcatctcatattttgatggacaaattctctactttctgaaccaactctgcatccttcttctcctgcaccctatgcgtctgttcgtcattcgcgccgccctcctcctccctcttctccgagctctctgccactgcggcggcagcagcttcctccatatcaccttgtttgccctccgctctccggggtttgaaaagtccagcttgacgaacatcagaaacgatatcaaggaccctgttcctcgtttgagtttcttgctgcggtgtgaatgggagtcttcttcgacctttgtagagagaagaataggggtggttcatcggagagtaaggttaaagacgattaactatataggatgaacgcaagatgaatagagaacataccaatgatcgcccatgatcgagtagacgggattcttaaagcctctcgttcccattcccagccgcatgaccagcccaagctgcggtgatgcgaaaaggtcgagttttattcagagtcagcgagacctgggatgagaaaaagagaaaaggaatagaaaagagaaggagctagcgcacccagccagccaagctagataagctccatatcgaccggcagaggcctgtcctaagcttctctctacgtccaattgggatcgaccaggcgggacggtcgcttgtggaattgtgtacttcatctgggtgaacttattgctcagagtgtgcctgaagggaggatgagtagaacaacgagacatgacgttaacagaagagagaagatatgtatatcagtagaattagaggagacttgcagacaacaggggatattgatgaaaccggattcgggcgttaacgcagcaatgacagggatccaaggctatcatcggaaagcaccaacatattgagttacaaacgaatcaaggaagacggtgtcaaaaagagagaagagtaaaatcaacctactgtcatctcatcagcgtgatttccgatgaaaaacgagcccttctcgaacggcccgaagttctcatcttgacagctctcaagcaacgccgtcggattaactgcgtgtttcttcagacgatcttgggtggttgatgggtatgctgaccatgtctttctaggtcgaagctcgagaccttgtccgacgtatccttccgaggacaggatatgaaccaactgtcatgatcacagagatattcctgacttgagaccaaatatacaacgcatgggtgcgatgaaagcaggaagtacgaactagaccatttccgcagccaacatctacgaagccaccaggaggagccccccagctagctcggatatcatctttgcccttctcttcgggcaatatgagcgcctgtcgaggagttgagacagccgggtatgtatccttccagaggaggatcaaaaacgtcgcaatggcaacatcctgtgcggccaagggacgcgcgcaagtacaaaagatgagacaggttgaatagaagagatgatccagagcaaaaccgaataagaagagggagaacgtactttccagacatgtctatcatgagaaggtacgcaacttcgtcagcatctttggttattagagggagaaaaggcagtctgacgttgacaaagactgaaattgaagagaaagaaacactggaaaacaacgaaatcaagaaagaacgacgccgatcaaactaacctcttaacgtcttcctttccggctttcgattccgagatgactctagactccagatgagcgtatttctctttcaactctaggtacaagtcttggtaactgtttcgttcgacgaccgtctgcaaaacccgcatgcgcgcaaagaaagtcaattcgtcttcttgtagattttgcagacgactatcgtgaagcctctgtgaaacgcacatcgtgttgaactcttttttcatagccttcctgaacgccacgtccgtttctataagtcaaacctgtgattatgaacaaagtttgatcagaacatgaaaggaccagcgccagatcaagacacagacaagcgagagagcaagaagagactcacgaagcaaatttaggcatgtccggtagattttatgattctcgtcaatcttctttgagtcaaacagctcgacggagatcacaaggcgtcctaacgtcgactgatccggctcgtcatccttggcggcgaggtaggtaaacctgacttttttaacggctgggtgatagaacggtatatcctgctctttattgaccagacaaacatactcgaccacgccatgttgcccttgatactcatcttgactgggttctgatcgatggaacactacgagttggttgagagctttgtctcgcttgggctgccgaggaaggagccgacggacgacctgtctgaagggtttataggacagtatttgcgcatgattgggcaaggcaggaaaggaggctgggtctgagagaagagaagactcggagagaatggttgttctcagaataagagtcgaatgatgttccgggtgaaggacaaagagcgagagagtttgaaaaaactggcagagttagaggccaagagaataagcaccggtcgaagcgagtagaaatagataggacacaagagacaaacgaacgacagggagagggtaagggaccgggcacgagatgatttctacatttctcccaaccggttcatccaaggacgaggcgagcaaactggaaggcgcaaacttgtgaggctctggcagatgatcctctgtatgttcagcagccatgatgaagaaggctgatgagatttccagattctttggtcgagcaacagtaaagtgtaggaatcagaaatagctgggtatcgtgcgtaggctgcttagtcatatatacacagcaagtttcacgtgacctcctgtaaacgtcatcaggtcgcgtggcggtcggcgcgtggagagagcgagcgcgtgcaagcccgaacttaaactccttcctcttcggcgcgtccgatggagggcagagagacctgctcaaactctatgtgaccgggtcctgttcttgctcacctttctgctttgttttcaacacgtttggatctagttgagcatcagattgaatactgggtcgttagaataaccttgaagaagcttatttgataagaatcacactcgtacaacgaaagaaaggccgctctgatccgatgtattgcttgtctcgttcgatcgggaatgacgcccagggatttgacaatctttcatatgattaggctccatcgagttggggattgtgccctgtacagttccgaccagcatcgtcccttctcttcaggccttcttcctttccttccgttcaccacctatcgctgtcgttcaacgttgtcgccaccacactcataccctcctctgcccgtatcgatagctcgatacgctcgacttccttctcgagacatgtctgcttcttactcgcttcctgtcacagactctctcgctcatgatcggaactttacaagcactactcactcgtccgtaccgaccgaggagcaaagactgatcaaactatcgtctgccacagatgataagaacatcctggttgatggccgggatcaacttgagactggatccgatcctgaactcctccgaatgctccaggtcagcgatgatgagctggtaggcgatctcacgtacgagcagctcagcctgtatgaaaagaagagtgttttggtcagttgcgccctgataccgatctgttcgatacacccgtgcctgttgctgaatgtacttgtcgtatcggcctcgattcctttgaaaccagattaaccgagaactcgataagatgaatacttttggttctgctgggctaggccgctatcaggtagctcagaccacccttgctatttctcgaacgcattagagcttctgaccaatctggctgtttcccgcttccgcttgtagtggtgcatctttttactctgcgggtgagacccgtttctttcacaaccctcactccgtttctgtcttagaatattcttatctaaaatctgtacctttcccaacttcaggttcggctactttctggatcttgcttgggcccaggcatttggactcatttcaggtgccatccaacaagaacttggcattgctgattccaaaatcggagacatcttcgtagccttctcggcaggtctcactgtcggtgctttcttttggggaattgcagccgatgtaattggccgaaagtggtgttcgttcttcaatctttatcatctttgagataatattcttgacgatcctgattgtgttctttgatcactgccacaaaaaggcttcaatattacctgtgctatctcatcgtacgtactatgtcagttgcagattgatcacgtactgcgcctatatctagaaatcttctttcctttcattttctctctatccatcagtgttgctggcttgctctttgcagccccttcaaattttggcgctctatgctttctcatctccgttgtaggattgggtgttggagggtaagtcttcaactcgtgaacagactctctgggttgaattctcatcagatttatctgcatatatcaagaaatatcccactagactcggccatcgtccttgaattccttccgacaaatcgccgattccttctcgccgtgctatccaccttccagccgataggtgtggttgtttcatgtggagtcgcctatggactcgtaccaaagtactcctgtgatacatcgttaccatcctgccaaggtggcgagactccatgttgcaccaaatcatctaacatgggttggagatacttcaccatcacccttggggtcattaccttcctcatcttcgttgccagattcgttttgtttgactttcaagagtcgcccaagtcagtaactgtcctcgtcttgtttgagctttgtcttgatgttcaaaacaattcaaaatacaacttttttcaccgcttcattcagatttttactttccaaaggacgagacgaggaggccttgcgcgtgctctacaatatcgccgaatttaacaaagctcctgtaccagatctcacgctcgaggatttccatgccctggacaaggcagccggcgtacaaaatatcgagactcacgacaatacgcagactggagtcaaaacaattctcctaaagggcctggtaagtttagccattcatcatcactcatagttgtgcgcaatgtctaaatgtgtgggagctggtaatcttgcctgaatttttttttcattcagaacaacttttcacacctgaaaggattcttcagttcaaagcgcatgagtcagtgcttcttccttattttctttgcaatttatagctgcccttgttcatccgttttctttttctttttctcatcccctcaatttactctgcacatctagtctggttgactgtttctttatggatcgcctacgtacgcgtgaacaacaaacgatcttgaaatgacattcaaacaaggctgacggaacgtatatggctttttcacttcagatgtctttattcttctctttctccattgctggaggatatcttccattaatccttagacagaaaggaatcgatacttcgacgtcaatatcgtgagtttcaaggcatcataactttactgaagctctttggctgactcgtgtgttatttgtttatgctgatatcagtgtaacttaccgaaactatattatagtctgtgagtacgtttgtgttttgtctcgaattgcttctgtaagactgattggaccatgacttccatttttcgtgaacagaccttccaggaacaatcgctactattcttgcaggagtgctcatggaaatcaaatggctaggccgaaagtgggccatggctcttggaggtatgttaattatttgattgttctctcctcttcccctttattcgagtgattatacatggattttgactcatcgaactccatcgatttcattttagctggattgatgggagcatcgttgttcttgttctcggcggtcagtagcgtggctggtttcgtcggctttaacttgatggagtactttttccagtcgttgtactgtgccttgctctatgctttcactcctggtatgatttattgtttcttcaaacatcgttttctcactttcatctcttgctgatcgatccaatgggtttcttcctatttacgtcttgcgcagaggcattccctgctccgtatagaggaaccgctagcggaatagcttccactttgggccgactagcatccaccgttgctccctttgcggctggatcgatctttaaccctcgatccaatggagtgctgtatatggctggaggagtaagtaattttcgatgtctagttcctgctcgtagatatgctctcatcgatataggtccctaatcgggtgttgtcatctatgcttctctgcaacaggctgcatttgtatcgatgctctctgtggctacgcttccttgtgagttaatttctgattaaattgctcgaaagagaagtccgtctcacctgatttcttctttatttcctatcataaccattttttagtcgagactcgaggcaaacatagtttctagtagcattagctatataggcccaaagttttttttttcaataccatatatagtgccatctttcgaagaaaattacacatctcatttctacacgtatttcagtgactattcgcttgcaaagacgtgttcttatctctgtatccccttgtcgattgcattgcgtctttctgggttgacctttgtatataaatatatatttgtgagaaatcagatttattttcggcagcccgctcgtcatgcatatcaccggtctttccttcttcgttgaagcgcgtattagatcaagttccaaggcttgagacagagaattcggatgacttgaatgaagtagggtgcaaagatcgagggaggcaagcaaagagagtagagcgaaagagtttgaaggaatgagaatatgattcatttttggaagaaagttcaatgtccaaatgagagtcgagagagaggaaaaagaaaaggaatatgtctattgatcgtagagtggttcgtacattgattattggaaagaaaagaaaaaacgtgatgaaagaaagataatgaagtatgaggggggtgggttcattagtcggacaactcatacctaaatcaaccgatcgacaccagggcagaagacgatgacaccaagcatgagtgagaaagaatctcaaacgatagaaaggagcaagaaaacaaggaacctacgggcaaacaatgttactgatgtcgaccgagctagtcgatgaaccaaccactcctgtcgctttagagaccaagatcaaccgaagatatagcgtaggtcttgtagtggcgccagtagagtctattgcggcacaggcatcatgccatcgtacccctttgaatttagaagacaagggtcaaattcaaagggaatcattgattcagtctgattatatttctatcgttgaagaagaagaaaatgacgaaaacatacaagtagtctcagtagaattgacggcctgatacgagatctcaagaggcatctcaaacgtcttgagggttttagcaggaaaagtatctttccatgatcctttcccaactttcttgtctgtcgaaacatcgtacactgtcgcttgaagcgatgttacatgaacaggtaagtacgtgcctgctgtgtcggctatttgattattttcgattcggtgagaagaaaaaggaggacaacaagaaagcgaatcaagaaggacggtcagggagagcgcacatagaacatcagcaaagcggagaagaactgagggtgaaccttggagttgtactgagagaggcatcgagaaattagcaggaagggtcgagaattcgatcgaatcgtttgtagcatcggagggcatcgtgaaaggctgtgtaaccgtgaatgcatatgatggcaaacgagggattaagaaatagagcgtgatacccaagctgagagatgttgttttgttttgtttttaaacgcgaattcgatcatccagaacgagttggcggtcatgatcagcttatatagcagggagactcaacggaggggagaggaagacttaccaaatgaggaatatgaaagtaaagaagattaagaatatatgaagtcgaaccctcatacagacccgatggccgttctgcttcctatgcagaccccatggcatcttttctttcttttctctgttgaccaacaaaccaccgaatacatgtgtacatatatgaaaatctctttagcttgatcctgtcagagattcttcggccaagaaggacgacggagttacgaaccgattcagcagcatcggagctgtatcgtaccctgctgagagcctgtctttagctgaagcatcactaagttctcgataagtcgaatctcttttccactcgggagcgattggaggaggaggaggggatgttgatacaggaggaagaaacggttgaccgtcacgttccgagtacctcggtcctgcattgttgaagtctagatacatacccatacatacgagccagaacatgaaccggagcccgttagctgattctatatcgatgaaagatgatcgtgtgctgcatgttgaaccagcaagacaacgaaacgagtataaaatactactcgaacgtaccagcaaacacgtcccagctctctgccgggcgatcctcttcgtacctctccctttctgccgactgaccgccgaccaaacctgaggaagaggcggcaaacttatcaaaatcctgagaatgacgagcctcgaacgactggagcggtatcgaagcatacggttgtgaggacgacatggggctgcttgatggacggtcagataaggtgaggtggacgtttgtgaatgcgtgtggcagcgcaaaaggagtaagcgactgcggtgttgattcaggaaactcaagaaagattagataacgcatgaacaaccttctgtctagccatcattggaaagtaagttcattaaagagcggtcgttgtgtttggtacagtgagagtatgcagatatgaataactgatgagaaagcagaagaaacagtgtcctattgtacaaaaatggtggacttcaaggagaaatgaatcggtttcgcagatagtgagatagtgaaattaggcctcgtcaactgccactccccttctccatctatcgaccttcaactgagagggcatgtttccacccatcatgcccggcatttgtccctgctgctgctgatgccctccaccagggaacccttgcattcccatcatccctggccctcccattggcatgcccattcccattagattcagactcatcatcgactgtcgggccatcatcatctgttgctgttgctgcaattgggcttgttgttgataatactgctgttggagatgttgagcctgagtaactccaagtggaaggtcatcgtcctcctctcctgttcttcctcctcccgcaccgccatagccaggttgaacaagccgcagcgcaagaggcgcatcatcatcgtcatcgtcgccatcgtccctcggagcaggcaacgacgcgctccctcttttgggatggctcaagtccgaagttaactctttcttctccttcaatcgagctagaggctcttcatctgaagaatcatcttcctccctgttctgcacaagctgagaagactggatggatttggaatacggtttcggttgtattcctttcgccaccagctgactcaacgggacttcctcatcagacgaatcgtcgttgtctgatgcgggaatggatcgaacagacgaagcgacaggtttccgtacccggctggaccgcccaggttcatcctcatcgctactcagatgccaatctgccgagcgcatccgattacgttgagtgctacccgtttgaacccttgatcgagcctgcggggtggtcccttgagtggcctcttcattaccgtcgtccagatccgaatccccttgaagaatgccctgaatgtcgtccgaggtcgcgaaatccccgacaaagttatccatcggaagctgagcgattggtctggatcgaacgacaggaagcctcacgctctcggccttcgtaggggactctggcaagggagttacaatcgctttctcttggacgagatcgacctcctgagttgctgcagataactccgactcgaacgaagggttgttcacgtccaacatgggcaaagaatcagatcgtttcccaccgaagcgtttctttcgtttttgctctttaagctgattcttcaacctctcttcttcttctctgatcgaggtttcctcccgttctatcctatcggctatctctcgctcccttgattccttctcccagagagcatccacaccaaagactgatcttgttttccgttcaaggcctccagggcgggagggaggatgaagagctccctgtggatcggtatcagcggcgtcatccaggccggttcgatagctaggaaaggtaggattaaggtgaacggtttctggtcgaatagaaacaagcgtgttggacgtttgggatcgagtgaacatggcaggtcgagagtctcctcggaatactctatggggacgtcaacaagtttgaaccaaacgtcagcttcatgagcccttcatcgagaagagtgctgcataaaatgagaagagaagagagacaaaaactcaccgctgtttagatttcaaagctgcctttctctcttccaaaacttcaatcaagctccgtccgtagagctgaccgggcgccctgtagtcatcctcctgtctagccatccactgtttcgccaatatatcctcttccgtttcatctgtgtcctccggtctgagagaggccttctctccctcctccagcgcacctcccaagaaacttgccggacgctttccgtcaacgaccaacgatgctcgaaatgtcttttgagcgagagaaagtctgttgtttggaattgctaaagccgctgctgaactgacgaatgaggttgctctccctaattgacgaggtctcgtgaaatctgctgggaagggcttctcctcaacttgaacaaaccccggtctagagtccacagagactcgggccgcagaattggggtctagcggagcaggcatgatcaacatggctgggagatgaatggatgaggttgcagtagtcgccaaccgacgagtgtttgaaaaatgagccaaagacgagggcctggtctttggttttcccggtcgtcgttgttgacgagtgtctatttcttccggtgggtgattattctcggatgaattttgaagaacagagtctgccgaagatttgataagctgagattttggatcaaaccgagaggctcgtccgcttgtgggaggtggcaaccagctctccctctccctttcattctcgtcggcgtcgtactcatcctcctccaatcgagcggcttcagtctcagctcctgactttcccttcaagttggacgatcgagtccgagctctctgtctggcttgggcgatctcagcttcatcacctacatgggatgatgacagcagatccggcgtcatcagtccgatctcgtccatcagactcatcctcgacggcgctctctcctcgttctctcgatcttgaccttcctgctccgtcggcgatacgtccaggagttcctccttgttgtcagagtggtaggaagacaatctaaccctggagtcgagcgaagcgcgagacgatcgctctcggttgtgtatgtggtctcctgtcaagctcatccgttcagaatccagagtagacaggtccgtttgcacaggaacaggttgagtttgagacgtcctggcgagcatgttgagttccgaatttgaaccgcctgagagaggtcgacgtgagatcttttccagaggagatgtgattccagaaagagaaacttgctcccagttaggagacataccccgctcttggaatttagagagactcgagtcgtacgaggtccgggaagataaagtaggaatcgtttgagaagtcggttgccgagatcggttaaagtctatctcatcgctggttgagggggtgaggaactcgagagaatcgctctctttgttctcagcgggttctccaataaaaacagcatcaggattcaagctcgacacaggtggtagttggggagaagagacagaaggtgtccgagtgctctctcttgtctcagccctggtagtggattgattattatcgagccgcaggacacccatctcgttctggttgagcgaatggccctcattgaaaacgaaagcctcccaatcacccatacttcccgtccgagatttaggatgagcacccattcggcgattcatcgaaggcggatctccacccaatgatcttgggagcattgatatggactctctcatcaaggcagcctgcgtaggtgacatcggcgcttgagacgatggaggaagggcttctttttctcctgaaacaccaaacaggaacgaagaacgtcgtcgtttcgccttcgtcttggatttcgtatttatgattgactcatcaaatacgggcacgttgaaaggagaagtataccgttcgggcaaaggaacactacctggtcggtcagaagcaagatagttgagcgggatagatgtcatggaaagcgcagactcagacccttgtcgatttgactgatccaagaatgttggagaatgcacgggagctatgtgagatagggcttgagaagaatgtggtctggaagggaccatgactgatggtggcgaaactatttcgaccaagttctcattcgtcgactgttggtgttgatcctctgttgacacaatatcggtctcgatgttccgtccccaggacccaaggagagtagacttcggtcgagtaggtttcggctgttgaacgatctgagtgatgggttctttcctcggtgtcgtggcagtagatgacggctgctgtaacgggttggacggagcgtaagacgttgtgcgcgaacgggatggggttgaaggtgagccctctcttgctaatgcttcagccataaagggagaggccgaccggcgaaaatccataggagtcgaaggtgtaggggatgtttgagactgtctctgatgaacatgcacatggagtattagtcaaatttagagaatcatatggagaacgttcgtctctcgcgcattcattgactacgctcgcacgacagtgcacgtatcttccatccgaagacaggccggacgctacaagggaacttgaaatgaactcacttgttcattctctatctttcttctttcttcctccgcctgatattctcgtattctgtactctcgctcctcgttctctttccattctctctccagttgatcttgctcccaggccatgctcttccgcttgtattcagcggtgagatccttcgggggttcctgtggggcatttcccctgatgatggctgattgagaggcatgtttgagctctgttgtgtatgggttatcgttgtcgtattctaaaccgatgacacaagacgacaggatgagaagaacagattaggaggaataaggagagatcaggaacggaaagaacatggagtaaaatgccccaagttagtttctatatcaccaagcttgagccgtccccaaaaagatcaaggatgtgccaagaaaggacgacgtttgagggctcgaaagagaagaagatggcagaagaggacaaacctataagtgctgctgccagctgcactctggacagaggaggggccatagtcgattgatgtttgtctctgaaggaacgagaacttggtggctagaggaaggaagaccaagtgttgagctcaatcgagatgggtaagatgttgcccggcagatacgcattccgcagtcgatacacctttgcctgctctgtttggtgaatcacttgcaacatcgcccggttgagttggctggctgggtggcttgcttggtcctctgaccccattcccaacggctgcgctgtacatccgagaggtcctttaatatatacatgtacggaggaaggaatgcgtttcctagccaacacacttgatggaagaaggcgtgtagatgttcattcgaatcaacaccaactggtgacgatagttagggttacaggcttgagtgtgtcccatcaacagattcgtttcagcatgacgagaacgacaaggacaatcgatcttaacttacagaggacaagatgatggatgttcgtctccattgtctcaagcttctattcatcctccatgcttgtccgtgtctctattcgtcctttctttggacactgctctgatctgagtgtctgagcagtatcattctgtactgttcattggcacaacgttctgatagatatttctccttggaccaccaaaccaacatgcctggcgaacaggccgttgtattgaacatgctcaaacgccatcgcaagtactatatacgaacatgtgcgcataatgttcccatcgatctgactggcttgagaagcaaataggtgtgagcaacctaggcataccttaagtaaaccatatacacatatacgaatgtacagttatcatctattatgatgtcaccatttttcctatcatttgcttggactttggtcggtcgactgagcaataccatcatcccatctcagtttgctaccttgccttctatccctgatctagagtgtatcggattgcattcagtgtgaggatatcgaggacagaacgacagaacatacacctagagactcgtttcggcagtaggtgtctttattttttctttcttctctcgcttgttcgcttgctttcatcattctccgaagcttaccttctgggttgactgcgtgtgatgttcttgtcgcgaacagatacacaccctccttcgtcatgtccaacccatctggatacggagatttagctttgggagcccctttggcaactcctctgataaggaaagacgaacatccggatttctttcctgctcaagccccacttctgcaatccacaaccgtttctaccgtcgcggacgtccccaatctgaccagcgagcctgctgctgctgctgcgacgacgacgatgacgacgactgatatcaagaccaccactacagagatcatctcagtcgatgcctcatcttctttcttagatcgaacctcacttgctacaaatggtcacggtgttgatggtccgctttcctcggtgaccactaatctccaaccatcctccggccactcgacagccgatcacattgaacatcaagcgctcgctaccgaaaacacagacgaggctgctgttccgtctttgacctggaacttgcatccatcggctgggtccatagccgctgatcatgtcgaacaccaagtggaacacacagatcctgagcccgcgccttcacttttgactcgtcttgcgccttccgctctgctgccttcttttgcttccgcctcctccaccgaccaaatctcactcgatcagaagctagcactcaagccggatgggcattcaagttcgatcaagacaaactcctctcgggataccgatagtagttgggtcccttcccttactacccatcttgcaccttcttctagccctctggctttcgatagcatcgagcatcaggcagagacgacaggacccgtctcgtccgaagacgccagactcatcccttctctcaccactcatcttgcaccttcttctagccctctggctttcgatagcatcgagcatcaggcaaattctcagggtgggggtttgggggatggctcttacttgcgtgatcgggtatctacccagacaattgaacctcccatcgttgccattgtccctttcagaaaagaaatctcaacccaggatcctactgcttttcaatcaagagggccattcgttgaacaagaggcggccgttcccaccagagattctaccccttcttcctctctcaacgtagtacaaagagagaaagagtttgtctctgttactcccgtctcaaccgttccgcctcgtcaagctccggcctttagcaacgctccccccaacaacaccgccttcgtatctcagccagatgtcgtggtcgtgcctactcctgtagtatccagaccgaagaccccagaggcgtttgccgctatggagcctcgagaacgggtcttaaccaagcctaacgtgatcgaacaggctaacattcccgaagacgaacgaactcctcatactcctgaacctgaagagacgttgcttgagaaactctctgcctatttgcccaagccgaccctgtcggagttgaatctgaccgctgctccgcctcctaccaccttcccacctccgcacgagcagtcggatatcgataggctgcatcctaaggaggcgttgcccgctgtgaggccagacgtggtgactcctgttaacgcagaggagagagatagagagctcgagaaggtcaaagccgcgaagagagagcttgagggtcacagcccccagggaacggtcgtgatggggttggaggacgaccagctgtggtcaatgcttagaagatttgatcgagttcgtctgctcttcccttctttcctatttttgagctttgttcatatatcgttgacgctagtttcaatcgttttccaaacttgttcttttgactctgggaattaaagcaagtcaatcatgctctttcccctcctcatcatcttccagagggccagcctgatatgcgacggtccgttctgccgacggtgccctacaactctgatctggtcaagagcaacttggaaagatgctacgggaccgctggagtcagcggtatccgatttttcagggagatggctcgccttatgagttgggcacctggagagcagaagagaaccggtgcattctgtgctgtgagttaatcggtcattctgatgattatatactaagcgcaaaaactgatgttcacttgctcttatcaaaaggcttactttaccgcctggatcttccatcaaacgactcccctcattcttctcctattgatgactctcgttctctatcctccttctagagcatacctcttcccacccttacctcccccttcaggccaacctctgtctgctacagatccaacgaatcggcggggagatgaatctctggtcgatgtctcacatcctcagaaacatcgatcgaagcacgagcagatcgagcagcaaagtttggagtttacgaaaagcatcgagaaacttggtattcgagttcttctcggaagcaagcacaagccatcccaggctcagatggaccaggctgagaagatgaagaaggagggaaatgccgaaggggacatgtatggcattggtgatgaagacggcgagaacgagaacgattcgaacaagtcgggtcaggtccagaacgggaagggaaatggtgagagcgagaggaacagggtcttgaaagcaggaggcacgttgaaagagtcgaaccagaaggagggagagaaggcaaaaggagaacgagacgcgcagatcggactcgcagcaaaagcattccaagatgcgttgggtgatttcgcagatgtcatggagatgttcaccatcgctctttctcccctcaaggtctaccctcccaatcatgctcggttcaagatcgccttcctcatactcttccctgctctgataatcactgctgtggtcccatctcggatcttcgcccacgctggctcgtttgctcttggttttggattctttggtcagccattggtcaagaggggaatctcgacgtttgtctcgcttgtacctgactggaaagaagagctagatctccgaaagtgagttatttgtaattcattctatatcctttattgctcatcatcttgttcgggcgaatcggtatacggattctcagtttactgacgagggtcataccatctggttcgattctgatgtacttagctcgatcctatctggcgtgccaacaaacgttcagctcactatgtacctccttcgacaacgagagctcgcccgaaacccactcccccgacctcctcaccctgtcacttcacctgaagcgcaaaagcagctcaacgatacgtcccttatctctgaagcgcatgaagaaaattcggtttcttctgtcggatcaggtaccgaaacccacctggttggtgatggtaagcacgacgaaaaccagagcgagagaggaaagaagatgaagagtaaggttgtcgaggtcggtcagaagatctcggccaaggcagctcttttcagaggacacggtaaggtcgctgtccttcccgatggtgagattccaggctcgaagtcctccgatgaggaaaagaaatctttgaggactcggctgtctaaattcttggttgatcgggatacgctcaaggacgaagggagcatctgggcctaccctgcttcctacaacaagacgaacggccacttgatcatcgaatctaccgatgagactccgacgacggacgcgacgatcatctttgttcccaaccggtctcagaaaccgacagtgactttcccgatcgctgacgtggctgaaatcaagaagggcggggttggtttacctcgatcgatccttggttgggcggccggcatggaccttggaggtactggcttagagtttagagtcaaaaagcacgaggcaatataccaaggaaaggagatcgcaccaggcgtgtatgtcgacaatgtttatttcgaagatgaggctgagagtgagatggatggtgaggtctatcagtttgaaaaggttggacgaagagatcagtacgttccctcccttcgtcttgcagacgatatgcgccttgctaacgcctttcaatttcttttcgcctttcgctcttgttttgtttcgttttgttttactttgataacatctgaacagaatcttcatccgaattctcagtttggccgaacagaactgggagaccctttaagacgacggagacgacatcactgtcatttcctccaaacgatttgaatctcaaacacgcttcattcattcagtttagttcccttcgaatgaatacattcgaatatttttgttttactttattttgatatctgatcaactagtatatatccctagttgtcactattcttctacccttccttttgtgtcaacagtcttgtcttcctacctttgtgattttatgagcatctttgttgagccctgttgaatctcatcttcgtcgtatctatacgttatgggcattttgaacatcgtatcgtacatttaatagagcacgaccttagtcgaatgactcttgatatacgcgcacagactcgtataccgactatctcatttgaaatgtctctgtgaatgtatctaactagacatcatatgaagctcaagacatgtagaacaagctacgatgcattcgatgttgagattgcagcgtgaagagcgaagacgatgatggtattattatcataaatctgatcagacactaccatctcatttagatcacgcctctcacctctgctctccctccttctgtccatatcctttctccgtcgatctgtctaggatggacaatactcttccacccgcttcttcagacgagactacgagtgatccaacccgatcggcaccccattcagggaaagcaaattcgccgacacgacctagtctcatcaagtcctcttatccatccaaccctgctatcccttcaccctctccacgctcgcccattcagatgactaaaggtctacccaatccccctgggtctaacaagaacacccagtcctatcctataaatgtcacacctcctcttcctgctcctcaacatcactcttccaaatcgacttctccgatcggttcaccagcaaactcgttcctgacgccttcaaatccaccagtgacgaatcctcttgcaggaggagctccggtggggatgtctacatctccagaaagtgtgtctgtacctccaacaaaaccaaaggtagatatcaagagataattctcatactaggcaacagatataaaaactcgaagctgatgaccaaatcgttggacgtattatcgtggggattctgggtcgaataatcgcggtgtttctttgcgtttattgtagcctgttcaatatgactttcgttatgaagactcagatacgctgatggctgagctccaggagttcttcagctatcaggaggttcctcaattcgagtcgaagctagtggcgtttgacgacctatttaaggaaggttcgtgaatactgctctcagttctatcggtcgatggaatgggattcatgggagtagtactgatgatcttgctatatcgctctcttcatagattggctagagagctcgatagagaacaggcgcgacttcgttcgagagatcttggctgggttgagtgatggcgaagacgagtctcaactaaatcgtgctcgttgtctggcgtatatcattgaaggtttgtgtcaaccgtcgtctgtctgattcaacacagaaggttgtcatcgtcttatcatgtatttgattcattgttcgaataatactcttttaggaactttcaaggaaacaacaagtccagagcatcatcttcatatcatcctggagaatgtgaaacttgtccgtgaggttgggggcctacaaaaactatacaatcggctcaaggacgtttcggatctgcaagcggaactcatgtatcttctgtccttctcttgatatttatatagccagcctcgaaagcaattgcctgacctttttcacacctctgttccttacatcaaatttacagttcgttaccagatagcgcgcctggtagaggatcgagagggccatcacctgaagtaccagaagatatgtcggctttgaatgtcaaaattgggctttaccttgaaatcatgtacttcctcgtcgaggtcacccgaggagacgaagagctcgctgaggaattgagtgagttgtccttcttttctctgcattgattcagagtaacagaatttcatgttgacaccagcttctacatctgctaatggtagtggctttggatcccccacttccggtcttttgtcttcagctgcttggtagactgaaagatcagaatttgagagaaaggcacccgaccggctaccctatgagaaaggttcgattctatactccattgtctcatagtattttctgaggcatgcacttatgatctttttgtgaattgatgcgtgctgtcctgattttagctactccttcttacttggaaaagcattctgacttgcatgggaggcttgcgggatgctcagaaggctgctgcgctagcaagagatctcgctggccttcccccacccaaagatgactgttcgttgatgtctctcgcacttcatgaggtagacaacactctcaagtcactcatcatctttgttttgttccgtattgcgccaagcacagggctggggtttactaaagcaacacccactgaccttcttcaattccggcgggagacgtccatcaaatacccaactttctctcctgaacaataccgtgaaggttcctccacggcaaccgccgagaaattggccgaagcccttagacccatccctacccgacctcactaccatgctcccttacgagatgttagagcggatgattgcttttcctcccttggccgtctagacatcacccatccaccttataccccatatacagtgccgaacatgactgcagcctccaacggaacaactgccacgcctgctcctactcctccgcccagtccgaaacccaaaaaacaacagtggcaaactgaccagctcaaaccgttcattttccccttctcgctctctgcccatggtgaccaagttctcgttccctcggctgtgaatgaagccgacaagctttacaaggaacatatatatatccctctggggctccaccaactctggaaagaaagagaagaatacatcaaggaggacattggactcggtgagaacgggatccttgggtttggagtagaaaaccggacggtagaggaagaagatgaggaaaaagaggaggatgagaagattgcaggggatgcaattatcaaacagtttagagagaaagagagagagctcaagaaagaagaagaacgggcggagaaagcaggagatatcaaagctttgaagaaagttcgggagaagaggttggcttggaaaaggctggatagagtcgagatgatttacgtttgttccctcgtatcttacttttgctagtgttgcacgtggtagcattaacactgaccatacacgcacttgaccgatgacaactttttctataatatagagaggtgtacttgccacagccttaccaagcaccgtcgttgtcctcctgaagcaaattttggcttcactacctcctcaacctgcagctcccccactaaatggctatggcaatccggccgtgtctcctggcgcaccggacggagattatgattctcgtaagtctcaaacttgacgaaatagttagactttcacaatactcacatttaaattggttatctgctcttttctggttgtgtttctgtgttatttagctacaaatgcagagcctaaacctccaccaacgttggcagagatcgatgcaaatagggagcgagaaatcttgtcgaaatcggtttcagccatcattttactactgctcaaatggttcaaatgctcacgttagtaatcctctagaaatctttcaattcatctcgtttgtactgacatgagtattgttcaatgtgatgatatagacgtgttgaaatttcagcatctaagtcagttattgttcgagatgaactgccccctaattattgttaagactttcctactgcaagattctggagatatggtgcaagccaagaacgaagacgaggaacacaagtaaatccgtttcacaacctcatggtttggttgaacctttttttatccgagactgactcaattcgtttctttctattactgtcatggagcttcttcaactactgccatcaaaacttttcccaacacgtccagccttctcagaccagcaacatttcctctaatgaatctggtccacgacgcgtcactactcgaattggacagactactgctaataaacatccgggggcgccaatggaagaggaagtcgaacttctctcaaattactcttggagaaatttctttggatctatcaatcgaatcaaaatcattcaaaaacttctaaaaggccgaacacagcaaatccaccaattcaatcagtacaagacatatgtaagtcttcagagtctccattaatgagctgtttgacgctgacattcatgttcggggtatcatttatcaataagggaaccttcaaacgagccctcaaagtccagcacccaatgttccaacttcaggtgttaaagatcattaaagcgcagatccctcattatggtaaaaaatggaagcagcgtcagtattcatcttcccctgtcatactgattcagccctaatgaaatgttactcaaatccataacggatctacgtggtaattcgcagaaaacatgaagatcgtaacagctatatacctcaactgccggccggatctgagggacgaatggctggtcaatgttttagaacaggatgagctggactggtctgctgttagttttcctgacttgtctctccgaattcttgtcttctcttcctctgactaacaccactgtcctggatgaccgacaattctgacatgattaggctcaagaagcggctcttcggtctcttgcccgcttctatcaccacaagcattactcacatataataactgccgcttcaggtggatccataggcgctcacaaaggcccttctgtcaaccaccccgtacatatcaattcggatcccaatggtcctccgttctcctctgattttcagatatatcggcgagtatcctcctctgctggccaaggaggtgacggtgaacttttcccacctaaccgaagtcgaagatcgagcgctggaacgatgccgatgagtccttctaaaagcccagaagacttcctgaatacgtggaaacatgagtacgaggacgttctggaagatgtgtttggagagggagatggtttcggaagaggaagtccatctgagggtaaccgagcttggggattaggcggtgggtggggtccgctaggaggagccatcagtcatctagatttaggcgagagctggagatctggggaagacggttggagcgatggagagagtagtgtgggcactatcggagatctgggagaaagagccaggttggatgatggagagggaagccagagtagcgagagagaaagagatgatgatgaggtggatggagaagaagatggaaagggtgaggaaggagacttgattgatgagaacaggaacaattgggaggttagtgtttgcgttctctgcccaagactctggcactgaggctttatgtcgaacgccttgctcatacgtttttcgttctcctcaattgcaacctcattatcgcagcacttgtcctctcaaactctgtccgcaatgccaaagtcacctatccatcacccacgacgacgatcttcgggaggctcgcctctcaggcctgtcatcaaaggaaatggtatcgatggaccagaactcagggacgatgaagaagaagaagaggaagagttgggccctgctccaaaaggtcctggtggaatgggtgatggaggtagtgttgatgaagtcgaggtatgtatctaacaatcttcttaacctctcttgcttgatgaactttcctcattattacggctgattgacacaattccatcttgttatgatgaactagtttatgtatggagaatgattaacctagaaagatatcacgacgtgctctgttcttgtagagcaattcaactgacataagttcattaaactccaagtgtttttgatttactattgtattcatgacacctttcaaacgaagaaatcatttaaaatcatcacagaagacattcatctgagaattgggaaatgattcaccaaccattcaaaatgactcatatctataatctacagtttggttacaggggcagagctagtttctgcgctgatctcctcggagatgacttcagatgggggctgatcttccgcctgcatttccatatcttccatttcaccgctatcctcttcttcagcaacaacttcggtagttgacccctcaccgttcccgttctgagcaccccggaacttttgatcatcactcttcgccgtcaagagtgattgaaagccagcgctcgtctctgttttcgtgacctccctcagagccatagtagcataagaactcgttccgatcttgagtctaatttgcaaagcaagaaacttgttggttccctcgccttcagcattctcagcagcagtaggaggaggatctcgctcgaggatttgatcctcatcagattgagcaagattgacatcagggtctgtgtagggaattcgggaccacgaaagatctgcaggcagagctaaaatctttcggtaagaaccggccaagtggtaatccctataagagacggaagaaaagaaacatgatatcggacgaacgccaaaacagttagtcgagatgctgtatgtcaagaaaagagtcagggaggaagcttacttttgctttttccagcattctgtctcatctagtccatcagccctaaggtaatcaacaaacatgtctctcaactttcctcccgggagatcaacttcaaatccaggaataggcatgataacgtcgaatatcgtccagggatgtccttcgatgaggtcctcggcggtgagagttttgatgtttccatctcgggtcgttttccagtccattcgacgcccacctctggttcgtttgattgaagcagaatctgtgtacatgaatttgaaaggaaagtcaaccaacaagaaagaagaatgagcgatgaagttgaagcaactatgcttcgattaacaagcgcatatggagaagaacagaccagcgtcgttctgcgtcgcttcctcagcgagcggagtatcttcctcctcagccaccacttcttcgtctggaaccatgactagatcaccaacaacgggttgatccgccccaaactcacgaattcgctccgaaacaatgatgttccagaggaacgattgataggcgtgcacgtagatgagtcgaaggttccgaggaatctaatgaatagtcggaccagatcagaaagtttgaagacgaagtacgatgacaacagcaacatcatcgagaacagaagaatgaacgtagatcaaacgtacggcaagtagagcctgatggtaatccctctcagtgacaccatcctgctcctccttcttgaaatactccaacaatgctctctcggccacacacctcttggggaatagcgccaaagccttatcagcgtccttcagtccgttccagatattccttgcagcttctgcatctgggtgttctcctggtcgtaccctgaggaggaggtcgacagcgagggcataatcctcttggagcatagcgagaccaacagagtgagtagggatatgtgacgttccgaatcgttgcataccatagtagttgatgaaccctttgtttttgatcgaagtcaatgcgttatcgatcgtggagggttcgtccacttgaacgtttctgttgagggaagacgaggtcaatcaagacatatgaaaaagacatcaaagtgagcatacatagaaagaactgagagacgcgtgtacataccgaagggtgatcaagaattcgtttcccttgagcatacctaattcaaggtactttggctcgtagcagactgaatgcgaaacgtatttacgtcatcagtttttgcgcataaaaaagaagaagcctatgacacgataagaacttacaatctccgactcggacacctctgtctcctctctccttcaaaacatctctcatacttcgatcaccatccctaccgactccattgattgctcgccatacatcaagcatggatcttcttcctcgcttgaggcagactcgttgagtagtgacacctcgtttgtcttttgtacccgcgacggtgagatcggatgagttgcactgaagcgttcgggccatgtgagcgagcgcatcttgggtatctcgattggttttatgcaaagtaaagtggatgaactgaggatgggatggtttgcggactacaaagttcaaagaacgatagacggaaagaaaacaagatattgaacaggtttgtcaatgacctatgcatcataccaagtcaagcgagataagaggacaaatgaatatacgaaagaaaaaaaccaacctcctcggtaatcactggtgctgcgacctgagctgcctttggagaacttgataatgatcggaattccttcgacagcttcattagccttttcttcttcggtcttgtccttctcctctttcacttttgtttcaagtgctccagaaaagacggttcggattgtttgatggatagcggttcgggcggccttgtctaaaataggaagtgtaatcactaatctgggatcttctgggccccagttgttccagcctccattctgtccgttctgatctcttcctccaccggacccaccgccgcccctgccgcctcttcctccacctctaccgcctcgccctcttgcaccgcctcggccgccgccacttcgacctcttccccgacctccacggttgttatcccttcctgagcctccccttaatcgaagcgcctcttcttcgtttggctcattggcaacagcaggcgcaggagcaggggtattgataggcctatccgcggaaggcgcactctctggcacgaccacagtatcgatcagatcttgagaaggaagactgttcgcaacttcagtctgtccggatcctgccgaagcgatagatgcgctgaccgcagttgatccctcaccgtcgttgttggcttcttcctcctggtccttcttggggccccatccgctgtccgactggccaacaaatgaggtctcgcctccgtacccattgggcttggttcttccggccgcatcagactttttgaaagtaagctttccctctagccagagatctctcacttccgttgtcttttctactccgagtaaaggaataaggatttgagaaaacgtggcgggccacttggagttctcctcgaacggacagacaatatccttcgatgctggaggaagctcagcgaggtaccctttttcctcaagtgtaggaggaggagggagaggaggttcgtggggctgagtgatatctttcaaatgaatcgtctggccgtcctgtcctatctcgtagacgaggaaatcagtgaacctgccatgtgggatatagcgtcgaatttaagccagggttgttagtgctactgccgaacaaacgtttggtacgattgaaatcgatagaaccaaacttacctttgcttaatgataccctgaaaaggcttaatatctctgcctacatactcgagaataccaacatcagtctccataggtggccgcaaggtagtatcgattgacctgtcccctctgtgaaggaaagttgaaggtggtaggagggatttgagcccatcagcctcgatctttgccttcttgtttgtctcctgaacttctggagtatccgagggcgagagcgacctctttggtgttgcctgtgtagagtccatggtgggtgttgttgtatatgtgtcttgctctgagggagcgctaaagatgatgggtgtcgagagaatttcgagagtcgcttacgtaaccgtcaccaaaacccatatactctccttctcgtccgtcactctttccaccgtcctcaccatcaccccaagagcttctcagacatcgtcccgtcggccaggcttacacgctagcaatgcttcatctaccaaagccatcggcatcatcagtctcacaccaaactccgctggaatcgcttcaccggacacacacatcgtcatcctctcaacgatctccttcgccgccttcgtccgttgccgcatccaccaatccaacttcacccgcttcctcctgggccgttcttccgaatggagcaaacagacagggcgctttatcatacatgcctggcgcagtgcatcgggaacgaacaaatgcaacaccaaggccaaagcgaaaggaactcaaggttgagcgtatgagtgtacaggtgtgtgaccgtctgcttcttgagcattttggtctgcttaaaagttagaagaggctgatgacgatctctcccgtacatttatcaggagcttcaatcgacctgggagcgaaataagacagtcctggaagataggttaggcttttttgtgatgcatactgatggcctggatatacccacctatctataaacttggcaactgtcactgaccgtttcatactctgtgacatccctatattcctacttcaaaagatctatctttcccccactctcttcctcaagtcccccagatccgtttcaaagtaaactgcttgctatacaatcttcacttgagcaccggatttccctccttaccacccaagaacagttttccaactccaccttgtcccccatcacatcatccgaacttacgtcacaagatccaatgtcgtctccgtcctcttcgtcgaacccagcgttaacggcatctacccctgtcgtctcgacatcatatggcgcacgtcgtcagtcgatccaccggtcccctctgtcgttcgtccttccgtcttgttactcatccttccatctcttgactgacattcatccttctgtccctcgtgacagcccggtcacttgtgcttcgaaacgaggcttggttgatccgatttcgatgtccgaatcaatcgcgcttcaatcagacctattcaaacgtgaaaaggcccgagaagttgcccgagcggccgaaatggaacgtaaagaggccgagagattggccataaatctagctaacgcgccaggtagatcggggaacaagctgatggatgaattggaaagaatcagagggcaggctcggatgagagctttcatgtttgttttttccttccttccttgtagtcttagtcttttctgctcctattctgcttgctaattcgttctcatctttgatcggagctctttcttcatctatacaggaacccaccgattccactttctcgagaaccattctacgcagatgactctgattgtgaagtatccgacggcctgacactcgaattcgagaatgattctgacgaggcattcgatgaaggggagggataccctgactatgctgatgcagacgacgggacagatgggaacgggcaaggaatcatagtgatctcccaggaagagatcgcccagaattgggcaacagggaatgaaggtcgttgatctccttgatgaactctatcttacctcttttctttttgtttattcgtttcttctctatcgcttctctggttcttctgacatcatttcgattttctgtcttcttttggttgatgctgcatccacatcaaactctcccctcccttgtctcttctgtcatcttttccccttgcactcttattcgaggtctcgttcaattctatttcttcttgatccatctctccaaactgaaccgttgttgcttcatgtatttctatcatgttctgatttgtcctgtcctctcgtcttctggtcttatctgccgtccaggcttcaccatggcgtgtattctcaataatgacgcatactcgagtacagaaaagaccagtcgtcaactgagatcaacataaaaagaaacgaacgaaagagaatctacaagaaaaagccgagcgtgtgtcatgttgttaaatcacggacatgcactatccttcctcctcctgttctttcacacgttccgtccccattaacatcctttgaccccaaccagtgaagactgaaagcgcaaggttgaacccttagatcaagtaagggaagattgctttcctaccaggcgggcactctttgccaaattccttcttgtagttcttcttcttcttgatggcccagatgaccatctgaccgaccgaaacagccgtaaagattccgcctagagttgaggaaaatacaacagacatcaggttggttcatgaggatgagtagaaggaggaaagacagaggatttatcaaaaacaaaaaagagcactacgtacaagcgaccgagccagtcatgatggttgttccaatccaaacgagggattcaaaaaggtaattggcgctataaacgaggtcaaatccgtaaccagttgggatggatcgtttcttggttccggccggtcggagcgatcgaagggtcaaatgagtgtacaagttggacgcttgagcccactgtgatagatcagattaatttgcagtcggaaaaagattgcaatgtcagacccgaacgtgaatagtgttgatgtttggaaagaagcgaacgaaccatgatgaacacagaccaagcggtgagccagaaatccgagtttcgagtagcaccagctagcttgtaagctgagttccaaggaccgtaaaggccaagggagagcaaaagtccagaaaggaggtgataatgggccgagctgtgtttaacaacatagtaatcagtgtcatctagacgatcggggaaaggtagggttatatcagaaccaactttttgaagacgttaaagaaaggcatggtggcattggagaaccgatgaacactgcaatggaaacattccaaatttgtgtagagaagaaaattcagctcgcatttcagtcgactaggacatgcctaaagctgtatagaaatccaaaagacatacaagagcgtctctagttctctcttgatgtagtgaagcataatcaagcagaaagcagtcctatcatcaagaccaaaggtcatacagttagatcaagcttccgactgagacaaacgtagataacagaaataagaagacctacttctgcatcgcgctatgttcataaggcacaatctgttccccaagaatggaaaagatcgttccaaaaatctgtcgtccgtagaagaagaagagtgggtgaattacgagaggaccagcctggagcaagaggaaaaccgaaaataaacgcatcaaacttgcgaatcagaaaacatttggagacggaaggacattgtaggcaatcacggatgacacttacatattcaatcaggaacactgtcttccacgagatctgtcggcctaggtccttgagctggagcacatcatcctcggtcacgccgtaagaaccgatggacttgtcatcatccgtcagaacgacgtcagatgtggttgtcaatctttgtcttgtcaggccaagctgaccgtgtgatgtgtaaaaacgaaatccatcagcaagaaagctagagaaagaatcaaggtatcaaggtaccaaaagagcaagaaaggagagagagtaactgtcaaaaggatgagaacaaaccttggggaactttgcctggatggacttcttgacctccttcacagttattttgtcagaatgccttccaggaaaatctatcatgattgccggcttgggagccgaggtagatttcttagaaggacgagattggacggtgatcttgaccatctagttttcgttaacaaaagaggtattttaggtttgcttttggtaagtttcttctctcggatagtgtgatgttcgacacagcgagttccatacgacaaaaacaacaggaggggcactcggtattctgggaggagaatgtaagaccgaagacacttacagctaggtgttgagattggggtggggtgtgatgaatggttgaacctagagggcgagcagagcaagagaagatgaaaggtcgcttgacaagacgcgtcattgggatcaatatcatttaataaatcaaatttcttagataatctctgcgcattgtccacaaacgaccacagagatttctcgcacgaaacacacaagggatgaatgaacatatatagaataggaagtcgacaaacagctgcgctcatatatataagagttcatgtcacagcgagagagaggaagggagatgtaaggaaaaaagtcagaaatgaagcgcttggataggcgacgatggaagcgaagcctgcaaggtatggccacagaaaatagagggaataaacagagcaatgaacagagggacatgcaaaaagtctaaaaagcgaaaactccaagaacacctaggagagcggaaccgactgccaaggatagtccaacaatgaatcctgaggatatgagagttttactactatgactagttacataaagtagcgtgccattcccggccgtgccagtcggaagaggagctccactcaaagtggttgcgaaagcaacagaatcttcaagagcatcgttaacggtaatggtcggaccagctgcagtggctacggtggtggtggcggtggctgtatgaggacaatgaaaagttcaacaattctgaagacacacatagattctggaaagtgatatacttgattagacataccgttggaggcaatcgtgaactgggaagaggttgcgaaaatcttgatatgacacaagcgctgatgtcaacactaagcgcacgcgtgtctcctagggtgcaacgagacaaaaagaagaatcaagaaaggaaataactcactcctccttgccaagtatcaccaaacgtgagtctaaaaccactacctgttggtacatcgtctccaagcacgatagcaatcgaactgagtgtcggatcaacccgggtggcaatgtagatattttcttgctgagaatctgtcacaggacgatgcagctagagggaagaagaggcggcttcagtttacgttgttctttgatctgaatcagaaactcagcaactgcttacgatcacgtcaaacgaaggagcgacattgtcactatcggtttcccatccggtctgaacgcatgagaagaggattagtagagaaaaagatagtaagtaccaagcattccatccaggccaagactatataaggtcttacctcccaagacaacaagttggtctgtccgatgacccagacttctgattcagcgggtgaggtgatagctgtcgacgagataaagattggaatgagcttaacttgaacattcgtctattagaacttaaacaatgtcaagaatgatgcttacgaaaaaagccctgaacactccaagctgcgaaagaaaggcaaaagctgaatgaggcacaatccaattctacaaaactcaagaaagccgaactcaccggcagcaaatggagccaaagagagcacgaaagcccagacgagaggaagcatgaacgagcgtatgtatggatatcctagagtggcagatggaacggagagaggagtaagatgttgccagtctgggtcaaaagaagagctaccgaagatgaaaacatcaagaatcgtctgaagcggtgtcttaacgctgagcagagaatcttcagtgacagacggatcgtcatatttcttccagttgctgcgccgccagttaagttagacttagtcagaccttagccagacctgacctgatccatcttgaatcagggttcatgggtacacacagacaaaagagaactccaagttaacgaaagactcattagcaggatatctagtgatgggcagcgggaatcaatcaaagtggaccagggtcatgagagaagtatcagctgagcgacacatatcggaagccaacaaggtcggatgcgcttgaaagtctacttgtgcccaaaaagagtttgacggattatgaaaagaagaaggaagagggactggaagaagagatactgggatggatgtccaggaggaattggactccactcttaaagcatcagtaaatacgcatatagaggccgtgggcaaagaggagataccccgatcaacagagctcgggacgctacttgcttatttgcatggtggctttaccccgttactcgggaaggagtcaattgctcactcgcttgttccgattttcatagatgagacgttaaattgaaatggtcgaacttcaactcagacaatcttgacagattccgtctttcgatatctgctgcttgaaagacgcgtgtcaggacaaacgggaaatagacgtgtctattcaaccatatatgagtattcatagtccatattttgacaacattacagcgcctcgactcttctaagcaactacgagatgatattagaacgtgacaaaaaccctgatataatctccctcctgaccgagattctctgtgatttacaatcctcatcggccttccttctagttgggaggagagatgagggctctttgaagatcccatcgaacacgatcagctccaatgtcttgataaagaatacaaaaatgttgatgtctcacttaatgattcccttcccatccttccctttgccaatttttgtgtcgttgaaggcgtcgacggcagaagcaaagtcgtatcggtgagtagcgagtggcttgagatcaactcgaccctgaccaacgagagcaatggccatcggctgagattttcattcgacagtgcagcagatcaatcagaatgagcggtccgtacaagagtcagctttgatgattaagataagaacgtgatatatatgttcagagaaggggaacttgcgtagtcaccggctccgtatcggaaagatcctttgaaagtggcctgcttcaccgagaaagcggtcatagggatctggatactaggggctcccataccgacctgaacaaacacacctggaaggacataaagagaaggagaaggagaagaccattcgttgttcacagcatcagatcaaaccgagacgtttaaagtgcctccgagcgaaccaggcagacttaccagcctccttgaccaaaaacattcccgactgaatgcaaacttctgcacccgaagcctcaataacgatgtcgaccgctccgaaacccttttccgggattccgagagatttccgtatgtcctccgtgattcgcttagaataatccattctagcctcagctttgtctgtcggaacgggaggcaggtagacatcggtggcggcgtatgacttggcaaagttcagccgatcctgattgatatcaatagcaatcactcgagatgctcccagggctgattcacaatgaatagaaacattaaacctcgaagcatataacggaaaaggaccagaaaaagtaacgcgcgcagaacgaacctttagcaacggcggagcaaagcaagccaacaggtccctgtccgtatacagcgacgacctggcctgccttcatgttcgacaacgtggagagagcatgaacagctaccgacagaggttcgatcattgctccatcttccattgacatcgagtctgggattttatgagcaatgtctgaagggagagcgtagtatcttcccagtgttcctcctgtgaatggaggagtggcagcgaagaccatatccgggcaaagctacaatatacatcggaatagagacaatatctagctcagttcaggaatcttcccgattatccagagcattctgaaacaccaaaatgagaacgaacctcgtaggtaccggacttgcaagcatcgcaagttctgcagctcactcccggctccagagcgactcggtctccgaccttgtgagtcttcacggccgaaccgaccttgacgacaattccggaggattcatgtccgaggaccatcggctcgttcagaacaaaatctccaattcgagcgtgttcgtggtagtgtacatcctgtatagaaagttcaaagagtgctcgttgcggttatacatcaagtttgaaaaaacagagcatcagaatgcgaagagagcatggcactcacggaaccgcagatacctaacaaaccatcaagaaattagtttagttacagaaaaatggaggtgggaaggccaaaattgaatagaatgtccttagtctgaaacaagtcatccggaggaacaagggagattggacctaccggtctttttaatctcgatcaatacgtccttgggtccgacgtcaggaataggtctttgctcaaagacggtatcatgaatcctaacagcaggcgatcgaaggacaagtattctccagtcaacatacagacacgtcttgcacacacacactcgaaaacgtgattcaagcaaaaacaaagaagatgacacaccctttgagaacgaaacttgggttatcccgaagtttcgtcgagaacgtttctcctttggatgtagtggccaagccttgtgcttcttgtgtggaggcctcataagtgttggaagcagtgagttctgagtgatctacgcacatgatagcgataagagtaagtgctgaagatatggatgatgtcggagagggtgatgttcaagagtagaaagaaagaaagaacgaaagaagaagggaaagaaataccccaagatggaatcaaggagatccagaacaagcgcggcttaagtagaagatgagagttgagtgtgactaccgcggagaaaacctgcgcggccgggccgaccggagatgtttgcccaaacaggaaatactctttcgtctgccaccttagcaaagcatgtatcgtattctgaaatcacatcatcataatcaacggaaagaaagattctacaagcaacatatatgatgatcatcggaacatttctcattcagtcttcccgaagacctacgagaaatttcagaaaataaagaaggtgtcaacacatctcgaataagaatcgaaagacagaccatcactgcttaccttgactcgatcctcgatgggcgcaaaagtcttagtcttggcaggcgcgacgatccctccgaacggcatcctatcatatgagaaatgaagaaacaagcaacaattgaacatgaatggttgttctttctcctttcgacgattgcagttcaccacttaaagacgagtgaaactcactgagatttgagaagccacgactcaggcaacgaccactcggccgtcacgttctctgaaatcaagttggtgtagtgctgcaacgaagctccgacgttgtacgtcgagagactcgtccacacattaccctgcaggataccagacgattgctgtgcattaaagaagaaaaaaacggtgagcgaacggatggcatatcaatctggatgagcacgccgggtgcatcgagaagacgtacatcactccagattgggaagttggccgcatacgccgggaacctatcctccatattatgtacagactctgtatcacatatgaaacaatgtgtgaatgtcagtcattgtagtgagaacaatcaaattggaataaacacgactggactgacgttggtcttcgaagaacaagatcgtgcctgcgcctgctccaaaagagtcaactttcgatttggtcgcgttcttcgtctcctctacatattgatgttctccagatacaaaagcggtttcccaattaaactacgctgcagtaaaacttctagtcgaaagaaagataagtaggacgaaccatcttggaagcctttcttggccagcgcagtccacacaaatttccacagcttgtcatgttgcgaaccaaacaagacgaccgcccttccactctgactgttgaacgtagtaggagtttgtaaacttcgagtgaagaatgaacaaacagatgagtaatagagggtcagagtcggtgattggtccaaatttccttcagagcaaagaaagaaagctcacgtagcatcctcgacaactttctggattgtttcttgagaaacaccttggggaaggacgttgttgatcgcgtagattgaccgccttccttgaatagcggctaggtaggcggcgggcgaagctttggtaatcgatcctagagtcatgtctcctttatctaaattttcggtctgggtctgattgttgacaacgccggtgaaagtgagaagcgattggacgagaagggttgaaattgaaggaatgtgcatcttgatgcctcagtctgtgttgctgttttatactcaatcgagaagaaccaaggtctacgttctagtaagatgaagaagacaaagacgagatgagtgatgatttgagaaagattgataatgcgaggaagaaatagcttatctgatttctctcatacacgtcaaatatcgtcatgatggtcgaatccgacagcgggatttcttctcgccggacatttcaccggtcatacgtaagcatcacggatacgttttaatagctcaactctcagtgtctctcgtaagagtaggtcaaacaggatgcccatgatgaatcagctatactttccatcaaagtctctcggtgtgctcgacgtccaattctaatcgtcttatcatatagaaacaatacaaacaacgtctctacaaagaagattccacaatcaactttttcatccacactattcagaacgctttgaaatcgtgagcctcacaatgaagaagcttgattctttagatcttgcttgccccaccgtcaacttcttttccaaacccgatcaccttctttttcgcccaggcgctggtaagaacaccggcgatggcagtcgcaggaggtagcctaaaaggaatcgacgacgaagctgtcggaagctgatgtttcttttcggcctgattgatcgataggaaaggatgttatagacggtcatggatgagagattgaacaactgaggcacaagacgtagattgaacaagaaaaaaaaacttgcatcaaagtagctttgctcagttcggtttatgaccgttccattcggatctgcaagtatagtcagtagttcttgcctcgagaaccaacgggcgtcttcgagctcgttatcgagatctagtcggatcgtttgattctcatcagcccaaccaaaacagcccaccctattatgtgcgtttacagtcaaaaaaaaaaagagaaaggattgtcggttgagccatgggagcagatcattcgaccttccacaacaagactcacatgagattggctattcacgtggatatgaatgaagagtagtaagagaaaagatcagtctaacgcctccataggagtatcggttgaatgtatgtcccacctggataaggccagggctggctcgaatgatctatgtaatcgggcacaatccatcatccttcagctttagcgctaattgagacatggcgatacactgatacgtacacatgacctcgttgacgaccacaccgctctcctcatagacctcacgtctgacggcctcctcgaacgactctcctggctcaaggaacccagcaaggcaggagtacatcccctttggccaagccttctgtctacccaataggatcttatcgccatcgagcgagatgatcgccatgatgactgcacaatcagtacgctgatagacgactaactagttagtcgttacattcgtctcttgaaggcaaagcagacaaagatgaagacaaaccggatagcagtgattggtcaaactttttaaagacgggcatgccgatgaattctcaggcgtggcctccaacgctgtcgagcacgagagtttccagccaccccatgtggaatactgtgagatttatacagaataagaaacgaaagtactggtggaagggagaccaggaaagtgaaagggcacggggggactgaccacctcgtttccacagcctgcacaaaacttatttcgactgttccaatctaccatcgatctcgccaacgcgaacacgcctgcttcccatggcgcgaaatgaacggctgccgccctgctatcaacccactttcgttcgccttgtttgaggaagatgcgatccatcaaactcggcccgtcctctccgagttcttgctcaagtccggtgacgtcgagtgcaaagatcggagggttttctttgttaagcgtcggatccatctcctttgtcatcaacgtctttgagtgttcactctgattcttttcatccgtccccaagaaaatcaattttggggcttttctacctgaaggtaagatctgagcaccttgtagatgtttgatagttccggcagagtcatctttatagaacgggccgtctccgaggatcggtcggacgtcctgccaagaaagaaaggtgatggactgggtggattgggtgataagtggctgaagaccatggaagggaagaaacttagtgagagggttttgaaggtgttgactgagcagggaggatgagtgtctttggaagctgagcctgttgagcgggggtgcacctgcgtaaaagttgatgtgattttcgcccactatgggaagatagtgatatgagaaaacaggatgcgagttatgttcaattcaactcgagccgacctcattatagacaaagaagaagctagacacggactgtaagataaatgaagattggaagatgtagggctcgttttcttgagttgctgtccgaaagaaaccaaactagatctcatcggttttcgggagcgtggatgtttaagagcaaacgacgagtttgagcatccaatcatccacacgtcattgtcgttgaagcccatgaccgcccacacccgatagcatgtataatagcaagtacggtagcacattcagccctggtcgacctcagcatcagcatcagtatcaacatcaacatcaacctcccttggcaaaaagacccaagagtcacattgcttacgatacgctcctccaaatcgcccggacgccaaacctgaaagtgttcgacgtcggatgtggccgttagtcaggtcgcatcgatgatcatttgcgtttgatcggatgcagcctttaacgaagaaggatgtctcatgttgtttttttgtttctcgtttcgtgattttatagccggtggagatttgattgagttgttgacaatgggagctcgaccgagtgatctcatcggaatcgacctcgagcctcaagtgagttgggcgttgtgtctttgtttggctttggctctgacttctctgcagacctagtcaagttctcattcataacacacagttctcaaagttagcttgcagtcttgctgaagcaagaagtctaccggtccctccgttcgagtttgttcaggcagatgttggtggattgttgccatatccggctctctccggaaggacgttcacgcctggcaccatgagcggaatcatatgttatgttcgtgtgtttcttctcaatccttcacatgcacccattctgcatataatcatcctcattgtccattcatttgacatttgctcttggttgtcggaacagcggttttttcacttgcatcctccagaaactcaggaagctctacttcgctggctattaagtcttctttcggtcccctcatcgtcttccaatctttcgggatgtcctaccccttctatattgctcggtctacagagatcattaccggctagagcagcttccggatggatacccatctctgactcttccccttcctctgcttcttcctcaagcgacaaggagatccactgggtttactcgtctagcgactggcacaatcttgtggaatccagcgtggatgaattttcctctcagatcagtcagtcagggcgcaaagtctcgtttgggacagaattttttcctgggctcgaaggagagagaagaggggcgatggagtggtgggtgagagtagatgttgggtagttgataacttcgttcatcttggacatctgtttcgatctctggttcttccaggtttagcatgggtcgatctagatgggctctccagtccaatcctaggcctgaaaagtcagactcagccacagttgatataatatacgtagttacatagattggagatgaacaagaatgtaaaaggaataaagctgagaacaaaacactggaaagaaggagtaaagtaaagcaaagacagatgagagagaggagaaagagtcaagaacgaacatgcaaaagagaggaaagaaaagattcgtccatctcgactttctttctattttgtttgtaacctttgtcagagaacgcgctccaaaaatataaagaaggaagataaataacgatcgtatatggtgaatgaaaaggaatgctcgaagagacagatttcgattacatcggactacgtgtcacataacgatcagcccgtttggtcttgtgtatgcgctcgaagaggagaaagaaaccgagacttacaccatggcagagaacgagctgatctggtaggtgattttcctcagcgagttatagtgctctcctaatccatatagtcgactatatccaagataaaagacaaaacaatcgggcccagttagataaattggtcagaaacaagacgcaagaaaaggatgagatctaaccgatggtaactgatcctaacggctttgatcttcctggccgacttagaatccaaagtggcttttgcttttggatctggcgagtgagcgacgatctttggatggttggattggatgacatggatagggatttggtagtacctcgagagcgccaagatctaaagaacgatcgagagcccggtccgtcaggagcagccaactttgaacaaaaaaaatgcaggaaaccctaccactcacctcgggctcaccaccccactctgtcgaactacggacccttgcacaatacttttcgaatcctttcgcggtcatcatcccatcgtccgtcgcgcccttatcgtcgtctgtttcctctggatcaacaacgccgatgagaaaaggcatgaatgaatccggatgggcgagcatgtagtctgctgctgctgctcgggtggtccgaggctgaatacgatacaacgaggcctccgaggtcaaaactgtcctacagagtttgaacacgatatagatctactcacgttgttctcatcgtccttgatctttttaagttgatatagctgaagttggacaaatcagaaaagacgagctagttgtaagccggaacgtctataacgagaagagaaccaaagggacaaacttgatcggcgattgctccgtaaagacagtttccgtctggggcgatctacggaaaaagaagaatgagacagggatcagttatccaagcacagcatctctggacggaagtcggaacatacatcgtagatctctactccgagctccatacagatctgcagaaggtgtgctcgctctgcctgtttcgctctatcgatcttcgcttgtggagaaagttctggagcaggtattggcggaggaagcgaagctaaggctagggcgccttctgcctttggctatcgagagtcatgaagagaggaaaagcaagatttgtcagattgactatgcagagaggagggaaaagggaagagttttgtcttgaacaaagcacacacatctttgaattttcgactcagaccgctcataaatccaccacctgttttaccgttaatgaaacgcttcttgccaaccccgttcccattggcaatggtggcaacatcagcgattccactcaacgtggctgctctaatcgggggataatctggcgcgggtggcgagtgagtatgcccttccgatcgatggacgtgatgatgatggtgttttgagatcgggtgcaccgagtcgccgttatatgagccgggagcaggttgtatggttggtgaatggacatcagaaggagccagattctgtagtgccgctgctataggcgcctccacctctaccgtgactggtggtgtcgacgatggagttccaaatggattattttttcgagccaaaggcatgacctcaggtggggtgtctaccagaatgataggggttgaatggggcgcaaccagagggatgggtatcggagattcgatcatcgacggtgggaacgaggatgtgacagcctggacgggtttgtcaagcgctccaaccgaatctttttcctctgcttgtttcagaagatcatccccatcgggcagggagtgtgacacgttcggatgtccatttgattgagggatcgctgaaagtgcgctgctcaagcgggcggccggagccgctcgctcactctccgaaggctcaatgtcgatcaattgatcattttgttcctttcctgttcctgattcccttggtgctactcccactctcggtctgtctttaatggaagaagcggcggacgaggtcgcggtgtttccaaacaaaggcacccgaatctctctctctccgtgatcgtgatcccaggggtcgtgtggatcggcatgaccgttctcgttttggtctcggttccgctctcgctccaagcttgacgacgtcgagacagacgagaatgaggagacggaagagttgtcgaacgacggcctggcgcttgagattccgggaagggtgttgactctgaagagtgagggcatgatcggggatgaggtgtttttagcattcccttcaaccgggctgactgacgatcttgcgattgtttgagagggggagggtgacaacttttgactccctcctcccatgcctgtcctggagcttgcttgtcgaactctcgagaggaagcctccagaggtcggtggagatgaagatccgacgggaggtgactgtgacgaagcgtggactggactgggcccatccccattagatgccgaagaggtgggtgtatttgaaccagatgtcttcctcagatatgatgctcttttgaacatgattgggaatatagatgggaatgtgggagtggatgcaagtatggatgtgaatatgaacaggaaagagcagaactgaacaacgaaacacgataggtattaatcaagtttctacggccagaccggggagatgaaaggttgcaaggtctgatggggtttctctcttgatgttttcggtaatgttcggtcctgttagatggaaagacaccggtacctctggaagacacagtcaggcaaaattccaaagatgaacctggatgtaatccgtcgaccaaaagagacggagaagggcctatgggacagtaacgtgtgaggaggtgacctataggcaagagcagagagtacaaccgacaacaagaggatacacaaagaaaaaaagaa

SEQ ID NO: 2618 - DNA, 4862 bp, Xanthophyllomyces dendrorhous
aaaagaaaaaaaaaaaagagggtcggccttggatgtgtgggagatgaaagagaaaaggatgagcgaagttccaatggaggacgatcggcaacggcagccggcttgacggtccgacggtccggagtcggcaccgatcacacatcatgaataacatacacctcacccacagcgaccacagcaaccaaagcactcacgacaatacgcaagatgttggactcacagaacacgctgatctttctgtgtgatatccagacgacgttcggtgagttctcgaatgtgtctttgtattgtggttctttttttctctttttcttctcgaagtgtttcaagactaatcgatgggatctctatctcttgtcccttcacctgtccatcttgctactctccgccatctcgtgatcaatatatcatttgcgttctcttccttcgatcaacctattcaaataacccagcaaaggcaatcgatggatgggataatgtgatccacaccgccaggaaactcgttcgattcgcacaggttcgtaagagatccctcgtttcatgacacatactctttctatccatcggcggtactaacccccacgttctatccactttgcagatcctggaaatccccgttttagcaactgaacagaatccgaaaggtagactcgaatactcgtttcccctcttgatgacgtctgactgatctcgaccgggcttcggacacatctgccactcaaagctcttggtccgacggatccttcgttagacctggaatcactctctccagagcagtttctaggatgttttccaaagacaaaggtaatgattatttctattcatccctgatatctgattgtagtccctctcctgatcgatcgcttcattcacctccgtagttctcgatggtcatcccagagaccatgcagatcatccaggaacgaaagatttcaaacatcatacttgtaggaatcgaatctcacatctgcatccttcaaaccgctctcgagctgcttgccgccagattcgcagcccaaccgattgaggtatacgtcttggctgatggagtgtcgagctgtcatcctcaagaggttcctgttgcgctcgccgtcagttttttttcctacgtctttgagcttccttcattgtttgttgtggctgactggatccggttgacgtggcacactcttcgttcgtggggaaaatctgatagaggcttgcaaaggcaggagcgatggtgacaacctccgagtccatcttgttccaacttcaagccgacgcggcaagaccgacgttcaagtcgtttgcaaagcaggtcaaggaggagaaggacggaacgagaagagcgttggatggattggccaaaaattcttctaggctctagctcttttctctgtggcatcagttttgatagcagtgttctcgtaagtactatatatatatacgtgtaatacatcaggcaagagaaatgaaacaaaggtcgcaacaggaaagttggtgcgtcgtctcttcatgagaaatcctcttagttgagaaactcgaggtccaacacaacttctgctccggttattaactttgcatgggaagctaaatctagccaggaagttcccgcatctggtggacctgctagtctttcccatcctcctggaggagggagccacgagagaaaacattcgtcatctgttggaccaacattggatcgaaagcagagagaaagattaatgcgcgcaagaatcactcaccatctcccttggcgccctctaggtctcctctttcaaaccaacaagccaaccaaaaggaaatccacgatcagtactatgctttcgaacgataagaaaaaagatcaccggacaagacaattggtactcacgttccccatagaacttccaagtcggctttcaagttgcccgtcttgggtgtatacgttcctgtgcatgaaagtgtcaacgtacccgttcgacgaccgatctggcccacaaacaatgtctgtcctgtgaagaccgacggtctgccgaccatttcagttgttgggtgagacctgtcgagaatcatagatggacggagagatatcagagatgaagtcgatggagaacgatactttcagtgaaagccagcaacgaaggggaagacgtgtctgaccaggttagatgggtgaccgcttgaccttgcattcctggctcgtggccctgggccttatgaaactcggcttcagacttgacggacgtcatccttgggatttctgtggttgtgctcggtctgtcgagaggagcttcgacccatgttttgtggtctaaaactgcgtaggttgctacagagttatgggtgtgtgcatgagacggtgatcctgtcagtatcagttcggatctcaggtcaagaccatggccaaacgataatggcgataacaaaagacgaacaaagggtatacatgactgatagtttggaagcaaaagagagagagtggagatgtgcgatatgcttgtggaagaagccaccgatgcaagttgtcgaagaagttggaagtcgaccgaacgttgcgcgcggaaagtgacatcacccgtgaatgaattcgacccgggtgagtattttccctgttagacctcacccatctcatcccatccatccttctttcggacaacacgaaggaggtggctctgttgggagtctgtctggccgactaacaccagccagaatcagctgaatgtctggagaagattcccatgatctcctttatctatggccaggcttgacagaacgtgtggatgatgaatccctcaggttttcttgcctagcgaaaaaagaccgtatcctttgtttccaccggactgttcgatactctctcactcgactgcttgaccatacgttctccttcctccaacagagtcgactgactggacgggttctctagaatataaatgagtagaacgaatcagaaggtgaaccccaaatggaaccgctttatcctctctggccaccggtagaccggctgcaggatattatcttgttgttgatgacttgcccaaagtggcgccgactgacgactaacgagcccgaaagagcgtgttcccaacgatgtcaacccggctaaccccaataccaaggtgagggctgatagaacatgttgcttatatgaatcttggcctcttgcgtctcccatccttctagacatcctctgtgagcttgagttcacccctatccggttgtagtggcatcgacgacgacaccactcacacagacttgctcactgatcgatctcgacagcaacaaggccctaaaaaagcttatctttccagtgtttcgtccgccccccatccggtatctcttgcaactccagggctgaaaaaaaaaggaagaaaaactttccatccccattgttttcaccaccgttcaaacctctttccttctctctccctttccttctctctttctttccttctctccttgtctctctttcgacctcctttccattctatgaaaatggctcccttaaagaacttgccttgggatatcgtcgtccagatcatctactactctgatcaacaaacccttgccgcatggtgcaggacgtccttcgaagtcctcctcgacgccggacctctactctatcaggatatccagctcaactcattgacttccttgttttccttgtttctcacggtaagcttgcaacttttctcgactgttcttgttttccacatggaagtttccggcaaggtagtcttggtagaaaacgtcaatcaaccttgattaacccagcccttgtaatactggttcctgaaaacagcctagtcatatctctccggggtctcgtcttcggtcgtctgccaacctgagtcacctccgaacgctttccattagactctccgactctactttatccacgtcccttcctctggacttccagtctctagccggctcgatccatagctctgaacatgaaatgcttcggacgcttgttcctgatgatccacaatggctagccgcgccctcctggcggtcgacccctcggaatcgagcagagtcgtcccctctactgatctcaactctagacattcatctcgacattcctccggccgctgctatcaaaggcagttcgggccttctcggtagcagtcgaccggtcgagatcgattgcacgttgttccatgtgcttcgaccgatcgtttcaccagcacgtctgacatacacgtcgacctcgacgttaaactacttgacctcccgctcgctcgctcagtgtatccgtcgttggagtacactcgaaagcgtctcgctttctggaagtgtctttgccctggacggttctctctcggcctttatcagaggtcttccccgatggccgctcgggactcggccgtcgcttcagctcagaatcgacctgtcagacatctcgctcggaaaaccgacgtggcacttcaaaaaggacctgggtgaatggacaagatcacctgtgttttcatcctacgaacacgtgttgtacacgttcaggaaacaaggtgttttcaattcggttcatgtcggcctcctggtcaaggatctcatggaacgggatgagctggacaggatcgcggtcgagacactctctgaagccgagagagatcgattcaaagctggaatcgttgtgaaaacgggttgagtcgcatccaattgaacagccgtgtttgtttgaaaaccattgatatcactttccttccccttctctccgctagtcttgtctttgtttctttactccgtttttcgtcttcatacactccaagtcatctctcttctacgcatccatagataaaccggttagatttaagtttattctgttctccatcttcttgttctctctcctgtctttcccttttattttatctcatcctagagagtactcgctctagatt

SEQ ID NO: 2619 - DNA, 59854 bp, Xanthophyllomyces dendrorhous
ctctagattcgttgttgtacactccatagattctaatctaagttttttccatctgtcttgtctaccccatcccatgtcttcaactgcaactctcgtcacttttcgattaggaactcggttatgtacgacatgaccatatcatttcgcaaacaagataggatagctagcccggcaaataacaaaaggaaagatgatgatgacagacaaagtattcgtgaacgaaacaaattgtaccgcggaaaaggaggcgaagagaacgggtagaagaggagaaggagagaacgttaaaaaatgctttccaatactgatttacaattctatcaaaccgaaacgaagtaaaaacgaaggacagcggccatatcaacgacatccgagaaagatgggcaggcgacaatggcgaaaatcatgaagggacatcatgcgtccgtccgcttattctacattaacagtaaggaagtctccttttgtttcttttcgggttgattcactcttttagagcaggcctttgcgctgtcgttctttgatcgattggatagcagccgtgcacttcagcgtcactccgttttgtagagaatattttccggtctgaatcaggttggttggtttggttcaaccgagattcgaagaaagagtcagcttctcatattgttcttgaactaaacacaggaagaaatatcaacgaaccgccttgttgaggtcagcctcggcgtgtttgccagaaaggacaaggttgtaatgctgtagcgcttcatcaatacggccttgtctgtcgtagatccctccgatttcgtaatgggtgaaaaagacgatccaatggtcgagtaccaattttcggccgttctgtcaacgatgcaaggatcgacccccagaacgcaagatccgataaagacagataaggaatgagattgccatgaataagaatagactcatcaaaaacaacaagtacgaaagtaagaataatggaaggacatacgtcgagaaccatctgcagttccgccaaggcttccaccgcgagcgccgcttcatccacgggttctgcaggtggatcgtccggcgagacgaccctatccgggttaggaagtgcgatgagcccaagagcgacacccctcaacatatgagccagtgcaaaatctaccagattggatggcgtgtgtgtatgtttatgaacacaccaggcgcatcagctttgtgttccaagagatgcatcatgcaaagacatgaaaacgcaccgtcccaatatccctctcctcccttgtaagtctctggcgttgtagcctcgagttcatcgatgactagttgaatcctgggaagagtcttctgctggaatgcccacacgggcgtatgctgatacaacccaaacacataactctaaacgcatggtgaaggagatagacaaacaaccatcagacttgttcagtattcttcagatgaaaggttgagaagcgcacaagttcgacacccgggatggccaaccgtccctgtgccaagaatttcctagactttcgcgaaacatatttctattcatccaacaaaaccagagacccagacttttgagtaagaagatggcgagcagatgaatgaaagacgataagacgactgacctcgacaggcagggatttaccaacaacctaagagatagagcagggaaggccaaaagttgaagtctcattatatcacgatctcagcctcgagtagaacaagacgcttaccttcttgatgcttttgggtaccaaggtcatgtactcggtgattttttcaatatctggcttttcaacctcacacatagcagccgccgttgaactgtacccgtaggaatgcgcacaagtccagtagcaaggtacgatcagtccgggtgtagaaacatcaagagaatgggactggacaaagcgcttactagagataagtagccttggaccaattcgagccgagatacaacgtgtcgaaacactcagccgcgaattggaaatcgttaagagctagggcgttggtccctatatcccatcgcgaaagtaatctacagacagagggaacaactcagcccaaagcatcacaaggagtaaatgagttcagcagaaacgtactgcagctggatgtaactgtatgtttcgtcggtgtgacccaagaaggaagaaagtagacgagtaaatatagattgatgacatagaatattgaggctgatggaagtgaagcagactgactcgtgttgggcttctatcgctttatgtaaaacaatactagatttatgaggttgatcttgcatgacatgtaaccgtgcctggaagactacgtgaacaacagaaggaaagaagacattcagcctcgatacgaagggaacgattattaagttgagatagactccacctacataaagagaaaacgcctcgaggaaatctctcaacgttgtaccacatgatcttctctccaaatttgacatcgacatcggtcactagtaatgaagatgtacggggcaataatctgtatcaggacaggattaatacttccaatgatagaatgagaagaacatgacgtacctggtaacaaactcgaaataaccagatggaataacattagacacatatctgacaacggccgtctgacaccttcctgatccttcaagaccgctggccgatccgaatcgctggtccaaccaccggactcggctaatttgtcaagagcatatcgacgagacccttgaaagccaaagacttcggcaatctgaaaactcgaaacagagcatgagccgagttcactcaagtcttcatcgacatcgagggaggaagacaaaccttgacgacttttccaggcatcatactgagcatcaacgcactcattcctgttcccaactcaacccctgatctgagatctcgatcaatcgttggatcgtggccaccatgacttttatcggcagcttcgatatatgtgttcagagttcggtagattccctgagaagttcgcatgttcatggcttctttgattaatgccaaccactaattcaagttaaacgatattgaggtaagttaaatcccttttgttctgtaacagtatcgaaagctgaacgtacttctcctccgacgatgattccgagcatggatttcatcaacaaagtctctgcatacatgagttcagcctaagtcaaagaaatttgcagccaagacgagcaaggcacggcaagaaaaatgagtcaatggtctggttggtgatacatgttcatatgaaagagaacaggtggtactctccagagaacaagaagtagtgtgaggtaaaatcctaagacatacatgtttctcaatatctgtcatcgatttgatcagtgctactcctcctcccttgaatagacgggtggtcaacgatgaggctggctttcggtaagaggatctgttggcaattcagaacaagagagagcggtatacacaacattcggatgaactcgagattggttgtgcgctcaagacagatgcgtattaatggatggacggtctaagataggacttacactagatctgtcacatatttcgtcacagcttgggcgtgttgtaaatccgaaggctcaaaagtcataagaccctatcaaagtcgacaccaccaagcagggttagcaagcgatattttgttaaagtgacagatcaactacttgccttgagcgcgctggatgtgacaataaacatgcatggctcagcgtcaggttttgcgcgtatgtatcatcttcgttacgcgtgggcgcgcccaatggaaacacacacatacctgagaatgcagtcagcgatctggagatacaatctctctcgctttgggtcactctcctgaacaattttctcggcttccttgatgtgcgaagacaggaactgatcgattccacgcgaacgcgcaaacacatcgtttgaatatcagacaatgcgctagctagatcgatgattgaaattgaaaacgaaaacagaactcgagttggctcactagattcataactctatgacaggtttgaaggtcctcctttaacacctggtcttggtccttctctctcaaccgaggcagctctttggggatcggattgataggtacacccctatctgaaagtttccctccggtaacactagtgtcaaccaaactcgtaggcgcctccactggatttgaatctttggcatgtacgtgtgaggggctaggcttggtcatagctacatgcttggtatccactgtgtcctccaagtcggactcctcgcccacctcagacaagccttcatccggggtagcgaatccgtcgttctcgtcttctgaatcgtcttcatcctcggactgatatgtccaaactgactcgcctgtttgaggctcggctgtttgggcagatccggctaaatcagatcctgatgtggaggctgcaaggctggccggattgacaagttgagcagcaagtaaaggtttttctggttttacagaggaaacagtggaaggctcaacatcttctcttagaagcgacgtgccaacaggcgctgtcactccatccatcgactttcttccgatctccttgccgttacctccagagaaggcggcattcatccgatgagctagcacgtcttcttcatcatctgagtctggagaggattcttttgatccatgttggtcgagaggcgacttgctagcaccattgtccagcgagtgggaggcaacactggccgagggaggaggtttagatctgttggaactaagagaggtagtggacggcgaagcagagattgaacaggattcatgatccttgccggagaagcctagtcgcttgaagagcgaagtcttcctcctggattgatttatgttacccaagtcagataaagatgaagaggaattgagatgaagaaggaaaagaattggtcagccaaccggccggccgggtatccctgaacattcgcatcctcgctctcatccgaaccaacaaaagatgatgaatttcaagaaaaagaggagagaagcggacactgacttgactcctgcaccttttccctctacatccaaaggaatcgagccttcgaagctggatttacttgatctcaccggtgttcgagtgggagaattggagaccgatgccgaagctgccgcggcattagcgaaaggtggtgaaggcttggatttctccggaacgtttgagatcgtcgtatacgctgggtcttgagcaagagcggacagattggaagaatctctgcgtttgaacaaaccgggtgccatggttgatgcaaacacgaagccgggaggaaggatagagggagatcgaagtcgatgatggtggaaggatgaggaaacgagaataaatgtaccgaaagcgggaaggctatgaaagtggggcgagtgagtgtgagcagcaggatccgagtacacttcctgctacggcatcttccccgttggaaccgacctctttctcattatattttatgtggtctcgttgaaagtctttctgtagtctagcttggttataccatgagtacatcgagagcatgtaaagagcgtgtgtctgaatatatgtatgcgcccatatgtaggaatcgtttgtgatgtacataaaccctccgattggagacataaaattgagttttcatcgagaacaatttatcataatttacacttgttgaccctctacccatccaatcttctcaaagcagcagaaaatgagatcgtagccttcaaactcgtatccgattctagagtattgcggtcagatcaagatgatgtaagtcagcatacccgtgtgtgtatgtatgtagagtatgtgcgaaccgccctatgtgcccaaagaagagtcaagcagtggaaagaaggagcgacaaatgtggaactaacctatctttcctcctgtatccagggaccaagcctttgcttcctagaatgtttgctgtctttccccacccttcttcttcttcctcctcatcctcatcttcttccaaggactccttgttggtctccacaaagagcgtgatggagaaccgaccaggctcgaaaatcccgaccaccttcctcactaaggtcaacaagtttggaaactcgctgtccctgatcacagaagaccctgctagcgatgaatgggttgacaacacaagagacgacgcaagggagttagctccgctaccgagaggcagggagatgtttgtctcgaacgaagcaaaagaatggtcggcctccggagtaacatgaacggtccagtaaccttcttgaccttttgacaaagacgatgaagatgacgataacgacgatgacgaaaaggttggcgctcgaacgagagcgttagcggaataaccacatggcgagaacgcgtaagaatctagagtctgcagtgaagacggaaagatggttgacagctcagagacatccctgttgaggaaaaataaaatgagtatgagaaaacttcgataagtatagctcacgtttgaacaaacagccaaacagatatggagacacgtacgacatgagctttcctccctcgtagccttcctctgcaggaggctgaccgtcctctgcctttggcgggtaaaactggttccgtcccttctcgctaagatgggtcatcaagatttccagtgtctgatctcctacggctgccgggtcgctcccattctttcggaccctgaagttcttctcgctctccaccacctcggctggctttgtgtgattttgaggcggaggcagctgggcgttctcggatgatggcgacttgggagatgctggtcggagatgcatcgctgctgaggagattgcgtcggagagaacggaggcatcggcagcataggatgcaccctttggtgatgatgtttgaggagaagtcgagtttcggggggcagtcacgtaaagcagccagtggtcgccattcataggtccaactgtgtaggcagatccgttatctaattgatgccggtacagccaacaagagcgtcgtctcagtcgaacggatggaaaataagattcgaagcaagatcaaacggcgagagaacacataccaaagacaccatcaaggaaggcaacctcgcctcgccagccggacgcgtggacgcccttctgtcgttcagggaacatgaagctctttcgggagtagaagcatcggtagacctcgttgaacccagcgtactctcgcgcgatcgacaagattcgaggaagaccaagtaagttaagcgtggtaccgcatgtcttgagaatgagtcggttggacgagacgatcaaggaagattctctaaagatatgtacgcagcatgacgaatgagagctcgacaaaacgtcagcttggacggtacaaagaatgtttgggttgcaacaggagagcaagacagacgtacgagagcaggtaggtatcaatctcctccccttccacaaagctgaggatcttacacttgacgaggtctagcatttcttcccaaacctctcgaggcactcgccgaaggcctgaccattgaagctcagggttaggatgaggtggtcggaccacggacgagggtccactggtgctggcactagcagagggaagaaggtcatgagcgttgggagagaaccagatctcgagaagttctgacggaccaagtcagaaagaatcgagtcatagccattagtgggtgttgctatgaagtatgctgtgaagaatgaggatagtgaactacgtactctccggcccttcgaaaggaccgtccgaagacgaagagtcagacgacatcaatcttgactattgctttgaatcactcgaacgaataccgaagaaaggcctagataacagagctcaagtcggtatgagagcacgagaagcaaagcagcaagaagcagaacgaggtttgagcgagagcttgggcggaagcttgagagaggcaaaaaagaggaaaagaaaggatgagcaatgaaaaatgaaaccgaataattatcatgtcagtttgacatcaggctgagacttctcctcagtatatgtccaccatgcacacagagcagcgagaggcatggacaagggctcagtggatggtgtcggttgggaggttggtggagatagcatgagcatgggcaggtagcgttcttgtgtgtgtgcgagatgatggatgcttgatcggtagctgttatgggcggccgggtgaacgtcctctcatgaggtttcgttgaaggatccagtagttacatcgtctgacggagggcgcatcggtcttccgtcctctttctttctagccatcactctgtcctctctgtcttacctactgttcgcttacttctctctttgtatcgcccacatggcagaaaagccaacgtccagttcgggtcctctgaagataaaggttcttccagatccgtttatttagttgtttactatgagtgtccgaaggctgatcagttccaatcaaaaacatttcctacgcctcagctccgattcaactctgcacctaactcgtccgtttcgtcttcctcggccctcacaccttccaaccaatccagacggacgcctagtttcagctcggattctagctcctctctgcagccagaggcagaatccggaaatgaggaagacaacgagcatgaatctgaacacaagcaaaagcctgaacatgggtcggagtcaaagaaagaatcacccgtccaacccgtagaggctccagagagcgagccaaaagaccagtcagacggacagcattcatccgaaaaaccccagaagcgaagggaccgaaatgtggagaagacgtcaaagcgaaaacgcaagaagagcatggactttacctctagtccttccgcatcacccgagcaagtcaatcaacaatcgaggcagcaccatctcgctcatgaccgtcatccttcgttctcgtcggcctcgtcaattgtgcccgatcagccagccggtctcggctccaatctttacgctcaccactcggaaagccatcctctaggtcatcactcgcaagcctctcatggcactatgcctcaaccaaccgactctgcttacagtcagcaaaatcccatccaatcagctcagcatccgttccagcaatcacctcttccttcaatctctacacaactgtttccctcaaatcattcggatcgatcctcttcgagcgctaccgcaccatatacctctgtaggaggaacccatcctcctgggacgacttcagcatatcaatactattcccccgttgccagccttacacaggttcctccaacaggaaactcagatgataactcggctcaaccccagagtccatatgtccaacagcaatatcaaacccccgggctccttgataaggtagctccagctcaaatccctctttctaccgcttcagaaacccagccacacccacatcacccgcttcaatccgaggccagtctgtcgaggagggcatcggtagacagtgcagcagaatcagaagggcccaaggaatcaacagaagtaccggatgtaccggatgtggtaactgaagggctctctggaagagctctggttgaaaagaagaggaggtggagaaaacaggaaggcgtgcccggtccaggcaagaagtgagtttaggccttctatcctgacggaaatctgttctttatatacgcttaccgggtctcgatactttttgtgaacagctggaggaagggaaaggggaaggcatcaagaagaggaacgcccgttggatctgatcatcagcctagtctatcattgggatctagtatgttcatctgcaaactataaccatccgtcattgggacccaacaccttgtttctcacattccctgggatgtcccatcttttcttccaggtccgcctcctacagactcccgattcaactcaccgctcccgaatcgatcaggctataattctccgtccacctacccattcacccatcatcctcagcctttccaaaatccgtactccaagcccccgcctatactcccttctctctcaacgataagctctgcgaatgccgtcacgactgctgtaaaccagtccgcagtggcaacagttgtcgagccgtactttcccaatcagatgaatctatacaaaaaaggcttccatcttgtcacatctgctccggctcctaaagtatcggctggatatgtcgtggcagaacctttgatgaacaaaggaaagggcaaggagctcaaagtcaggaagtggaagattgggttcagatcggtcaggagtatcaccgggaaaggctggcttgccggaggtggttggatgggaggtatgttttcttcaaagcactcatcagatgttccaacacaggctcaaatgcatgtgtacttgatcgattcgaatcttaacttctttttctcttgctttgtttgctttgtcaacctatgcgacagaacaaacgtctgagctgtccacctatctagctgaagaacgtagggtggccgccgaggaagcagtagcagtttctgccgctgcagatgctagctcccggcctgaagaatcagccgacccaaatcttctcccctcaactgccgaccttttacctgccgcttctgcttctaagcgatccaaaaagttgtccaaattgacagacgattcggctctacctgcgaatagtgatcgagaactttctgtacctgtatcggttgctaccacatcggccatggtagaacaaggaccgacgacacctttggaagttcccggagggtccagatctggatcggtctctgcatctgggcagactcctggaggaagcgaggagccgaggtagttggacccaatctctagttattcttcgtttctcacacgctcattagttttatcacatgttcctatcatatctttctttcgatgtgttcttcacgatgagtccagagctaattgattggatctgtgtatattgatcgggtgtctcatctttttctcactcttacgttaaggtgtatgcgccttcagttgtaaggagaatgctaacttgaatgcatgctgtcatctggctgacaggattgatcatcccttgaatctttcttatttcatctcgagtatatatgagcccctctctctcataaccttgtcaacacttgtctttcctgaaacattcaacatgacttgtccagtatctccatctgtcctatcaacaacccaaggactcttggattcttgggaatctaatctcgcttcgcctacttcgccttctttgctcattgacatgtctgtcgatttccaacctctatttcctgacaatgatattcaagcttctccttcaacatcaccttcgcaatctgattgtgaaatcacgtctcttctcgaacttaatcggcctgcgaacaagttcggtttgggtccaagatgtcttgaagaagatgtggacctgattgataaagcagactcgtccgttagactcgatatggacagttttagttcactggacggattcagcactggttacgaggaggaagattatgaaggcgaaagtatgaatgagagtagagatgatgatgatgatgaggaggaggaggataattggttccagacgggttttgtcacagaggtcaacctcgaacaatccgagcaggaaggtttggatatcagttcttaccttcgacctatcaaagttgaagatgaggccttgaagctggaatcagatgacgacgaagaccatagagacgacgatgatgagagcgaagagtggagtgaggatgagcacgagatgtataatccttctgctcagtatcttttggaaaaggcgcaacgtcggtaagtcgaccgtgtatacagctcgaaacgttttgctgtgtacacttatgtatgacttcgttgatcattgtatacttacaactctgcgggaggatttggttgtttctaatagaacagcagcaatgaattacgtggaaaatgtcatgacttcgttcctctcccagctggcttcttcgatgttgcatccttccacactctcgagcgctccttcatcacgatctatccggccagagccaacatccaggcaaaatcttacttcttccaaacctgatgcttcccagcccatgccggaactctcgtacttcacgtctgatgatgaagaggctcaagtcgttcagcagacaaaaaacacgacaggtcggattgaacttatatgcgcggcaaataaatccagacggttcatctggccggtcagaacgattaataatactgtcagactaggtaagcaatgagttccctcggctcaatgatttggggctgatatcagtcacaatttcgctaacaatggagagcattggtccgatcgagcgactagcttgcctatggaaagtgctaagtctgatctatgaggcgttggaagaagacatcatcgttacgaagaggtgggcgcatgccttttcgtactatatttgggttattatctaagctgcatacctctcacttgaaaccagggatatctactacaaggatcccaagcttttcactagccagcagaaagtcaatatggtaagatagaaagaagattataacttggcatctttttcgttgagagcacgttagttaatcgaacatcgtctggacgaccaacattgtttctgggccgaagatcgtgaacgatcttgtagtctcgtcaaacttcaagaggtccgacttcaacgtagtccgttctcttcgcttacgtgtccagagactaagcctgttgagatttaaccccttcctctcgtgccttcatgctgttttcgcctgttgattcaaacagcgcgcatctccgaaaggcctttttgcctcatctgtacttctcatccacttccatgaacaagttcctgtccaaagtgtgtttcagtcgacattaattccccctgtagagactatatcgtccatacagttcaacagtaaagtagaagacggcgagataggtcttcttcagggcccgagtggggtcaagggtccaaaatggattctagtcatagagaaagatgtaggtttcaatctgatacaaaacattcagctgttttagaagctgactagctgaggttatattttcgtgggcgcttgaattttcgcaggccatattccagagtctttgttccgttcgttttggactagaccaaggaggggtcatgatcacggtctgtatgcatctgtgttatgtcatcttaagtgctgtcctaacgttcatcctgttttgtagggcaaaggctacccagatcatacaacccaagagtttctgtgcttactttcgcgtaactttcctcggtaagcatcgtacatgtcttttcgaacttttagatatcaactgatcagatcgaggtcacccgtccaaactcgggctgaatttatatcaatagtacgccaatcgctgttttggtcgacggagatcccgatgggattgaaatcctctcagtttataagtttggttcgcaatcgcaggtaggctaacaatctcatgcgcacattatcttgacaaaaggaatgactcactctttgccgttgacatgatcggagtgtagccgaagctggctgtgcctagggttgagtggcttggagtgaaggcgcgtgaatggagcaggtgaactctcgctttatttctccactctctcttagatcaacgatgacagtgtaagtaacttgtaatgatcttcaattaagttcaggctgaacatcgactacgagcaacttattccattgacacctcgagatgtcactaaggtttgtgtctaatatctccgatttgtttaaggatttttgaccggatgcattgacccgatcgggttcttttgcacgctttctactatattaattaaatctgaacaaatcatcgtagacattcaaaatgattggacgatcgacgacaaggatgccgaaggaatggaagtaagtttttcttgtcattccccgaagcattctttgttgtttcagcctcagctttggtaatcgtcatcttcttcggtgaaatttaaatgacgttctcttggtcatcttagacaagaactcgcgtgcatgcttcatctacggtgtaaagcagagattcaactcttgaccgcaccccctgtctcccacagcggtgtcgcctcttccagcgagagatcaactgaccacagcgcatgccgagacatctggtcgacacccgttcatgaaaattcaacgaattttgcagggcaacaagaacatgtacatagaagaactggaggtatcaataggctggtggcctatctgcaggaaagactcgacgagctgggaccagtcgaatgtgaaggataagattgaatggatgtgaattggcacaatgaaggggagggaagaaaaacagaaaccaatcagggtaattatacgatgaacgaaatatgcagtcttcgttcaagaagcgatttgatattctcgacttgattttattcgttctgccaagacctggaacgttgagttgatctcagctagatactctgctgtgttttcgtcccgcatgtttccttgaagaaatccatattgaatagatggattgttatctcttctgcaacgataaatagcatgtcttagggctgaggaacgaaaaagacagcaacatacctaagtgtacttccatatcaaattgaggttcaaataaacagtagtcttcatcatgcgtgaaagcatcatcttgaatcagtgtatccgcagacaagcatctgcctaaggccgctgcggtacacgaggcgtaggctctagctgcatttgcatggttgtatccacctacagatcacagggttaagagaggaggagaaaacagcaagaaatcaaaggcttataatctttttcctgggcggttgacgatatgagattggaagactaaccacctcctaggagaacgataggaatgttccaatcaagggcccgatcaacacaccacgtaagacctccttcctccttcaagcctagattccaaacgcctttgggatcgccttttgaaagaaacaggagaaaagtgttcaatccaattaatcttctaacgctttgggcagagcaaaacgaagtagggaagacacatacctgccaaaccatccactccgacgcagacaaccacatagtccggttcccacgcttttttgataggttctatacttccctcccacacggacttcatcgaccatccagatgctccagctttcaacggaatggatagcgtatgtggactctttgtgtctggctgagtcaaggcagagagcggaccaggaggaaagaatcctggggaggcatgatgaactgataatgttaccactgcaggaggtctagaccgcgcggaagagaaggtttgaaaggcttgcgcaggaccatcgccgtgatggatatcgaggtcaaggtagaggattctgggtttcctcgtccgtgtgggtgcttgttcaggctcagggaagtttgtcaaagggaggaaagtgggcttgggcggttgaacaggaagaccttgagaagctaaagagagaatgcaaagaacaggatcatttacataacagaatcctgcaggtaacgaaaagttggtgtgagtgttcgtgatcccgaatcttatggagaggagaagagaaaaaatcgaagacaaaccagaagccccgcttctcagcgcatgatgtctgcctccgtcccaacagattcccacgtccgcccgaccgtcagcgacttctttgacggctgcaagactggctccagcaacctggagcacatattggtcgagatttttgaaaggaggcgagtcatctgtcaaattgaacttttccaatcgacggatttttcgggacggtgggttaggtttctggcgtttggtagctggaggggagtcggatgaggacgatgataattcgccttcagagtctgattgatcatctatttcaaaatggccgttgccagttgtgttgaaactcaacaaagcatctgattttgagagcatacacaaaccaaggtcaaacaagatgtccagaccggttgggctcatgcgacacgtattacttcgatcaacttgccgacataatccaagtcatgagctcttcctatctctctccttccgatcttgagaggacgaactatcttcgcttttctgatcacaagggattttctaaccataacctgatctcctccaatatcagcttcgtcatcactttgcccatcgctcttgtcctcatccaagaggcctatcgaagtgattagctgatggaggattctcgacctgttagggttagagggcagttgggacgaaacatgggccaaggtatccgaatatacataggctactctgagttgaacaggcgaggaggatggcaggtctcccgacatgaaacttgttgagcaattggatggtgttttataatgatgaggccaagcttgaaatgttggtcgatgagatgatcaaacaatggacgcgtctgtatctggctgtgcgacgcgtgttgatttatcgtaaatgtggacctaaataacgatgatggtcatcttctctttcgaaccagcatcgccaagacatcgatacaacatatctatgatgattgagatcatgttgaaggtactgaataggcctaacatgaacaatgatcttcgttcttgattgagtggttagaactgaatgaaaataaccgaaaagtttacagtacagcgtctgcagccttgtctgttgtccgaaaggtcggtcgagctcctccttatgaagtattgagcccaccatgagcacaaaggagatcaatgtttcagagggaagaaacaatgtctatttggttcgtaggcttgacttttctcgttgtatatgcttattagagtacaaaataaagattaagctaacaagggcgctcccgggagatcttgcgttgtacacaactccaaaatgaatagatggggtctttataaaaagtttgtttctgttttgtgtctgtttttctagccacgcgtctctctttctctcctaactctagaaccgaacaggatggggtgcttaagaaaaccaaaagactacaatcctctcgtatactttagattgaacgtcgaaaagtgggacgactggccttgcatgtttgtttctttgaacatttatattgtccgcttgattacacccggtctgtaaatgtatatgatgaaggtcgctctgatcttcaatacggcaacgctgataacttatgttagcggggagggaaggctgtcccattgaccaagacacccgcgccggaagagataaacttcggcttcttttttctttctttcttcttgtgttttctatcttctgtccatgtccctcgaaagtcggtatgcttatttgttctcggtatatgtcagatcctgtcagatacccgttcgtttgaattgactgagcagaatgattcaacctgatctcgttgtctcttgctttgctgaacatatgtttcgtctatctgttaaaatcctttgcctctggacttttcttgcccgtttgtgtcgccctgccacttttcttcatttacgcctacacaagtcttactagaacgaagttgtttctgaacggatccgatcatagtggtctccatcgaggcttacgattcgcgagagagaatagagagacaaagtaagacgaggcttggaaaagcctttttgaaaagaattgatggccaagtctcgaatgttgtgttgttatttatcttgctctcttctctgtctccacttcttctctagccggatgtcacgattggaaatttgtacaaatcatcttcttatacatttcgttttgcgtgatcacttagagcgtgtaatcgtggttggatctagattgacaactgcgttagctctgccgttgagcatttgaagggtggttcggcagagggatgggagcctatatggccaataccttgtcttctacagccgcttccgagacaaacaaagtggccgtgatcggcgtgaacctgacgaaaacaacgatgacagatctgcgttgttcgatatgaactgcggacgatcattttcgcccctttatttttcctctttcttccttgttttggatacacgcgcctcttcggctttagagcagagagtggcacagtaacaagggatcagacatcccacgagggactccagttggttcagcttcgcgacgttttctgtgtgggctcaagattgtccgattggccctcggttgaacatctaaaaattccccctcccgaccttcacgtcattctggcgatcggcccggatgtgtagatgacttgctatcgcgtctcttgttcggatggatctatgtgtcattttctgtcgagcgaacccagagtggcgctgtttcatccggtggagttctatcctactgtatttcatgtctactggatgtgaacactattgcaacggtgtatgagtatatctgtgtccttttcgatcttctattctttgatatctaattttgtcagagttttttttttttttttcaaggcgacctaggtggagtaacaagtgatcgaagaagaattaatattaacgaaatagaaaacggaaccagcgcgagaaaaagaaagggaagaaaacaggtaacatgaaaaatgccggtcagtgattatgtttccacgtgtcgatcaaacagattctccttgaaccggtcgcttgaataagagctagttctttgatcccgatctctgagaaaggtggtgaacgggtggagaagcagtcagccaggcagcggctgggcaggtactcaggtacagtatccctcgagcacccaagcacccgcatacccacatacccaggcactcaggttctcaggcacttaggtagtacaccacacttccagagtcaacctttccagagactcattcttccgctcaaagactcatctctcttttctcccctaaatccttctcgtgctctttgtttcctcttctttttgttccctcttcgttctttcccttctcgtcgtcctgctcttcttttagtctagttccatttgacactgtcttctccctatcggttcggctcaacaatccagctaccgaggcttcccctgagatataagaatacgaacgactggcacaaattccatttgtttcagaatcctccgtcttttatgtacatggggtgcacgctctcgatcgatctcgtctctctcttcctatcttcctcttgtacacccctgtagaatctgatagttcactatcaagtctcttcctctagacggccaaccatctcggaccacaacagaacagatctctcctcatctctccatctttttttttctttttcattttcacttcccatctctcttctcttgccctccccgttcttgatctcatccagccgcgcacctcaggatgtcccgggatccgtcgatggacatgcaggcgagtaaccacatgatgaagaacacaaaaaagggaagacccttcatacaggtctgttcttcttaactcgtcttcactgggagaggatccgagctcgatcctgttttgcttcttgatcaattgagagacgatagcaagaccaagttacctatttccttctcgtacagccctttctgacgtttcggtctcgttcaaatgaccaacaaaacataggacctccacgatctgttctccactctcatcgtttcccttaacctaggaactcaccgtcagtttttcaagcaataccataatgcgttcacaacgtacgtctttacttcttctttttcttcttcctcttcttctctcttgtcttttcttatcgtcaattcattctttctgacgatttctgaatattcttgctcgccatccctttccattattcttcatcgttatcatcatctcctatcgctctcgttcttctctcttgcgtttctccaacgcgttcacctctggcagagatggcgcctgtcaaaacttgtcgtcactcaaattcacccagtccagtcggtcggctgatccaaaggatcccaaccggatactcaccaccaccactaccaccacattcacgatgactcgggaactagcaaagggaatgtgccagcatttcatggacgcacatctgatcgaaaacgcagcggacccttcaagctcgaccttcaaggatagaggaatctacgtgtgtaccccaaaggggctccacatgtcagtccttctctagacacccctcttacgtcttacttggcttccttccactctcgcttctgctgacccatctgtttcccccatcatcttctgctcactagcctggaacgctttgtcgcaaagaatgggatcgctcaacaacagcgcctcaaggtgtttgcctcccagccgatatgcatgaagcttctccacctcgagcgaaaaccgtcggatgatgagctctgcacatcgaaagtggtggttgagatgctgtggagacggttcgctggtcgaaagccaaaccggatcgatccttctcaactcccctcttcttactccccctcctcctcgccctcatcatcagcatccactccgatctctaacgtccggcatacccgacaaaatcctccttcaggccagtcgaccgatatatttgatcaaacccatggcgccgctttccggaagcatcaagagaaggacaaaacaggcaagcttgaggtcgtgccgtatgcgattggtagttttcaagtcattggttggctactcgatcatactaccatggctcacaaggaagaagctatggaaatggccgcccgatttgtctggcttggtttcttagaactcatcagcgaaagaggcaaggtcaacaaagacatggctaccaagaccgtcgttcagggcaaagaagacggtccggtcaagtcatcaggcgagtttcgagcttctgagaaagcgatctacaaagtcaccgaacgaggcatgcaagccgcccgatggcccggttacggccgtgattcggttagccatcctttggtaactggttctcgatcggtagatacggaagaactgactcgagaagaacgaccgagtgtgaatcgagtactgttcggtcggtcaatcacggatcaaacacctttccgtcactctccttctccacatcaggttgaccagagtgaacttctatcacatacagacagcgctgagattgagcccagatcgtccccggaaggaggaggatctagcatgttcaaagagtcacacacgaccaaacttcagcagatcctggaggaaccatcgctcagaagtctcttcagagaatttcttcgctcatgtttttgtgaggaaaacctgagctattggttggatgttcaggagcttagaaaacggttttcgaccacttccagtgctgccgccgctgggcatgctcaaggacaaggccaaggaaagtcaaaggatgcggccaactctacgatggagagacatcagcaggaccttgtcgcggttgcactcaacatgtttgtttctcattcttccgtaactttttatcacgatttttgacaaccccttagaacggatgattgacgaatcgttgtccttgaaatcctacacaaatccaatagatataatacatatctcgccccacactctccttctgaacttaatattgatcataacctccgaggggatttggtgaactatgtatcgagaaacctacttgatcaagctgctatcgcctcgtccaatcttccttcaaccaacgccactggcatgcgagctttatcttcttcaccagactcaaaaccgaacgcaaccgcgaattcgaaaagagagaacgattcgatcgatccgagagcctatcagatggacgcaagcaatctacagtcgttgttgacagtgtacgaacagattcagagctacatattcagactcatggctacagattccgtcccaaaattctcaaaaagcgatctggtccgtccgaacatctcccgttttcctgcctctctaaaagaaacatctcaggggttgacatgctgactcttcttgttctatactcgtatgttgatagtttctctctagagggaaaccaccggtggaacggaaggttgactatgcgatcggaaaaccaatcctgcttggttcagcatacagtgttaacgagtctgccgatgaagaggacattcaagcaagagcatatcttacaatttctcaagtgagtttcgactgactttgttagaccaaactcaagccgagtactagggctgaacaatgtctcttattgaccggtgttgatgttctcctgctcgcttgaataggctgcgcgtgaaaagtatacaagttcaaaaagagcagcagcggcagcggcagctctctcttcttccccttctactgccccaagtttgccttcgactgtgtaacagtctggcattaccgacaattgcggagggctcgtgtctctgtatatcatctctacatctcatctccacttccttctctgtttctttttctgggatttggttttttcaccttcatgcctgcccctcttgtgtctttctattgtcgacttccacgatcaagaaccacgatcttcaatcaatgctttacttatccaccgcatctttttcaactctccttcattgccccttttgttttatcctctttcgttgtgttatttccgagctgtctttgctttctctttgtccggcactttcttcggccctcttccacctcctttatgtctcgatgccgctctaactatccacccatcagaaattctgatggcattttccccctcttctcttccatcttctccgtctttctatataagcatcaccgttgttgtctttcagccatcttgccaaagtcttactaccttatttgtttcccctttttcccttcctccctttcccataacctccttttcccaccaacaattatacaaagaaacgctcatccggagtggatccatatacacgttatatccccgttctctcttattccttcttttattccctatttaacgcctatatacatatgaaggttgctcatctgcgctctgacctcttttgcctggccgttctccttaaagattgtgtttggaaggaaagactgccttgagagaacgtacacgtgcatgcacttggacgtgctcaacacgcagggaacattacttagccctccacaaagtccggggagcacgaagagagcaagatctaacaaagatagagaacacacgagagacgatggacagcaagaaggacatctgtgtgatgtacgataggtcgagagattggacgagatggacagattgaatgagagtagaacataggttgaacaaacaaaggatcgggtttctattgccagggcaacttgattagacgaatcaactacagtttccatatgccggtgaaaagaagagatgcaaagaagaagggcagcctgtcgcatggtgatcacgaggtaagaacttatgtctgatgtgactttcagccgattcgaccttcgagcattgaaactcggtagcattctggacgttgatgcgccaaagccaaagtttgtgagaacttgtttttcttcgtacagatgctaatcgagaaaagaacgtatcaggcagttttacttataaccgtgtgcaatgatcttaatcgctcgacagttaaagacgttcaagatgttagcagaaagaaggggaaaatgaaggaaccgtttgaatatgagtttccttgttcgtgagttaatccgtggtagaagaacatttgtttccgtcgactttcactctatactaagtagatcgatgctcggcacatcgacagccatcaacaagatcacttttcctataatgcgctagagatccatcttgacccaagaggaaacgagggttagcatgttggatgtgatgtacacaggccctgttatcagatctagcccgaccgacagctgggtccgagtgaaatcttcgatgggtcaactgatgacaaacatcagccgagagaagaggcgacaacttgcgggtctgatacaaagagttacattttatctatcatgcgctctttagcaagttcttggtcctgatggcggctcggtttctggttttcaagaaagaaagcaacagatggataagactcgatgaatcttgttgattcgttacgcgcacgagcttcgggcttgcgctctttcttctctttctccttgatcgtgagatctcatgaaaagaaatgctctggagacgtacgcttttctaatggcccgtctctgttcattcgcttcccattcttgcccccggccatgaggaatcttgcctgcagcggccaacgccttgccctcgccgaccatggtccagagccaagacgggtactcttcgtctggcaacgcgaccggcacggcttgtgtcttgaacacgacgacttcaggcatgggagttccagccggagtggacgataccggtcggtaggtctgttgttcggacgtactggaggaaggtgtggaggactcagaggtcgaaggactggaagtggtggtggtgctctgggatcgacgaacgaggaaggaacctgggatcgaaatagaggggtttaacaggcagagcggtgtccgtctgatcgccggaattaaacgagagaggtttaaggacatgtcgggcgttctttggagactttgtgtgtaaccgactctgtatgttcttctgctttatctcagatggcgagggatgaaaaaggaacagtaagagccgatagattggtgagagttgacgaacagggaaacggaaaagaaagcagcgagagaaacattagagaaaagagggacgatcttgtagtcgaaccatcatgagagatcgtaatgaatggtccgaagaaattatcataggtgcttcgtagttcatcaatacgatcgctttgtagtctcttgtctatttactcggcaaatacaaatcagtcggctgtctgaatagagagttttgtagtctgtagcccgggtgaaaatcattaggaagcaaatctaatgggcactacgcggcccgtctattgaaaggcagcatttgagcctgacacgtaggtatgtgagcctgtgctagtctgatcacgtgatgttcaaagacactaatatctctctagttcctagggccggtagactagagaaaaatcgtagtgtgtgcggagttttaattgtaacgtgacagtgcctggatcgttgatgatttttttcctggcaggtcgacgttcgcacgtccgcacggaaatcgttggagacagcctcgcctttgtcctcgccatcctcaagatcaagcctatcgtacgtgtctgttttattatgtttcgtttcactgtcaaaggcagatcgaatgggtagctgttgtgcgtatgtgagtgtgtgtgatgtgtgcgagtttgcgggcaaaaccctcgtctctttttccttcgacaaagacgacttatcatcaaaaagggacatgaaaaacgacccaagttcttctcggaaaggaatcaacacaacgtttagaagggatggaggcctcaagcatgggagggtgaatggacggagagagctggacaaactaaaccaaagtcagaagagggaatgtaggaaaggttgagagaggagagattatagaaatccgcctggaaccctctacaactttttcctcgaccttgcaaacctgcttgcttcagaggaaaagggggaaagcttctccatcctcgatcacgctcgaaccaatcctatcctttgacacctcgtcttgccgaccgttcaacctagaaggaaaatttcaacggacaaaccaaccgaacagcaaactcgtatttccccgcatacacacacacacacacacacacacacacatatatacacacacacgccttgctttcgagagcttcaatcaatgtttcagagaactttccgaagaagactaacttcaactatttatctacacacttgaccggacacctctagatgggacgattcaccgaataccaagtcctcggacgaaagctccccactgaggctgagccctcccctaaggttggcccgcaaattcttcttaggattccttgttctttcaattgtcatattctgaacccacacacacccaacctatatattcccgtcgttttttctttccttttccccaactatagctcttccgaatgaggattttcgctcctaacgaggttgttgccaagtcccgattctggtacttccttcgacagctccacaaggtcaagaaggcctctggagagatcgtcgccgtcaacgtcatctccgagaagcgacctcttcaggtcaagaacttcggagtctggcttcgatacgactcccgatccggtacccacaagttagtttaggcttggtgtcgcatatgtatcagctatttcttcgtttcttgtactgatggtcattatcttttgattcacagcatgtacaaggagtaccgagatctctcccgaaccgactgcgtcgagtccctttaccaggacatggccgcccgacaccgagcccgattcagatcgatccacatccttcgagtcgctgagatcgagaagaaggaggacgtccgacgaccttacatcaagcagctcctcgagcccaagctccgattcccccttccccaccgacgacagacctccaagtcggtctttgccgccaagcgaccttccacctgggcttaaacaaagagtgttatctttttgcgctctttttgaaagtcgggattttccctttggttggacatgtgatcatgaaacttggacaaaagatatttggttactctggaagagcacacaagaaacaacccacagaaggagcgcatagcttggaacattctgacctggtcaaaaacgacagaacagacatagcactcatcggatcgagacaaacaaaaaaaacactaaaccatgatcaaaacgttgactgacaaaccagaagctggctgctcatgctcttctcacgaaagctgattgacgcttatcaatgccactaactcggctgtaccctggtgttttcaaccttgacgtttcttgttttgactttcatctcttttcgaaaagcagacgacgacctaactagttcttgctcgacttctgttcttgtcatccgcaactcgtgttcttctctacttacagtcggtattgtttcaacaaccactctgaaaggccgttctaccgtcggatgggacaggacgaaggagaacccccatccgggtatctatcctttaaatcgtgtgttcactcatacatcgtgaaacagttatacaacatgaattcgtacgatcgtgtatcccgttaaattagcaaggtaagcaccaagaagatgaaacaactgaacgcaatgcaatgcacaggtccagatgaggaagggtaagaaaggcaaattaaactagagggaaaggtagaacgaatacaacgcctagttccttcggacgtcggtcctcaactcgaagaacctccaatcatctgatcctctatgatcccatccccatctgactggtgtctctggctggatctggctgcagataggataaggcgagtcgaatagacctgcttgttgacctaggtctttcgtcgctcttctcacgacctcggttctgtcagtaggagagaatgaggtcggagaagggtgtcgatgggaagcaaagatgaggttgaaatcgacgtcgatggattgacaatcgatcgtaacttgatggccaaggaaagacgaataaatagctccaaccgtgaggatctcggttgatgaatcatcttcagaaggagaaaaggacagataagaggaaatggaggagggaatatgtggccaggtgaaagtatatgccgcaggaggcaatggaattgaaagtggggtcttagcgtaccgaacaacccggacggaaagagagatgcgttttggttgatatcagataggattttctctcataaaaaggaaaaggaagagaaagagtggacgaagtcactagagacgtacaggccaaacacaagtttcctttcctctcgtcatcaaacagagtcctctcatctctgaatctctattgaaccaaacttgttcgacccctcctatccatttgcttccacctccagatccagctccggaggtagtgctgatcccaacagaaccaagaacgctacctacaaatgctttcacgcttccccctcccgaggtgctatcgacgactacagacggagacgtcgagctcatttctgtcggcccttcagtggacgcgccgaatgatcgtcctctagctcggttctttcccttcacgctccaccgttccctggcggcttcccgttcatcagcgagagtttctctctgtgcacgaccatgtgacgtctgcgctgtcgatgtcgcgttggtagaaccgttcgaggtggtgatagtctttggaggggagggggacgcggacgacgtcggccaatcaagttcgatcaagtgggccgagtcgagatcgattaggtatgtctttccgcctgaaaagttgaacaatatcgctagagaactgatcgatgattcagccgaagatggagaggaaagagaagcgggtgatgcagatatatatgtgacgaatgatagtgcagagagtggttttggttgaggtggcagatagaattcctataagatccccatcccgcattcaaacggccaagtgtcagtcggactttgtctgatttcgtcagacatattaagagaagagcagagactcttaccctgaaaaatgcaagctcgagctcatctgttcttttgtacacacaggccgtccccttcccactgatagccactaaactctgtctctcggttgttccatcgttgtccacccaaacttcgatcaatcctggatcaaacattcccgccggtaggctcagcagctggaatggttttgcctgttggtctgatcctgtttcagatcctccttggctagaggtaccatttgtctccagtcctgctcgtccaggatagggtgaaacactttccgatcggggcggaaattcaggcacgtcgtcgctctgaacggtgaactcggagactttgtcatcgtggttgcgatgagaagactggatacggcgtttgatacttccagagatggaatggtgtatgtttaaaagtggaacgttggcatgttgagtgtgtagagcgccggcgagtgtccgcagaggttgaggaacggagagcgaaagcgaggaggtcgcagaggaggaggaagagggaatagatgatttaaacgatgaggatagagtggaggatgtagaaccaagcgggaaatcgaacggagttggcgagtcctaataccgtgtacccaggccaggctgtcagggcaagcgcggcaaagaaagagccgaaggaaaaagagtgaaagaattcttacaatcgatccagagatccacatggccatatcagtcaaatggtcccagtcccaaactcggacttcgcccttggcatcacctgctggactatggcagagcatgatgacctgatcccttcccaaagctttcatttgtctaacccctactccacaaaagacgcatctcgccggttcttctctcactggatcaaacacccagagtccttctttggtacctatcagtagaagagaggatgaagtggcgcccagaggaaagagacattggggtgcactagctgaagagggcagctgggagaggaatcttgattgtccaagaggtttatatactgcctgactgggagtcagaggaacaggagcgagtgaagaagtttgcgcagcttcgaatgaagaggaagaggcgacatgaccgaccgtagccgtggtcgtgatactttgaacggacggttggtttttaaggacatccgctgaagaagaatgctgtgacgagctttcgtggacttgagggtcggacgaaggtgccgaaggaggggagaagaaccctgcctcgatttctgcaggtagaagaggatccgagccactcctaggtagataattctagttggatttggtttccccagtaaagagacaaagagcagacacaatctttcagtttccatgagactgactggttcatagaagattgagcgaaagagaggagaatagatgaacgaacaccagcgccccatcccaagttgcttctccttctgttttctgccagttgatcctccaatgcatgttgctcatcaagatgcctctctccggcccttttctctctggtatgagcacgtaaaaagtatgaaacaggttcgcattgaatcagtagacaaaagctagacagaacaagtcgattctcacggtgatagactcacatccagcctttccatcttccgaatcgttgagaatctccgcttccttgcgacctctctgcctgttctctcagatggtcgtacgagggaagctctccgactatgtcgtctgttccctgttcgctatcgatcaagataccttgagtttctatggcatccaccgtgccctgttctgaagacgaggtgggctgtgcgatcgagccatccgttcgaggaggcaaggccggaggaatggcaggctgtgttatagctaactcaggtggcggaggaatctttcgcttcggattccgagtcggtcttcggggcgggagaggtggagcattactgaacgtagccggcagcggatctggatcaagtttgtgccaatgtggtgtggaagtcgagacatttcgcgggggaagcttcggtggagagacgatagaagacgggggaacagggagtggccgaagaggaatcgatggggaagcatggacaggaggagggggagcaggaggaggaagaggaggacgacccgaagacatgtgtacttgaggtagtgatcgttgagcaccaaaagatactcgaatgaaacccttgaggtttccagccacccttgacggacgacatgctttctatgtgcgcagggtggaaaggttgatgttgcgtgtgctgcttagctatgcctgccggtgctcactccgatctgcctctaccgctcttgctcggctcctcctctttctaagaactgcgagtcccaaggctggaacatctcatccaggatcaactccctcctcagatcgtatctctctcattctcttgcgctctctcttgagcgttccatcgtctctgggtgttgatgggattgtccgcttacgacatcacatctgccacgtgcgcgtcattccgcagcagctttccttcggactgcgcgcgaaagtgacatcagccggaatgttagaatttcaagaatacccggctacaaagtcaacggctcaatcacatccacacccgaccgggatctcatctatagggctcggcttgttctctggtttattctttcatgggtagtgtatcagatgatgatccgtctgtgcttggacagcagaaacaccagaaacatcggcggtcttcgcggctctcgagatacgatcaagaccattcagtacccacaatcaatcgatagtcagtgtgtctgttcgtgatgcccgccatcagcgctcatccctgctcatctattggtctcatttctgtctggtagcctggagaatagggagcgagagcacgaagacaattatgatggagctttgagtgaagacgaactccaggaggcaaaagaggaagaagtcaggagacaagaggatgaagaagaggatgacaaggatctcgtcaaaaaacggatgagaccttccagggagaaaaagacggatcaagtaagttcttctttttattggtctcttctttctttgagttatctgtctactcactttgattccgtcgctctccgtgtctcaccttgcttggtttggtttgcgtcgcaaaggtcaagaaacagaaggggattcgcacagtcaaggatcctacaactgggttcgcagttactatcaaagacgcgcatatgaaaggtcggcattccgcccacatgctctgcagtcaatatcatcagactgactcgaccggcgatcttctattctttttcctttctttctcttaccggccttgaacatgtaaccttctcatatattaaagactacccacgcccgtcgaaactgacatcaattcaacctccgccatccagggcagacacccatcactcccgcccatcacctaaccctgcacacccgaccaatatctctctcctcccgtatccttgcatgtcctctccggcactcgatcgtgtcacccaatatctcgactggttttcggtattcatcccgttttccctcgggttactctggattcttacatctcacactggtggctggcccgcttggacgttcaatacaatcgtgctatccatcatgggagcatcagggtggtatgccggacaagaggcaaaacagatggtggtaaaaggaagagccggcttgaacgaatttccgtcaagagaaaaaggggagtccttcataactccgttgcccgagagcaccgaatggcttaataggctagtcgctgcatgttggaaattgctcagctccggtttgtgtctcctccaatgacatatctgtctgtttcaacatagtaacagaccttggtttctttgcatcatgtattcatgcgcgcacgtccaactgcacagaactgttactgcctacagtttcggagattgaagatacaattatggaatctataccctttctagataattgccggttcggagacatcgatctcggtgagtagctatcactgatattcatcttcaagtcctctagtcttataccggctccggctgacaaatcacgtcaaatttattcaaggggatgttccgttaaggatacattccatcagaggtctatccgatacgccttctgacaaagcgtgtgtgctcgtgtttcctacgtatgcatttcatctgtgcacatttctaatccgacgatcattctttcctatcagatatccacgggatgattggataaacttgggcaacgctcagtacccattggccgaagcccaatccggagactatacaaacctggaggttgctttcgcctacagtggtagacagaagcaagagggagagctcagagtaaagaatattcaattcaccattgaatttgttactagagtaggttcttatacttaagggatgcggctcgagccatgaatgttactgatagcgttaggtctttgtcggtagtttttcaaaattttcagaattcctatccccatttggatcagactaaacagaatcgtaggaaaagctcgattccgaatgcagttcatcccaatatttccctacatccgaactgtggacatctgcatggtgcgccttcttgctcggtatcttcaactgttgacttcctttgacattgttgatctaaataaaataagattacatcccctctattctcatcattttctggttggcatattagatcggcgcaccagatgttgaccttgcggtatccctgacaaagtctcttcccaatatcctcgacctcccaatatgctccgcactgtttaatttaggagtaaacataggggcgagtacgctggcagccccaaggtcgatgaatttgaatatcaagaggatgttgaaccctggtgatttttcgtttcatgacatgtcatacaatcaactatctgattagatcagttgctgaagttacgactatcgatctgtgttcggatatatacctgatgctctgtcttatgaagctgctatccaggaagcgagagcattaggtgtattggtagtcacaattcatcacggagaatccctcagtgctcaagatcggaatgggctttccgatccttatatcatgtaagtccacctctactcatctttgattggcgactccgacgcttgctttggtctactgctgtcaaactgaccttgctgtgttgatatgcatgttcgtatacgggcaaacataaatcatagagtggcatttgccaagtttggtaaaccactgtattcaaccaggatcatactggaggagcttaacccggtgtttgaagagacttatttcctgttggtcaacccagatgatgtaaaagccgaagagtcgttaagtctctgtttgtgggattcagatagtcagccctcgtcctctcctttctctaacgccattccttatctaatttgtggctctccactaatctgcaatctcccctttctatgcttgcgatttagaattcaaatcggatgatctaatcggaagaggtatgcataactctcccaatcatcatcatctgtttaccaacctcgttacgtccgaatcatcacttatttgagacgtgtcttcctggcttcaacagtaaaccttcgcctcttggatataatgaagagtccaaacgtaatgcatgcccgggaagacgacttgatgggcttcgaaggcaagtccttcctctctcttctatgcagtgataacactgcaacatatagcggataccatagctcacctttgtaacaaatcaaatggacacatagacgcaaacgtcatgcaaggcaagcttcgttggtctgttggatattacgaacgagcgcaattattgaaatcgatggaaagacccgatgagcatccacccgcaccacagagaatgacactggtcgaaaaggagacgatgattccaggagagaaagccccgtttccagctgtaacacctccaccagtgcctgctcgctccacacgaacaccgtgagtcaaccccatctaccctcaagcgcacgtgttcttttatgttctatcatgaggataccgacactgaatctgaatgtatacataataggccgcatcctgattacaagtcgggtgttctgtcaatcatgttaaatcatatcaacggcgtccgaagaaaagaaaccgaagcctctgatgtgtgtccttcgattcttctcttccattgcagcgttgtggtagagcgctgatgttttgatgtttaaacagactgatctgacgccgcccagtccatatatcgaggtgtatatcaacggagaactaactgcaaagacgagagttcggcagttcacaaccatgcctttctatatggtccgttgggtatcatttgttggcccttcgcaaccttcttttggatgatttccagttgggttctcacacacataaattaacatgcttggttgttttcattcactgtacaggacttttcagaacattttgtgcgcgattggaagacatcggttgttcagttcgttgtcagggatgctgcttggtacgaacaagacccaatactaggcattgtggtcctaaaccttcaggatttgttcgagaagtctagtgagaccaccgagcttttccctgtacgtgtttcttctctgcccctcatctctttttgagcttacccgagaggatctgctgagcttggttcgatctgcatagatgcatgacggagagggatctggcagtaagtgtctacgatgtgctgttcttctcaaaaaaaattcccaggtatagtcctcacgattggttccttactctccatccaggtatacatgtctctctgcatttctctggattcaaaatggacctgcctgccaatctgtccgggttggaaaccggcagcgtctggttgtgctcccctattgttcttgacatctttccttctcatcaaggacttgtcaaagatcttaaattccttcggctagccacacatgatacgaccgaaaaactatccaagaaagaagctacggtggagggtacgaggataacgtgggacatagaatcgatccgattgccagtgttcaaccggttccagacgaacctctcatttcagttcttggaaagtcggagtttgggagtaggaaaaaagttaaatgggatttcctctctttggttgcaagagttggtggatagagaaacaaggcaagtcaggttgcctatcattattggagaaaacattgtccagcttcgacagaacgtgagttttcttgtcttctcctctcaaacgtggtcaaagatgactccgtactgacgacccggcatgttactgctcgttgagggaggaagtacttgaacgagttttgcgcgaaacatcatgagtatgagattgtcggttggttgagtacgaccgtccgatttgatcctggcttggacagggtatgttccatcgattctcctctttgtattttcttttttttctctcttttttgctttctctttttcaattaagaaaatcccccttgttgttcctaactgatggccttttcacgtcctcactggttgatggatttacattgacgtagcaacatgaaacgcaatgcaagacccaagctcaacgacatgcgtatgaggtttgggacaaactcttaagagccaattcgggagaagaaacgtcgataaattcgccctctagaaagattgctcgggtttgttcttctttccatcatcttttcttcttcgcttttgttttgatctattgacactcgaaacgattgaccgacggatcggatcggatcgatccatttgttgggtgagaaagtctgaaacaagagctcgtagagaaaaccgtgtgaggaaatctatggaaagcacccgatctggtcaaagaacacatgaggctcgcaagtcagtaccctcgctctactgttgttcttctgtgctgataaaccacgctgtgcttggactttgatgttggttagaccgatcgacaagttcatcgatagactaaagcacccaaggccctctaatcactagcatgagaactgcaacaagacggatgtttgcgcggcgcttcgctgccttctggtgactagatatacaacattgtatcaaaacatggattctgtatggtaaaataagggatagacaatgcttcgtaacttgatttttattcggtacctagcgaggtgaaggaattattttgttgtgtagaatatgaaagcgtaaaccagacaaacgcatgagaaagagagttgagatacagagggaaagaataggatgtcgtacaagaagactagttcacggcgaatttagaagttgctcttatgcgagctccgtatttatagaacacaaatgggagtggtctaaaattcaaagtaaggaaagatccgaagacgcacagaacaagataagctgaatttgtataaagccaagtttaaaacaaatagataaacagacagaaagacttacgctaacagggtcatgattccacccaacacacaaccagcacctacgattcctattcgatcatacatctgacttgcaaatagagggaatcctccagctagcgcacatctcataaaacagtttgcagacaaagctgatgctgcgaacggtcggtatgcgcttttaggtgaagagatcttattttagtttgggggttaaaatagagctacaaagagaagaaagggatcgacatactcgacgaggaaggtgaatacactagtgaagatcaaaacgagtccaaccccaaacggaatactgtatatacagaagaaaacagagacaggtcaacctagagtatctttatctctatcgatttgtaagactgatatgctcgtacctcattataataggaacgactacaaatgatccaaaaacgagaagaagtcagtctacatgtttgcaatccgagtgaaagagaagaaaccccagatacatactccaatgaacactcttgacggaagtaccagcgaacaagaaaagactgataggaacaaggatagcacctagcattccagagtagagccttgattccggtggtgcagaacccccatgggctgtttgatcccgtaagtacagcctagtcgtgagaggatacagaacaatcagatcgggcgatcgaagagagaagagagacgcgaaagagaaagaaaaagagaaataagatactaaccgtttccagataggtcctgtggcgctcgctccaagaattcctaatgcgataccgataaaactaagaccagactcctgctggctaaaatcatgaagctctccaaatacaataggaaacgagttgaactctaagtagagtactgcaagaagacaagaaacccagaggttgaggaggatcgccatgggttccatagtgttgagctctgaaaggaaaaggaaaacaagaataaaacgaaaaaggaaaagcaaacatttcagtattaagcgtaaagcgaggagaaaaataaaagtaaaaataaagaggcggaagtctagaatgcaactgactgaatgggatcaacacactcttgctcaatgaatgaatgaaacttttttcttctctttcagattgggcatagtacctgtcgtccccggtttgttttctgatccgggcggccttccatcggagaagcgtcgggccgtgtgtctccggtgcaaagattacgagagcaatgaattgtatgaatgaccactataaggtgtaaatttgacggatgtcgatgagcatttctcgagcaggaaacgccaaagcgcgagaagtacatacgatcataaccatatagtaagaccatcgccaggaagtgttttggttgatgaaacctcctatgaccggacccaggacgggtccaaagaatggactggtactataaactgccatcggggttcccagcttgttatttgggaacaagtcgctcacagttccacctgcgacactcaagaaggcagctccgacaaacccagagagaaatcggaagatgctagtggtattttaaagaggacgggtacaaggaaagactctcagggacgttctttgtagatggatgagatgacaccgacacacaaggaacacatacaaatgaacaggggcgttgttggcaaaagcgacaggaatgttaaacactgcatttgttgtgtattcgcgcgtcccggatttggtagacaaaatatatggtcagctgccttggtgttggatgaatgacagagtagaaagaagagaaacagagaacgaacgaaagaagcaaccaaacgctccgtagtaaactctgtttcggccttggaattctgatatcggaccaaggagcagcggacctaacctacgagaaacaggaacccaaacgcgcatattcactcagcagagaggtgggtagaggagataaaagaaaagacgagcaggagaagaaagttcaaacttacgctagaccgaacacaaacatagtaatactcaggattgcgacttctggggagagattcagatcccgttcgattccggcgtaggtggaggaccctatagagctcgtacaggtcctttgaaattgaagatgtgatagaaacaagccacatggacagactcgacagagagttagtagtgaagaaatctcgaacgactattgtgaacgattgagaaagacaagaaaggcatacacgcaagcagagctaccgctcacgatcaacacggccacccattttctccactgaggcaaattccatggatgatcggggtcgtcggtaccattaatttctactaggaacgggtccttcttgtcttctctttcattgttcgtaacatttagccttctatcgacggtgttcgtgggaggctgtttctccaagtcggataccatggtaggatttggaggagagccgggatatatgagctgtcgagatcgagagacatcgagtgtagtagatgagaccgaagaagacggggtgagtgagccgatacgagtgtccagctgaaattggcgttcgatcgtagtcataaggagagaccaggctttaattggcttgcgtgtgagttctctgataatggatgattctccgaggagagcgaaagtgacaaaggctgatgttaaaacagacttacctagctatgggtttagggtttatataactctctgttctccttcttctccttgtcgaccttgctgaagaaccaaaaaggagttctgtgagtcaacgagaagtaaaaacttcgattggacaaatacaaggatatggatgatcaagctgctactaaaaataagttggatgtatgattgatcagcgagccagtagaaaacccaacaaggaaggagtgtaggagccgaaagaagaggacctactgccgagttgaagcgaggaagtcagggagcaagcgagaacagatccgtctcctgttcttgatgaaacgtccagacgaccagctgctctttcagcacaacagaagaagaaatcctgatgtcggtattcattctaccccggccgagtcggtagtcccactcctccatcccccaaccgaccaacccatccctccgggccgccggaactgttcggagccaggctcccgactacagcggatcggctcggtctcttgctgacggtgatgccgagacgaatcggccccaggtgcccccaaatttgcccataatttccgtctcgcgtgtcacctgtgaggattatgccctgaatatcacatgcctgtaaactgtgactggtagtgtcaggtgttgagattcaggcctggaagggtaacggaaggtcacagcaatcgtaaccaggttgagaaggtggatagacaagagagaggtcataatctcgctgaaatactgtgcaaccaagaagacgatgcagggatcatttggagttgggcacaagattgtgaatcacaaggtacagggaataacaaaggatccaggcttgggagaatatgtaatgggtggcaaaggaaacctgtcttatatgtcatcctcaatatacaacagtgatgcataaatgaacagaaattagggtatgctagaaaacacctgcgcccgaaggatgtacacttgcaggtcaacgcatttataacagtaggagaaatagagaaggagctgaagagacgagacagtcgaaggttacagaaacgtaacgcttaggttacgtttctgtgatcgatgatatgtgactcacgtgcgtgtacacaaccctaacaatttcggtcctcgccggtttttgactcgacttttctttttttcttctttttttcccctccgataaagcgacaacagaaaagatagagagaagccactcactcactcgctcatccagccagctagacaacatgtcgtccccaacacaagtcctcgatatagaggcactccctgcatcacgtccgatcacgccttcagtcaatgaggagaaaaaagcgctaccatcagatcgacgccactcgatggacgatgaagaagaggaggacgaggacgaggacggttacccgatcggcaaaacaggctacagtatagaacaacaggccacccattgggattccaaatggggcgcactcggtaaagtgtttgcctttctaatcagacatggttgtgaggctagaggaatccaaccggtagctctccaggtgggtcttaatctttctctttcttcttcgacctcgcttgcgtttggtcttgaaaaatcctgacctgaacgggtttttttaggaccgagagaaagtgactccgttgagttatcttatccagaccaccgtacgtgttcccatgtggtttctctctttctttctctcgtgtttctctcgttgccagctacacgtttatgacagctcatatctttctttccttctgaagctctttgctacattgaacgccaacattctcactatctcggccggtgttcttgggccagaactcttcaacctgcctctcaaaagttgtgttgctaccatcctcgtcttcaatgcaatcgccgtccttcctgtcgcctatttgtgagttttgtctccgagacttctcttcccatcatcttgacgcgtgcatctgctggtctcgatttaattccgttggccttcactttagcgcgacgtttggtcccaaattaggactccgtcagatggttctctctagatacacctttggaaggtggccaaacctcgtaccagcagtccttaatgtttgcaccgctgttggtttcctctctctcacttctatcctcggtggccagctcctaagtctagccagtggcggaactctcagctggagtctaggaatcgtcctcgtcggtttgatcggaatccttgttagtctcttctcttgctcttttgtgtgtgccctattcaagtcaagtacaactaactgagatccttctgctttcgattttcctagccctcgttcctcggtcttcgagcaatccatctctactccctctctattctaccgatctctctcatcatccacatcgctatcgtcggtctctccgccccctcacttgcttatgtgtctgaaggagaacgtgttatgaatgcgactaccaccgccggttctgtgctcggctttggttccactatcattggtttcgccgcgacctacgcgtcgttcgcttcagacttcaccacctatcttcctcccaatacgtccgctcccatcctcgcaagttgtgtctggatcggcctttttgccccacttgtcctccttcagatcctcggtgcagcgttctatcttgtcgccatggctctgcccagctgggaccaagcactcgaagcgaatggagtcgctggtctggtagcagccgctgtgggaagtggtgcaggtgggaaatgtctactagtgctatcggcgttgattgtgaccggtaacggaagctgtacagtctacagtatcggtctaagtgctcaggcggctgctccctggttgatgcttagttcgtctttctctcttctttgtctgtgcatgtatatgtgcgccagatctgaacatctctctttttctgaccaatcagttcccagatacttcttggccttgcttgtcacgttcgtctatgtcccgatcgctttggctctgtcatcccacttctcgagctatcttagcaacttcctctacatcctttcctagtcagtccctctttcttcccgcttcttgcctacatatcctcttgttccgattgagtctgatacatcctgtcctttccttatctatagttggatctcgttgtacgtggctcctctagcgtgggagaacattctattccggaacccgatcactgtcggtcaaggagggacatacgatttgaccggttggtcggacaagaaaaagttgcctataggttatgcagcgatcgccagttgggtcgtcggcgtaccggctgtcacagctggaatttctcaactctggtgggtcggttgggcggcggcgaggatcgaaggtggaaagggtgacatcggcttcatcctgggcttctcggcctgttcccttgtgtttatccctgcgaggtatgttttcttctctttcgctgtccttttttttcggagcaagaaagacactgacgtggtatacatttggctgattcgcgcattcataggtacatagaaagacgatacatcggtcgttaacttatttcctctttcttctctctttctctgtttctcatttgagttggattcggggaagaacaaattgaacggaacgaggtttcctggacgagtcttgatcccttcttgccattatccttcttcttcgctttctgctgtttcttccttctcttgctttctctgttcttcatccttttcttattttcgctctgggttctttgttcttccatcttttcttcgacctttcgatctcgatttcaacatatcaaccttaaaagtaaattattaatgatctaaacatctcctactctgtcatcacacctcttctgttctctgatatctttgttctgtggtcttcttcctccttttctttttcttctcttcaccttcttatctctcggcttgtctcacgccaaggagacggaacgcggggcgatagaaatcctttctgttggcaaaagtcagaagggacatatagatgaagagtgcagcaagtatagcaagtgtagcaagtgtagcaatcagaggtagatgggcattgactcaaaagaaagaagaaaaaaaaaagaagacgaaaccgaatgagaagcgagtagagattaggataggacggatagatgcaaacacatagagaagacaaagactgaggtagagacaatggtgaatggagtgggaagactatagtgagtactaaatgagtcaacagttacgaacgattaatactcgtcagttgatagtcgataatttagtacctaagatttaaaagaaaagacgggcagaaggtcgaaagattgggcatgtgtgtcctcgctctcaagaagaataagagaggaggagggaaaagatacgaatacgaatccaaatgaggaagaaaagacatctaaaggtgaaataattgacatgaaagaatagaaagactatgggcagagagaattgaaggaaagatcagaagatacatatgtctccttgtttgattgaatggataattacagaaaccggacccaagggattggaatcaaagaaaccaatgaatcaaaagaaataagcacccatgaagaaagagacgaacaggaacagaaacaagaaggagagcagtagaaaaaggatgggaacagaagccagaatgtgattacgttagtgatggaggaaggagatcactataatggtccatcagttcggtaatcgatttgtccttcacaagctcgattttcggattgttaatctgaacgatcccctcaaaaattaatgatatgagctccggaagcaatttaaaccatcaaaaaaagagaaaggtgccaaagcagatgaagaaaacgtacggtggcctccaagtctcctctacctctacatagtgcaacccacaaggacgcttggaagctcgcctggtaggcacaatcatcctcaggatcggttgaggcgttagcgtacgcctgatgcatgttgtatatacagtccagctgttgttttccggcaaggatgtatgcaatgagaaaggataagagaaacatcaaaaggtcattggagatggatgataaaacgatactgaccacttcattctcgtacgcttcaggcaatcgggtaaagttctgatacacaatacggaaggagtcagcccgctttagaagaaagaagagaaagaagaagaagaagaagaagaagaagaagaaaggaataaaaaaggcgtactctcgcaagccaaacacaagtgcccatcaaaccggtgttgacgcaaccatgagaacagatcaacagatccttcatctctgtacacacgaacgccaacacgcccaatgcagactggatacattgtgtgaaagcgacgatgctctcgtttgagtttgaaactacagaacgtttactgctactcccattgctttgatgggacgaagtactttcccccagggacgatggagtaagtgcgttgtgtgatgtcgattcaggcttcaaagggaactcggcgagctcgattcctagagatatacagtcgatctcaaaggcgatcattctaaagatcgaaacaaagataacacatagaggagtcagcattcggctaagaacgaaagaagaaaagagaaggacttacagagaatagtatgtgaccatgattgaactcttcttcgtcagaggagtgttgattcggctggctgtaaataccccgaataaggtcagagaagaagactcagtggtcaacatcaatctactcaagtaacaagagaagaagcgcaaacgatcaacttactaaagtaacctctatcccacttcgtcttccagctcttcagcttgtcctttgcaaaagaaatcagcaactttctagccgccgtctctgtcgtactcttgagacaagcaaagtcaaggaagacctcgataagctggaagataatggcggcgtaaccatctgctgcacaaggtagatgcgcatgatcgagtggccagtccgcccaattcttgaactcgagcggtcgaacgaggccggaacatctgttatcgtccgagaggcaagagaaatacaccctgacgatcagtctgtgattgaaaagcaaagaggagagggagagaagggagaaggcagggaaagacacatacatagaggcctggagttccaagatgttgttatagcatatcaaggacaaccatgtcctttctcgatcctaaagggaacaagagagcactcgagatcagtttttatcagcgactcgagagaggggacgtctgtactgaagtagagaaatccttataatcgtagaaaggagaaagactaaccaggataagtctggcttcaaattcatcttctggcaacggtcggacatgagggccgtccagaccgagttcatatgccagttggatggctaatcatcaatcaaagagacagggcactgtttcagtatgactgagctctgcaaatgatcgaattatgaagaaaagaaggaatttaccatatccctgtgaatcaccattccaggttggagagacaagccacaatttaaggtatcaaacactactcagatggaaagaggatagaaaaaaggcataaagaaattcaaaagacatactatgaatctccacatgccaaacccgtggacgtccctatagaaacttccgatgcagagcgcctgaacgaacccaatctccctgactcctctggcaaaggcgattcctaaatctctctcgagcgcaagcgagagtgctgggtagagctctggcatgtataccttcgagacaacggtgaggatagtggtaaacaggatgggggacgacgcgtgtgtgaacacagcggtgtgtagcgatgggtcgaggagagcgatgagagaagtcatgttggcatgatacctaccaaggtgccaaggtatgaaaaggaaaggatcagtacacatacgtggtcatgatatactgagactcctgcgggaataggagaaagcatgagacacaagctcaaaaggaactaacgtgtcaaacaaccagacgacaacatcccaactgaccaaaccttcctcccaaggcgttctccaccctttagtgtttcccttcttctctctctccctcgcaatatctctgtgcagctttctcgatcctttaaccctaagggcggccatgcctgcaggcatggtcgaccgaggtggttccacatttagactcgtcgagtcccagatcatccttcgtttcgcgggcggtctggcttcagaatacgtgtcgttcacgttcccattagcgtatccgttaaggtgaccgttgtggattccgttcccgttactaattccattcgtctttgcatcctcattcatagaatcatcaacagcctccttcttgaattctctccatgttctgttggggttgtcatttccgttcccgttcccgtttccggttccatttaaattcgcagtcatattcccgtttgttggaccatcagagttcccacccgacggcgagctcggtaggatttttcgtttcgtactggatctatcggattcaaaggcggaaggtgacgggacggattgggctgacggcatgaacgtgccgttcttcgcaaacggcagcgactgatgagcctgattggttgactggtatatctggtcttgctgtgtggacgatggttggggatggggaagttgatgtgatgaagtgtactgagatcgagattgagacggcggccgagattgagaaggtggtggaaagtacgagctggaaggtgaatttgaagtcgagcgggtggagcctatcaatgtccacgattcttttgatgccccagatctgccggtcggaggaggagggaaatatcgatttgagctttggtttgagtatacgtgttcctgagtagacgagccggctggttctggtacactgccttgtggcgtgggcggtggatatgagatcgggccgactgttgaagtcatactgggagagcacttgtctgatgggaagagttgctgtggcatcgtttgatgatggttaggaaacgggggaggttggtgttggtgtattggctgctgttggttgtacggataatggaacgaaggaccagaaggagctggcatggacgggtcgagcgatgagggataaaaaccgtacatgttattcccatcttgatgtgtcgaagggtatccttgtagtggctgttgctgcccgtgagtggccgtattcggctgagtagaaatctgtgaagacaccggaaacttccatccgttcacgttcatcgacgaaggatacactgctcccatattatcctgacggttggtggaatgttgttgttgctgccggtcgagatcatgccgagggtaaagtccggccgagaacggatcagctgtagggggaggaaagaaatgggcaacgttcgcctcgactacctggggtggaggaaaggtggatgcggatggaaagtactcgtccctgggatactcatccgggcgagaagccgatggataatgtattggtggtggagttgatgaggatgagggttcgttgggaaacgacttgagagaatttaagtttggctcagggagcaggacatcttcattggaaggcacatctgactttgatctgtttgatctgggagtgaagacggaagcggaagcgggggtgacggatgaagaaggcgcgtaagcgaatgatgctcgaggcgttctatcggtataaacagaacaaggaaaggcaatgacggatcaagattggagaaaaaagaaagtaacctacatgtttctcagtccgggcttcctccctcgtttcttttggaaaaagacgcattcaagtttgagtttgatgcaccgggtgcagaccttggttgtcgaatcggacgcggatgaatcgaggtgacatttgatctgttgattccgtgtggacgcagggtttcaacggtaagaggaaagagagaaaagaaagaaaaggatgaggcaagaacgaggcgagagaagaagcgagaggtgagaccattgaaaacgacagaaagagaaggcgaaagagagagaggcctaccttcgcgactctgcaggctacacatgcttccggctgcggtgctttcgtcgtattcttcgccgatagcggggatggattgatcgacatggatctgtgttgacaatgagcgtatgtgtgtatgtgtgtgtacgtgtgtgtacgtgtgtgtacgtgtgagtacgtgtgagtacgtgtatatgttggcaagagtcagagtcaaagcgaaggagtggacagaaggtgaattcactggccgataaacgatggcactgatttgggtggggtgtaaccttggatgtatgtgtggctgtgtttggtaaccatgttcgtgcaaacacggcgaaacccatcaacgttcatgggtcatcgggcctatcctgtcgctcatctgttctgatttgctttgttcgtcgttagtcctctcccccgcttctcttctttttgttccttgccctcttcctctctttcatacctcctgtcgacaacacatctcctcctcaatcgttcaccatcagtagccgatttatcgaaaatttggaagaagagtgagaggattagaatatcaagatgatacaagcatggactctatcggccgtctgcaatttggaaaaatccatcgactacgccatcggcacggaaataaattctaaaatgtcgaggggcatttgacttcctcgacccggagaaaaggaactcgtgctttatgaaaatctgcgcagcgaaatttgacacttggcgagaattttcacgtgactgccgttggtacagctttccccgtgctcttcctccacacaccccatacagtcttgtacgcacacccccttcaccgccctcactcgctcgtccgatttctagcagaaagctaagtcgaaccgctcgaagagggtttttgcaaagagaaagtgcaagagcaagtccttcttctcttgagaacacatacatccaagcatacatctatacgagaacacaaggacttccatcgcgctctccttgatccttgtctttcccttaaaagtcaattctgtcggaagatcacacgatcataacacttccgtcatccacatcactcatcctttcgatagtctcacaacacatcatgcaagcgtacgtccgtcgtcactccctattttctttctgctcatatctgttccatgagccagaacttatggatagaatgttcctgctcaatcatcagcagttcatccacaaggcaacgcagaagacagttggacatgccatcaaccatcatcagatcggccccggcttcatcctcgttctcttccgcctcttcgctctctcaatcaccttcgtccctcccctctcgaaaatctcgaccatcccgctcctcattcaactcgacatcttcctcttcctcctcatcatccgtgactgctcacccacctgaatcatcggatcatgggtcaaaggacgatcccagatgggcaaagtcgtcttcagcccagatccaacacgcccgtcaacaacaaacgttcgcctcttcgtccggactgaatactaatcactcgaaccgggatctcgcttcagatgaagagtactctgaccacgacgaaagtgaaagcgacaccggaagagatcgatcggccaattaccacgatctccaagatgatgacaatgacgccaacaatgatgatctgatgtcagacccagagccaggtgcctttaacgaggtctcccaactgggaacaactcactatctcccactcgtatttgtcgctcttcctttgatcggcggagctcttgtcgggaaagcagattggtggagggatgtgttagtactcgttgttgtcgtttggtggatgtggttcctgatcaagagtgagtttgcgcttcagcctattgtcctcgcaagcaaaacttgagaaagatgttgaaaattattatctctgttttttcttccttttctcttcttctctctcttcccggatgtctcttctctcctcagcgccttgggaactctatcatgaatctctacatcactctcttctcatccaacacgagcccttgacggacatgaccgaggcggacagctcaacttaccttcttgcacagacatctcttggtcgactcaacaacttctaccttctcctcaccctactcgctcccgctttaggatccatcctgcttcatatgacaaggtccgcgttaaccgaaggcgaccagtacatcaattcattcaacatcagactcttcctcctcgcctcttccgtcaagccggtcttgaactttgtcgatattctcaaaaaccggaaccacgctctcaagaatgccctagggaagatcaaaccgaccgaagccgacaagctcaacaagcgaatcaaacagttagagacactcgtcagagatctcgaacatgaaaaggccggtaccaaggacgtcgccgagttgagggcagcgctagtcgacggaacgctcggtgacttgaacaaggctgtcaagaggcaggaaagaagaggcgagctcgtcaggctaacccttggagaagttagtgcctttactgttctctctcactctctctctttccttggaatcgaaaatagagctttccgatgttgatgcatgtatgcgtgtcctgactacgtccttctttcgttcttcttgcatcacgatagagagtcgaccttctctcggcctcgttggcttccgtacagaacgaactagcacaggtccaagctcaacggtcatctctctcttggcttcttcgtttacttcatctttcgtcatcttcctcctcggccgcccgctatcaacacctgtattacaccgccgctccgaagaagcttcagaccgacaagcctcagggtcccctgagccacctagaccgggccgagaccgaattgactggtcgatctcttaagatgccaagaacggtgtctgctaagagacactcttatgccgtctacggagacaattttcaggcaggctcaccctcaaatgggttgcacacgcaagcacgaaaaggtttcgtgcggtttctctgggacctaagtgtcagttttcctttagcgatcgtcaaatggcctttcggaataaccagcaggttctttggcctcgtcggtggcatgttaggaacgggaggcaggaggagagatgagtaaggcaaccttcccgttgtactgttccctgttaatcatagtacgatgtttgtagcaagccccctcgtcctttttattcttctctaccctatctctgtatctttctgttctttccgattggtttatctctagttcccgtctctttcatctctatttacatgctgtctcgtcctgtgaggttgtacttgtccattaaccgtcttcagtatcttgatctatataaaatcatgtcttctcatctaccttcctcgcgtgttctcttgagctacagctatcgctcttcccgccacagaagtgcaccgctttttcaaaactttggacatgcgacttcaactttccgctgcatttctttcggtccttctctcctactcatcccctctattcttcagctcttctcgtaacaggtcggaaagatgcccaaggataacaagaagaccggaaaaggtcgtttgtgagtttttgctagacgttttctcaagcttcgctgcattttcatccgattaacggcttacatcttcttcctgtttgcctcaaaattctcttccctcttctcctttccctcgaaaactctgttacattcatatagggataagtactataagcttgcgaaagagcaaggataccgagctcgatccgctttcaagcttgtccagttgaacaaaaaatatgatcttctaggaaacgcaaaggtctgtatcgatctttgtgcggctcccggtggttggttgcaggtggcggctagatacatgcctgttggaagtttgattctcggtaagtgtcctttctctcctttgggatccctttctctttcagcatgcatcgctgtatgatagaattaggggaaatcgaggatgaaatcaggctgggccctctgaacgggctcttcatatcttgtctgtttgagttagctaactgggttcctccttctctgtgcttcgcttgactgttcgatatgggatcatacaaaaacgaaaaggtgtcgatcttgacccgatcaaacctcttccttcttgcacaacattcgtgtcggacatcacctctgcccactgtcgaacgacccttcggtcgcacatgcacgactggaaggccgatttagtccttcacgatggagctcccaacgtcggtaccgcctgggtccacgacgcgtacggtcaatccgaattggtgctcatgagtttgaaactcgcggtagagtttttgaagaagggtggaacgttcgtcaccaaggtcttcagatctggagattataacagtttgatgtgggtgtttgggcagttattcggaaaagtagaggcgaccaagcctccttcatccaggtgcgtatttcttccttaatctgtccgaccctcgtttttgataggttaggtgcaagggggaaaagactggatgttgattatcagagctttcctttcctttctctctctctcctcacagaaacgtgtctgcagagattttcgttgtctgccgagagttcctcgccccgaactacattgatcccaagttccttgatcctcgacacgtattcaaagacctcgcgtcttccatcgtatcctccgtgaccggtacatccgctggaaacgtcaacgccaacgtattcgccccagagaagaagcgaagacagcgagaaggttacgaggagggaaactatacccaattcaaggaggttggcgttagtgagtttatcaagagtcccgatccggtcgcagtattgggttcggtaaacaggatgactttccgagagccggaggagaaggcgtacgtttcccttgttttctcctatccatgctttcttctctccgtgtgtatattcctttttcgctttaaatgctgacaaactgaggttcgtttcgataactcttcagttggctcaaactcgagtgcactaccggagacgtcaaagcgaattgtgatgatcttaaagtgctcggcaaaggagatttcaagacgctcattaagtggcgactcgctctccgggaagaggtaccgccacgtttctttccctcatatttcagacttttctgtctgtacaattagcttacgatgatctgtgctctttctctctccttcacaaaagatcggaattgacgtcaagacgaagcctctcgaggacagcaccgagactgctgaggtcgaagaggtcgacgaggatgagcaaatcgacaacgaggtatgtttcttcattcttttaatcaaacggagacagtgaaagactaattcatcctgttcggttttcgtcattcttgattgtccgggacagctctcccggttgaacaccgaggctgctaagcgaacgaagcaacaacgacgaaaagcccaggagaaaaagatgcgagcggtgacgaggatgcaactccggatgacggcgcccaccgctgatggactcgagcttcaagacggtgctctccagggagaagagttcttcgatcttggtgaaggagagcgtgtcctccgaggggacgctagcgggagaggtgatctgggtgacgtgttggatgaagaaggcatgtctggatcggagagtgatcttgagaactctgccggtggggcggctcaagacgaagaggatgcctacttggattccgaggacgaaagagaggcaaagctcaagtctctcgagaacgagctcgacgggatgtatgacgactatcaacaacagatgcaatcaaaggatcacaaataccgcgcaaaggaggccaggcggaaggacaagcaccgagaatcctggaagggtatcgagggaccaaagtcggatgacgaggatgaggatgagggtgaagatgaggtcggtggctatgagaaccgggatgagaaccgagcgaagatcggtgaagaggccgatagttcggatgatgaggacgacatggaggttgatgatggagctgtcttagtcgcccggtccggctcgaacaagaagaagggaggtgctttgttgacttcgttgagcaacaagcaagaggagatctctggagccgctcgggtctggttcgatcagcctgcgtttaagggactggaggactttgatgacctcgacgaggatgaggaggatgaggaggacgaggaggaaagtgaagctgaggatagcgaagaggaggaggagagtagctccgaagaagaggaggaggaggaggaggaggaggtaagtctctaatcatatccgccattccggcttccgctcatccgcccttcatcctgatcacttggattttgtttttatcagatgtctggttctgatgatgacttcgagatcgtcccgcaagacaaggatgacgacgaagctggtctttgggatgttgaagatgaagatcaggacgagatcaagaagaagcgtgtccaaggtgtgtctttttggctttctctttggccatacttgcgactcacttgtcgttctcgcttttttttaaatcggatctctacagatcgaggtcttatcaccgccgaagcttacaccctggcttctcaactggtgaaccgggagaagacactgtctcaattgatcgacgatggtttcaacaagcacaccttcgattcgaaggatgatctcccgacttggttcttggacgacgaagccaagttctacaagtccaacgtgccgattaccaaggaggctgtcgaggctctcaaggcgaagcagcgagcacttgatgctcgaccgattagaaagatcgcagaagccaaggctcgaaagcagcgacgggcggtggccaggatggagaaggcgctcaagaaggctgatggaattgtcaagtaagtttcttctgtgctttcacctttgagtttttgaatgttaccgtttttaacaaaccatcactcttttctttcttttcaaccatctttgtagcaacgaggatgtcactgagagacagaaggccggtcagatcgagaaggtcatgcgcaaaggagctgcaaaggatcaacgtaaacccatggcggtcgttgtcgctcgaggagctaacaagggaattaaaggagtgagtttcttcctctgaacttgctttctgagtcctatatgtttcactatttctgacggttgttctgtgaatgtttttcttcttcccgctctaaacagcgtcccaagggtgtcaagggacgatacaagatgttggattctagggatcgaaaggagcttagggcaaagaagcgaaaggagaaggcaaacaagccccgaggaggccgaaagaagaagaatgcttagaactagttttttgacgaactcactccttcttcttctcctttcttcttcctgattacctttttggatgccaatcccttctttctctttcggtttctttgcggatagagctttatctttcttgccttgcctagtgtttcaaccctctgcgatcgctctcactcttcggttcttcctcttccattcttcttcccttttcccattcttcccgtttgtaatatgtacgtgctttatagaaaggaacacgtttgaagtttagaaatcttatggaattcattcaagcagactgtagaagaaccttgaatgtatccagaccaagtgtaatccctgggtatagccattcttacataatcgtcatgaacttaaccctaaccacaccgtcatcgatggtccctctcaacatctcgtccgtctggaagttgtagagtcaccttactcgatacccaaagatagttaacaaagccatcatgaagatcacatttacgaccgctcagaactcgtttctcctagaagtcccagccgacatgactgtaggcgatctcaaggcttttgtggaagtagaggttcgtttttgtttctcttctcctccttttttgtctatcaaataggtgaccaacggtggcgatggccatgacggtgacgaagatgatggttgtttaaggacgtgtttctaaagctaaccgattctcttctggcatctggttcgtccgtcagtcatctatctcttccttggaccaacggtggaaagtgaactctggagaggtaaatgcgttagatacaacgacgctcgataaacttggctgggaggaggatacgatggtctctctagagaagaagagttcaagctcagcgtgagatttctcatttatctctccgtatctacataaggtgttatgacatgttgaacagttcaattcaaaatcaacctggtatcatcagtcttcaacaaacccctgcagggccatcggctggactaacaaacacgaatgcattgactccccagcaaatggaatactttaagaaagtaggctgtctatctgagtgtgttcttgaattacgagggctgatatgacaggtaactgacactttgtgggttcttcttaatctttctttacgaaaccagatgatggcagctaaacaaaaagaagaaacgttgtatcgcaagttggaagcaaacccctgggatgtggaggtaagttcatgaccctcctttcttctctttcttattcgctagctgtacgtcgtggcccaccggcttatctgatttaaatctgttggcaacaaagtctcagaaacgtatcgaggaaatcatcaaccaaaaggcaattgaggaagcgtttgatcatgctatggaacatcaagttagttcaatcccactcgtcacttctcatgctatcatcatgttgaacgcaatcgacgttttgcctttctagccagagttctttgcacaggttgatatgctatatatcgatgtagaactcaacgggacgaaaatccaggcgttcgtcgatagtggtgcacaaatgacagtgatgtcgccggaatgcgctgagaggtgtgggatgtgagtgatcgtctcggataagaataacatacacgcatctcttgtagtagtagtactagtaaaaacttactctctccctctccttcacttgtctgacagtatgaggatggtcgacaaacgttttagcggggaggcccgaggcgtgggaaccgccaagatcctaggtgagtgttctgtcaggtcagcttgatctgatgtccgtaagtttcttttggaaagactgattgatgtagaatgattcatatcttgacggttgctaggccgggtgcatactgcgcagatgaagttcaagcatgtgtatcttccggtgtcgatcacagtgatggagggtaaggatgtggatctgttacttggattagatatgctccggaggcatcaagcggtgatcgatctatcgggtgggcactctatgctcaagattcaaggggtggagtaagttatcatcatcaaacactcttgctttcgcataaaacgctcctttgaccttcgacgtcttttctttccctccttagacttccattcttgtcagagcatgagttgcgcgggaacgcttccaaatgggctcgagaagccgaggagaagcgaggagagccgtcgtcatcgtccatagttgaatcaaaggatatggggcagagcgaacggttccctggatctggtagtacgatgtaagtaatccgctgaatctacttccttgcgaggtgtaccggagaagagatataaggactgaagtatctcggtcgattttgcgttttatctcgctagttcaaagcctccgtcatcgatcatcccccctaccggtccgggagtatctggatctggatccggccccggatctaccactgtttcagctggaaaaaaggcggacggagagttcccagagaattcgatcgaggtccttgtcggactaggagccagccgacaggaagctattggactactccggatgtgtaacggcgatatcgagttggccgcgagcagtttattctgagcagttctgcaggacgaggagaaaggcggagagaaggggagttgtttgaatgaaaatggatggatggagtaactcacgggggctggtcacgtgcgtgtgtgtatgtggtggaaacgaggaccgggcagtcagcactcacttcttctgttctttcttcttgctcatctgccggggctaaatccaaaaaaaagaaatagaattcttcttcccattatcgtcactctcatttccttctcgccctttttactccaccagtcgttattcaaaaagaagaaaaaaagagaggaataaacagtctggtgctcgactggcagatacacatataaggtcaaccctaaaggaacggagaaactcaagaagcaagaaggacgctcagagcagatcgattctcctccctccgtcgttgtcatcttccactctttcttttccatcgctttatatccttcctccttaccctccctagtttacatacgaaatggccgacacaagcgaagtacctgaggttaacgacgagtgttccccgactgagtggtcaaacagcaaggtcggactccgagtcggagctatcttcatcattctcgtcactagtatggtcggtgagtggtcaatatctcactgaacgagagacgaatacgttggctagtttttctgatgctgacctttctttcgcttgtttcactttgcctctctttcggttgtcttgtttcttcacaggtgttctcatgcctatcgtcgctcgaaagatcccggctatgcgagttcccaacagtaagaccatccaccactgccgttcttaacattggtactcatcatcttggcgcaatccattcttccttttgtttctcctctaggtgtctttgactttgctaagtacgctggatctggtaggtttttgtctattcttgccaatatcgctcttgtttcgccgtgcctaatttgtaacctccctccgatcaggtgtcatcatcgctaccgctttcatccatcttctcactcctgctttcgatgcactctcttcggaatgtctcaccggcgcatggactgtatacgttagtgtctcttggccatccttttttgatgtatttacatacctgaagttcacgaaactgatgatcacgtgtgaaattaaactacgcgtctccagccctggcctgcggcgatcgccatgttttcaatctttgctctattcttcctcgagttcttctcgttccgaattggtatggccaaactcgaggctctcggcctagaacatacctacaaccatcatggtcacgatattgaggaggccgaaggcgaggccggcgcacacaccttccatggagtcgagagtaaccttgaccgatccaaagagatttcgaaggcaaaaaaccacaaggacgatgacagcatagagagtgcggagcgacaaggaagcgtcttggcccagctcatgggtatcgccatcctcgaatttggagtcgtgttccactcgatattcattggtttaactctggccacagacgaacagttcactattctgtttatcgtcatcatcttccatcaaatgttcgagggtcttggtctcggttcccgacttgctttccttcctttgcccgagcgacttaactgggtgcctatcatgggtggtattatctatgcatttatcaccccaatcggtatggccatcgggttgggcgctcgatacagctatcaaagcaacgccaacggcgctctcatcgccaatggtatcctcgattcaatctctgccggtattcttctttggaccggtcttgtag

SEQ ID NO: 2620 - DNA, 3348 bp, Xanthophyllomyces dendrorhous
gtggttcgagaacggatccaggttttgccgtactaccgaggtttcatgagaattgatatgaatcatgagcatgctgggttgaaaccaagaacaaaatagaagactcacaagttcccgaaaacaggacagcgtctaagagatacgattcagaacgacagatgagcgacttgacaaagattaaaagcaagtaaagaatgtttgaacaaaccttgagggatatgtgatcttttctcgaagatctatacgtgttggtaccatatgccgatatatcttagatacacactcaacagccgtttgtgcacgtttgatttcgacataccttgaacacccatcttgcaaatatctagtccatcaattcgaattgtaccggctacggggtcacagaatctgagaagggagagcgccagagctgacatcgaaacatttgagtccatcagtgaggatcacagagatcatgttgaacgaagagagttattagaactgaacacttactgctctttccactacctgttcgtccaatgagtccgatcttctcgcctgcgttgatagagaccgtaacaccatgaaggacagagggaagttcaggtgcatatttcatctcgaggttctcaatcctggtcaccacgaagaaacgaatcaaaagagaaatacagatccacgcatggccgtatatcagagacggaacaacagaagatggaagaagaacataggaagcagtctggtaggcttactcgatgaagggcttggaagtggaggcagaaggccaataggccgggggtctgtggccctcaatctcgtatggtgcctcttgaggcagatggaggtctgtattttgagaagttgtgaaacctaatgagttggtttctttatgataaaggatctagggcgaaaaaactcacaggtatctattctctccaccgcgttgaatgccatctccaaattggtaaggtttcggcagaggaagaacaatgctctgatgaatccttgggtggcaaggatggccaaagcagaggatccggcggaggcagagtaaaaaagagcaaaaaacatggataggaaagtggcgatagctccaagcgtgtcgaatctgtattcccgaaaagtcaaatatgagattacaagcaacctaaggagccaagacggtccatgtactcaccgaaccataagccatcgatctataaagcagagaacatagggagatatcagttcagattacttcgtcgtcgtcgtcgatggacaataaaaactcactagtcatattattccagtagatcttggacatcaacttatcaacgttcttctcaaagccagacaaaaatctgctctctctatatatgtcgaagaaggaggaggatattagttccttatatgtaactgtgccagtaatcatgtctaagaatacgtacccagagaatgcccgcacagtgacaattccatctaggagctctccaaagtcggaaaagagtggactgggatcgactcaacctgtgtcagctccttcggatatactgttcatacaaaagataacgaaaagaacggaagcataccttctatttgtagacaccattcgagtaatatctcgtcgagtacgagtatacacaatggagacgaggtagtagatgaccgagagaacagaggcaggaagcaggaaccaaggttctatatatttaccagtaaggccaatgtcagaaaacaacaaacaacatcgaacaaatatgatttgatgcttaccaacgacagcaaccaccacgacagaagagattccactagcgatatagagcatggcttgccgaagagacatcgtcaactgtccatcgagtgacgagacgtctgaagaaaacctgttcaagatccttccgccaggaacagtatcgaaccaacgagctgtttgtgaagtctaagatcaacacaccatctagaaaagattgttcaatagctagaagctgaactagacttacctggtgccttgattacactgaccaacatgccatcatgaagctcctgggctgctcgataacctgccacatagctcaacacattctgggtaatctgaatgaggagcgagacaatggagatcacagaatatgcaatgaggtagaagaaaggtcgatcctgcgctcggggaagttgagtatttagatagacaggggcacccttataagcctctccccactgaaagtagaacacatcagagtcaatatcggagcaatacaagatatatttgcagacgatagagaggaacgaacaatcttgagccagaagtcagaagcgaaggaggcacctcgatagaccaacaagacggcgatgatcgccacccatagggccggtcctgaagcaaggatataaagtttatagattctccattccagactcgctgaagatccagaaaggatacacggaaaaaattgtgtaagtaagtcagctcaaacgagagtagaatcgaaggttacgcacactcagacctctcttcttctgcgtgcaattttttgggcttcttagccttgaccgccgaaatatccttctgatcagcctcttcggtatccttatccacctcattctctttgacgggggcaacgaaagatgaagagtccttctcatcttcttctagcaaagcgggcaaaactccagaagcacgcagctcttcagttgttccgattgtctcaattttcccagcgagcatttgtatcagcatatgcgcgccaggcaggagaagatcgacgtggtgagataccaaaacctggaggacgtataaaaaattctgagtgttaaacgtgatgtcaaaagaaaacaacaagattgcaaagacgaaccacagttctgtctctaaggagaggacctcgtaagcagtgctcgaacagatgccgcgccgttccaacatccttcacagagcaaatcagatcggtcagacaaacaaacatgaatggttcagggaaaaaaggaaacaagagaaaacgaagacaacatgggcggactcacaacggcagccaagacatcatccaacaaaacagtcttgcttcgactgtatacagctcttgcgagtgcaactaatcaacagtcgagattaggtttagtctatgtgttttttgttacagttatacaaagtaaattgatctcacctcgagccttttgacctttatgaggtgggggatcaaactgattagtcaagcgtttgtagataaatctcgagacgccagtgaatcttacctccactcagcaccactccccgaacaccgatttccgtttctaaaataaaaataaataagtatcaatgcgaatatcaacaaaacattgatgaacgatacgtaccatcaccatcttctaagacctcaagatcatgctcaactaatg

SEQ ID NO: 2621 - DNA, 1476 bp, Xanthophyllomyces dendrorhous
gatcatgctcaactaatgaatccaaaagataagtgagttgatttggtttccaagatttcattcatgttgatgatgagaaacgttgatcgaaacgtacgagcacaagcaactaatacatcgcgataccgggcttcgtcaaaggcactcccaaagatactagtgacacaaacaaagaccagtgtcagcggataaactagcatttatacaagaaaaagagacgtcctcacatattgtctttgattctatgtacacacgaggagtccgaatggaccaacgaaacggccgccaatttattaagtagctaaaccatgtgttttatgaatacgcagacaacggcagactcacgatctttgttgaaggaaagggttctgtgcgcaataactaacactagccagcgttccatgtttgggcaagagtactttaccactcacacattcgatctctcctaacagagcagaaagcaatgccgtctacggaccagtcggttcattcggatataaaaagcacattagccagctctctctatctacctctcacacggaggagaagagcggcagaaaagtcaagaaggatgacatgatgacgaacctttcctgatccaacgggaccgcttacgacggtcaacctcccctctggaaattcgacattgatctcccccaactggaacggagcggcttcctccgtaggttccgaaacaaccttttcggttgagttccagttgaatacaccgttctctatcgcaagtctataatcctggttgactccggcatctgtctttctaagggaagacacaaaatcgggtacttccgcttcatgaagcaagatgtgaagacagtcgatcgtcaattctatgcgaaaggggagagaaacatacatatgtgaattcgggtagacttacgttcatcgaaaaagttttcaatccgttcgaaggcaagcctcgcttgagcccaagtgatgagtaaattaggaattccattaagcggtccggacagcatcccgtagagtgacaaggatgtaaaggcgattgaaacagtaagttctccctttccaagggtgatgaagctaattttgtgtaatattaaatagaatataattcatatcagtgagcgttctcccttgcattgggatggcaacaattaaacaacgaaccatgcgaaggctgattccaaaaaagaaaaaaaatcgtataagcgaaacgtcagaacaacccaccacacttacacgcattggtcatttcggacgccaaaaacagcgatgagagagagaaatacacgtacaaacaagcatgaggatcaatggatagaggccccaaacgaacgtcgccaatgccatgttcgtccgtcctgcaatgatccacttgatttcttccattcgagcatccgtcgctttcttcatccactgtttctcccaagccaagaacttttcttacaggccacgtttagaagactcgatcagcatgtttgatcttaagaatac

SEQ ID NO: 2622 - DNA, 3552 bp, Xanthophyllomyces dendrorhous
accttgattaggcggatagagaggacaatctcattcatgacggtcattctcttatcacgagcttcgacagttcccttgttaatctgtaaaacacagcaggagaagaagaagtagatcagcagatgctcgacatatctagcaagcaaggaattgactcacccggacagcccgtttccttaattttgagctgacaggccagaggagaattaatgcggccactccagtaaaagcggaccagccgagcaattgatataagaaaacacaggcgatcaagatctctagtggaggagaatatatgtcggcaactcccgagatctggttggcaacccgctgaacatcaccagacatcatcgagacaattttctagagacgtatcatatatcagggtgacagcattagtcatggcggagacacaccagaaggagagaggtggactgcagaaacctcaccccaatatcagctcccgtagctttgggagctccctttccgtcttctaacgctgctccagacggcttggctcctctctttcctttcgaaaattccttcttcttctcctccttgccagatgggttgacaacccctgagaaatcttttcggacaagcgccttggcgtagatggcgctgcgaggacaattgaagaggtacgtcagtttttggataacatgatatgatggctgacaggatggaagaagacatacgccatgagagtcgatcgcgttctggtttctgttcgcgtatcaaacaacaggtatagagctgagcattcttgccaataaatgaaggaggaacagacaggaagtctctatcaaaagacatagaaagacagagtagagtctcaccagctgcagacatgattcttacgctcaagtttccgatgatcgctttcaagattccagcgaccatggccaagaacgcgtacaagtaagcagtagagacattctcgggcgtaggattatcgatagcgtccctatgagaaagcaagaggagaagaatacaaatatgagtgtttgaacaacatgtttgaagaatttgagaccagaggaagacatacaggattcgtttcaacaagtatggtgccgtgtaacttaaaagtacatacgataccgaactaaacagagcgcgtttgtaattgaatgacaaaaacagttgtcaggagacagaaataaaatatccgctcggcgtgaacgataaacactcacatcactaaatcagccaagagttctcttaaattcaacataacaatctttcgaagtatgctcgaacaactattcaaattcaaaatgccgaaccgaccaatcattagcgtcggccactgcggctaaggccgaagggaagaaagagaaagaggcggtgtaagaaagaccggaaggaaacaaagacccacctatcctcttcccatttacgtctgttgatgcctgcccgtctaagtattccaacatcccagatttcgtcatcctccaatcgtttcccccaaccgagcttgaagagctcatccatatggccatatgtcaagtatttccaaagactgacatcctcctctgggcttcttcctccgattcctcttggcgaatcaaagatatctgccggaggtacagcgactggtagggaaagctgaatggcgatgatgaggaaggaggggagaaggggaaatgcgagagacagcatatcttcgtgtccagcggacgaaagcggaaagagaaacggaaggagaggggttggtaatcggagtgcttgaaagaagagcatggagtatgaaggagtaggagacctattccataggggagcaacgacagtagtaatggcctgaaggtatctcaaggcgaaaaacccgatccgatcacatgagctaggtgaattaagaacgagagatagaagcacaagatattgaaaggggactgacccaagcgaaggcgagtacccatgattgagatacaacccaagcaccctgaccgctcataagctcccggacaccactgtagaccaaccacgcaacttcgacaagaccgatataaaccatcaacccggtcttccacacgggcattccaacagccttcttatatttagctgtcgccatggtatcgtcatcggtcgtatgaacggaaggcaggtcgtcatacgtcaagaacggtttaaacacactgttcggcgagttgaaaagagaagacacagcagatacagaagaacacgccgccaaagcaggcagaacgatgttgaaagccgtataggccaggtaggaagagaccatgccggctcctagatggtcgttgaggttaacggggctttacaacatgtgtatgataattgagattagtcctggacttgcttacgtcacgcaactaaatagccgacaataacacgtgactacgccactcgggcattacttctgacaagaatttacaatgatccatattgtcagggatgtgatctgcgtgttacaccgggtaaccttctcctatttctatcattccttctgcttcgctattcctatgctcttccattacagcgcaggtgtttctagcattttctatgattcatcctcttatgcataatcgttggagtgaaggataatatataagacgggtctcctttaccacccatagtatagtctgctaagcctgaatcctctgtcctccttggtcccttagcactcttgtactctgtgacatcaatcttgttcttccaaatctcttcgcctcgcgccctagtcacagtcaccaagcaagagagcctgaacttcctctttgccctccatactccctgtctaaccacactcttgtaacctccccgttactctctgaactcggatcctgacacatatcatatctatgtggttggagaatacaaactcttgcccaagaaacaagagacaagttctggatatctttttgctgattcctgtagagttttagagccagaacaaaccatgtggagtgagtgtccaaagtgggagcttgattgatttcgttcttgagtcaggaatagaccgaagatagaaaggagaagaagaaagagatactacctttatctgtttgtaacctcgccgttgataccacattcgagtctgagaatcaagtccattttggtcgacagctgctgtgctgactgtgactacgtgagctttgaacaccgtcctatcttggttctctagggtatccatgatctacaggcattcaaaggaatgaaagaaaagagtaagggatatgaaaccacgggttgagagtacaggagctctgtaaatcaatagtatcttggtccttctgcgcggcgggaaccttgctgacttactgcattaccaattcctagaccttgaaattcttggtatacgaaaagaccggctaaaagagtagaaaccagttcagtcaacggattgcgtagattctcgcatgttcggatggggtctacaaacagatcattaccgttccggtctctgggttacatagatcgagatcctgcgcgtacgaatcaattttctcgatgacgccccttttaaaggtcagattttaatcccagatagtttgaaaagtgcaaacatggtcaatcacatgaatagct

SEQ ID NO: 2623 - DNA, 3493 bp, Xanthophyllomyces dendrorhous
tatatatatgccaacctctcccacggcggcctgctggatgcgaacggagacgtattctgaccagcagaaggagaggtagattcacaaatgaaggataccaaggaagagattaggaagcataagaacaaacctgcgccccatccacaagctagtcgcaactccgtcagtgggggcttatcctcctctgagcaagcacatctcagtcaacgcctgcaacctcttctgttgatcatcagctgataacgcgcgccattcggatccgattcgtttccttctcagatgagaatctgaagatgatatcgataccggcgaaacggtctgttcaggcaggtccatcgttgtctgcacaccggtatgaaacgcaagattgctgttgcactgttgatctttgtagccgaaattcaccgcaagggattattgtcaagtactagacgtcaatctcgatgtgttgtctactcgttcaagcgttgctttcacctgatatacctgattaacttgtcgagacccttacagacgactgtttaaacaggctgtccttccaacttcttacccaaaaaacggatccatcgattgtgaccagtgctcaagttcttatggtttcctgatacttagttcacaaaaccagccctaaacaaagtcgatcaataaaaggcggaacgaatttctcatgctccactaatttccctttccctaacaaacccttcagtctggccatgtctttctgaactgccccgaagggatcaacttctgtcatagtgagtcttcaatcattccataccatcttggtattttgctttgttttccatttttccttctccttccttcgagtgacgatacattagttatccctgtccaaatcacaatttgtcgacgaaaattcctgaatcgtggttgattctctatctctgacacctacacttcgttttgctcatccttaaatatattcatcgttcttggttcttgtactgactccattcttctttttcgtttttgtaatgaattggtcgagcaggcttcttttatatgtaccgttagatatgacgactgattagaatgtgtttagaaatacaaaattgaaagaaacacggaaacgacagacaaatagaaaagaatggccagaaagcaacgctagcagctacatcgtacataccatcctgtagcaacttgatatgatacaccgcgggcccagtaaagacacgtttatcaccccggtagtgaaatcatcctctgacggccgagactgcccggcctccaggttggtcgtccgtgggtctcttgatctacacgtggaaaacaattggaactagatcactttctcttcatcattctcttctccccgacattatttctctttaccttgctcttttaatatgctattgacgttgaccggcgcacaacctccgtcacatgaataagactggatcatgttcagacaaaccccggcgatagtttttgtttgacattgatgaaacggcttctcgttcagccataccagtcacataatatagtcgtctttcagacgattcgttcttgtatctctctggcccgtcgttgaggaagattgtacattcatctccattcataccagatgcggtgacttgggtggtggtcgcaaggatctggctctaaggaaatggacggtttgggatattatatcccactcgaacaatacttggaccgagcggccgggatgcagaagctcctactcacttagaaggagttcaaacgagacatgtgttggccatcatggacgaacttgataaatatttcttaaggcagggtaaagatctacggtgatatatgtttgactacgacaacgaacgaaccatgcacatcagaggattttgattcattctttccgttattgctttctccgtttcatctatcttcttgttcgagacaaccactgcttctgttcttctggaaactcgcatatcgatgtatacgaagtgtcttaccttgatcgatgctgtatcgctctagcttggaactgggttcgttggttcctctgggagggccagtgcgttccatcctcaaattcacccaccttgattctccgttcgcaatcatctccatcagagtctcaacgaatcgaaggaaacaaaaacccgcttcaccaattacatatatagatatcttcaagtaggttaccaaaagtcatcgtcgctcgattcatctccattcgacgatttaatcttcttctctttctgaacaccataacctgcttcttcagtgaaaagagaatcgtaagatttagcagccttcgctgcttctctcatccttgaggcttctagttgagcgttcttctttatatgtgttttcacgaaaggtgaaagagagatggcgcgagaacgaaacaacaatcagccaagagaacaggtagaagagttcagggagaagagggggatcaagaagaaaatgaaattggacgaactagttcgttagctttcaactttttaaatttcccttcctcttttaaccgttcgatcctttcatgctcgtggtccacctcttttacaacttttgtctttacgagtcgattgacaatcgcattatctcttgtagagatgtatactcgcttgacccgcttgtcggagtggaaagagaccgccccggtcgccatatcacccgttttctttcatgcgagaagacaaccaacaaaggcaaagagaagggaggcaatgagtaggtaagaaattgagtgaaagcttgatcggaacgaagaaagctcttgcaaaacggagatggacagacgataccttgagattatcccatggtgtatatatgatcgtgatattgttcttcttatttccttcgcgcatttatttatttagagcgaagaatggagttcagcctataggtttagccgttcgacaaatgtatcttttctaaccttctatgctgttggctttgacgagttgacctaagtcaattaacagcttttcgggcaggttgtcccagtctccatatggtaagctcgaagggatccggaggtaaacgtgtgctgacgaaagctgtagccaaagagacacagtgtggtcagtatactgtgaagctgaccaggccagaaagaaacttgggaacaaactttatcaacatggaaccagatgtcttccttcgttccatacttaatgagatcttcgtctatagaacagagaacaaaccaaattttgtttagtcgaatctgtgcacgcacggattatggaagttgttgatccttgaacaaacgtactttccaccttgtcctttcccatatagattgtcgctggcggatccacaacgtttgatgtgaagaagacgaccatgatagtgctggatgggttcaatgagcacggagaataaagccaacgatgtcaatgttgatacagacgacgaagaaggtgtttgaccaggtaaagaaattaaagtaaaaaaaaaaaaactcgactcaacttctttcagtcaaacaacgacctcgacctcgatcaatcaagcagcccatcgagcttgtcgg

SEQ ID NO: 2624 - DNA, 2444 bp, Xanthophyllomyces dendrorhous
ttgtcggtccctctctatattcttctctgcacaactcgcttcatattctccctttgatactacctaccgcatcactttgaaggaattgcatcatgaagtcatctcttgcccggcttggagcccaactcctcgacatgtctgctaagtcgaactatccgatagctcaaaagcctggaatcgttcgttcttccctatttgtttctctgtgctttgttctctatcctccttgctcctctcgttaccttatcattaaatatccattcagtttctctccttccctcacgagagagctatgactgatcgattgttttcttctcttctttgggttatctccgatctctcgaaatatccttcactcctcttctctctcattttgttcacgatctcctttacctttctctttttttctcttttcatttcttttggcaacacccctcttcttcaaatacagggagcagtcgctgccttctttgcttctgatcagtccaatagaaagtacccggagcgaaaggcctacttgactgacaaatacacccggatcctcacccaatccaactgtattctcgcctttcagcacaacaacttgagcgcggccgaaatcaaggctatcagagttggtttgatgaagacgaaggttccagaaggaagcaaacctatgaagttgtcggtcattcgagcgggagtgatgagtgcggcctgcaacaagcgtatgtttctccgtgatcagcactcttttcctttcaaagagaaagctctaacttttggcctgatctgttttgtgcctatatcctcctattctcatcttcgtattctttctcttacttgtgcctcttgaaacgataaacagaggagtcgattgcttcttttgacgcgcttctatccggcccgatgcttttccttcactctgatggccccctcttgccctcttacatcacccaggttctcacacaagtcgacaaagccaccggcttccgacctcccgccggttctgccttcccaccccgtccgttcgaatcgaccgaagctctattgacacataccggaccttcggtcttctctatggtaaaccctcgggtgttctgcgtgggcggtatcgttgatggaaaagtgatgggtccggaggctatccgaacggtcggtacactgcctggacttaaagagttgcaggctcaagtggtcggtttggttggctcgccggcttcgcaaatttcgggtgttttgggcatggctagtggaggacagctcaacagagtattggaaggtttgaaagtgaagttggaagaagagcagggtggaaagaaggaggaaggagcttaaggagtttatagtctaattaaaacgaaatacacaatgcttcttttttcccatcactctccttctctctccggagctagcgaggaaaaagtcacttgagctctctgatgtggttgtctatctccgaactcaaccttctccttggtggcagaagaacaaagtacgggttatcatttgtattctcatcccttgagggccttcacccacgtccttcccacctctcctactgcctgtttctctgtctcctctccagctctgtccaaaacactttctaagctctcccccaacgacgttctccaatcacttgtatctacctccttcgtccgcctatgttcgccttgctcaatggacgagcgtccggctacgttgctaacgagccatatggctgcgtcaagcacaatagggccgcctgaaagatcagccttagaaagtgtttcttgtagttttgatggggtcaacgtcgcaggaggaaacaccggatcggaattgatcaagagagaaagggttaattgggtcttaaacggctcgatattggggatggctgacgaccttgccagagatgactgaagagaagggtggatgaatgctaggaagcgcgggagagaggacggaggaagcatggagaggatttcggatatttgagtgtgtactcgaaccggagacaggaatggttgggagtatgagaacacagggtacgtgagtatgatgatctatcagtcacggaagaacaaccgaacggacgaaaagaacaaagtggctaagtgagttcaaggtctcctgctgacgagatgataacaaccaaacaagaaacacacaagagaaataagcgacccaagagttcgtttccgtctttctgaccggttcaatataagctcgtcaaattcgttccgatcattagacccattcgagtaaagcacctggacgagtggtaggatatgcgataaattccaacgtatcttttttgtagatgaattcgtctcgggtggtatctgcgctagcagtaatggaatcctctgttgctgagaacctggaggagcatttccctctcggaaagctttctcctcatcctctttagactgagtccatacctccaccagatcttttgtccacaagatgcataaccaatccaa

SEQ ID NO: 2625 - DNA, 15676 bp, Xanthophyllomyces dendrorhous
gatgcataaccaatccaataccaaccaccatctctccactcgttcgctttcttctttttcttcggtaactcttccttcaccctctccttcttctgattgttggcctcttctggatcgctttttgttcccattcgttctgctcttcagctttccccatgactccccgtgatctctccatccgttccaaagcccatttttccagtcgatcattcctctagcttccttctcaatctcggccatatctggctcagcccggttccaatatatagatggaggatcgaatgaaggaatcgagcgggcgagagggactggtgagtgaagctcaagtagccggtgaagttgagagagcgcagtatcaggaagggagagcttattgaccgaagggagatggatattcactgctcgtgaagaagaagaagaagaggaagagttcgattggttgatatagaagagatcagacatggtcgggtgaagagcgaggtagagtaagatgagggtgtgcgctctgagcgagaagatcgaattagaatgatctggtcagcgtagagctaaggacaggcagaaaggaaacatcaacgaacggtgaggggacataatcaggcgagagaaataagcctatggtctctaaagcgatctcgactatatttcttgttcgataaccccaaccacagtaccatgggagattttgtggagtgagggatcgagcgacatgaacagatgggcctgcttggtcaagccgagtgtcttctagaggctagggaattaacaataaagaaagagggaacaggacggacggtggccttcctcgagagcgttgttgataacaccttgatagctggaaggcatgtcgacctggatggagtatttatcaagagcgtccatcacggctgattaccaacgacgttgagggtgaaagtgttgttgttgaagacgatgagttgatgatggtggtctgatggaaaagtcctgagcattgctacggtatttcactccatcaccatcatcatcaccatcatcatcacctccaccatctctctatcctcaatgacatcctctccgactgatatccccatggatactccgatcaacacatctgcccctacctctctggattctacatcattctctcaccccgctccgtctataccaacgcctacaactgacacggagctctattcttccgatgaagatcctagtactaatcctatcggtggcgatgggggctctgcatttgagactccatgttcatctcaacaatccaatcctagtcgaaatccggagagttctttaagagaaagcttatggagtgctacatcaactaatgagcctaaggggctcgtcagaggagaaggaaggagaggtagacaaaatgatggtgagaacggtcagaacggtggaagattgtctagtcagatggaagccacaggcgaaggagctagcggtccgaacggaggaacgtatgcgcaaggaggtaccaaggatgatagactgttaggtgaacgagagtttgatgctcttaacgaaggttcgttctgcttctctctttagtttcttttacctttgtcgagcgattcataagatcagaatgtaccacgcttgaatgatacgcctattgaggagaaaggctcatccgattgattccctctttggcccgtcttggacatctctgtctcttgctcatcacagagattggagaccccttcgatacggacgagattgatgacttctaacgaagccaatcgtcttcaacgaatgaacctccgatctaattcgcctcatagaaccgcaaaacacaacacacactcttcactagactatatcggtaagtaggctctttcgattttgtttcaagatgatgtatatatggtgttcgagaaaactgatcatatgtttcaatggatgcgcatataatcagatctgcgttctctaccaccagctcaactatcctcttctcaacaacatataagtgcataatctatcgtcacactcagacgtcaactcttgttctattctagttttgaccaagttctccaaactcgaaaataatctaaagagttttctctctctgatcaagtagtaaatcataaatcaagggaagaagggcacccgtccatgtgcatttttatactgcaaacaaagaataacatggaatagaagggcagatgtaacaagaaagaatgtccggatctggatatagaaaatatgctgatattgtccgtgatgcaagagagaagaacgaagggactgagtagtgaaatgcaacagaaagaatatctggagatagggtgacagttgagaatgagggcggcaaccacgtcgtcacagcaagggcagtacgaagggaaaacgaaatataacagtccgaaaaatgtacgatacaagagaaaagaagggataaaaacttgagaaaactgaaaagaaaagaaaagaaaaggctgatggtcttgatagactgggtctaccagatggcgagccaactgatgactccggcgccagcgccgagagcaaagacccaactaacgtgctccgatcgggaagctcccgaaactctggcagactctgaaccagaagcagcagcctgagcggcagtggcgacagtagtagaagcgcttgcagactgggtagtagtctttgaggcgctggtggacacaaacgaagaagtagagctggttaccgatgcaggaggaacataagcgtgggcagctttgatcatgtcggcagccttctcagcaactccgtaggcggaagccatcaagtgagcggagatctgcataggcatgatagaacagtcgacgacccgaacattgcttgtaccgtagaccttcagagtagtgtcaaccacacctccagaagactgaggcaacatggcgcatgttccaagaggatggtactcggttccagagctagtgtatatgaaggtgttcaagtcggtgccggtgacgttcgctccgggaagagtctcgtcagcgatgactacaaataggaagttcaggtaacgtttgtcttcagtacatcgacaaaagatataaattaaaataataaaaaaagagaaatgcataaaagacgtacatgtagacattgggtcagtcgccccaagagtcctggcccactccagtcccttgttaaggatatcgacttgaaacatggaaacatcactgacgttaagcggcgcttttgtacaggaagtaaaaatagaatacataagataactcaccatcgtaacccattccaaagtagttggggtcaatggcagggtagtcgaaggggctatcgaatgaaaagatgaagagatgagtatttagcaaacggtgagaaccgtagctgtatgcaaggaagtactcacttggtggagttgatcatgatcgatcctcgagagtaagggtgctgcaatccgacctgaataccggctccgttcattcctatatgggcgcaaggtagaaatgtttgcagcaatcaggatcggagtcgatacatcaatcgattgagactgtcaagaacacataggcataccattcagcattgacaaaatgatctcgagctgtccgatgtccttgccaagccaactgttctggatctcgtactgagcccggtatccagcagcgacgttatccggaatgtttctgtaaggtcggaccgacaaaggtgaatattcattagtcaccttctttcgaattgacttctcaaatgcagacttaatagacgtactgccaagaagtgatgtctttgatattctgatccaaagcggcggtggcggtggcgacataagtggtatagtcgctatcgatatcggccatcgagacgtatccggtggcttcattcacataactccattgggagccagtgtagtttccagctcggtacagctccaagttggaggcggcttcatcggcgttgataaggtttccccaggtgagagttccggctctgttgtcacaatatgttaagaaacagagagtaagaacaccactaaatatgcaatttggttgaacgcacaccgatatggcaagaaaaaaatgttcacgcacttggtgttaaacttgacagccgtggagacgtggtcttgaagtccgtaaccgaccggaagatctgagacgacattgatacccaagttagaaaggaccgaagaaggcccgacacctgacaactgaaggacctgaggagtgttgactgttcctcccctgaagatatgttgcacacataaacaaattgaaggagaagaagaaatcagccaggcgcaaagtcagattgctgatacaccacaacgactgaatttatttaatttttcttcacggaagaacgaatactcacgagagaataacttccttgttagcggtgacagtgtactcttgcccttcgtttcctccagccgtgctcttgaatttaaaaccattggaaacagcgttgcctgccactgttgagttccaggaaattgctgtaacctggaaaccggtgaggatgacactgattgtattcattcatatgttagtcattgagtagacagagattgagtgaagagatggacgacgaacaggttggatctcgggggaagaggggcgatgtatccggcctgagagtcacttcgagtagagttttcggtgttgagagtggaaggagagaaggagaccccaacattggctccagagtgtgcgtccagtcgtttcttacccaggttgacctatttgtaagaagggcattattgattgaagatcagtaaatggacaatcgattctaaaggaagatgacaagaaagagagagaagggaccaacccaggcaggcacccagttcttgacagagtcatacatgtaagcacaatatccaatcttgattggtccaacggttccatgatcagaaacgttgtaagggatgtcataatagtcggtttgccacttgggaggagcagtgaagttctctgcctgttgttcatccagaaaaattcaagaacgacggtctcagtaagaaaccctggaccaagcaaaacagagaaccttgatgacggactttgttgatgtaagccgtcatggcctcccatccccaatcttcagtcccattgggattcaacgtattccatgaatcgtactcttctaccgatcctcgagaccagaacaacccgtttgtacttgagcttcctgtggtgtccgaaaaagagaaaggagttaggtacaagcagagcaagatgtgatgggttggtataggagcaacaaacctcctagtcctttgcctcggggccacgacttaacggtacctagagcgtcggtctgtaagagaaaacggagcaacgaataagtatcttctgctgatgttgagaagaaagatagtgaccgcttacttgagcgacggtcttgtacttcctgtgtaagcgcatcaccgacgcatacgcatatacatacagtcagaaacaaagaactatcacttgatgcatcgttgttactctcaatgtactaaccagtcgtagtcggagccggtcaagccattgagatctatcggtcgaatgagccaaggaaactcaagatttgtaagctgcgcgtaacagatgagagtttggtatacacgtacaagaatatccagggatatcgatctaagatgacattcaagacacccatgcgaagaaaaagaggatgacgaagagaagaagagaagttgagcgcgaatcacacaagcggagaaacgcccaagcagaagacgccgtaccctgtccttgaagttcgatccatcgccaccagcttcgatcagcgcgacagtcacgttcgaccactctgatagacgggcagctaatgccaggccagctgttccaccactgtgcaaacgaaagtcccgaaaaaagataacgggatctagagtgagaatgacgcagcataccgacagtaagagagcttgtatatcagaggaaacatacccagcgatgaggaaatcaaacgactttccatcgagctgtgacggatcggtaacgatagatctctgaacaagcgccttgtctggagaggaatggaaagccaagaccgagagaagagatgaacggaagaagcatgcataaaaagatcagatgacgcgtttcaagtgattgagtccaacaatcagaatggatgggtaggatggagaactcactagcatagttaggattataggctgcttgagtggtcgaccccaccagagagagagcgagtagagcagagagggaaagactataggttgacatagaccggaatcaatggataatgttctgtatgtgtgaatcgccaggcagagtagcttgaagtgtcccaggtcaatcgatcgagtgatgtgagaaagaggagggagaggagagagtagagagagaggagtttaggagagcaagtggtggttccgaagagaaatgaaaacagaaagagataaaaacaaagcaggcagtctttaaggatctctcttcctaccagtagacacgaactctaagacggaaggcgagcagaagaggaatcaagaatttctgtgcgtggcaaattcggagggaaggcggaatttcctttatttttctctcctctgccgccaaggccggatgaatctcttggcggatctccatttttcttgcccgctgcgcttgaacatctacatctactggaacattcggatattcttaataaccctctgaatcttattggcgcaacaataataacaacagtaataaaaacaataacacaacaataatacacgcctgcatgcacgcgttcctacacgcgactatgactatggctggccaaagagcgaactgaaaggcatggcctcggtgggctgcagccagttcttctcactaggttcgacagagatgaaaaaaaaaccgcattggtcagtcacgttgtgccacgccggcaacaaacttcaaggaagaaaacagaaaaaagagagcaaaagtaacgcaactcatatgttgccccgttttcctaaaaacaatttcgaaaaaaacggtccagtcagccttcggaccctaacacaaagatgggttgaaaattagagggattaagcccaacctctgattcaatcatgtctgtcgaggaatcacaagaaaacacgtttggaattgatgagaaactactgtctaccaatcagaagatagatcagtagataacttacggaatgtataaatgaatctcgacttgtccgaatagttgtgttccgatcggtgggctacactgccatggatgataaccagagtgcctaaattacaacatacattcacacgccccttgatcagcatcttgttcttggtacataagacagaacagatactcgaaagaaagaaaagacaaaccggcatcgcactcctcacacacaaaattttctggatcccaaccgatctcctcttcttgtttcttggcttgctccatgccgggaagggtctcgaacccagtaccacctcctggcaaacgaacaaaccgagagtgaactttggaagttttatgtgaccctggtttgaagtactgcaaaacagaaaacatgtcaactccgaatcagatcaggagaaaaaggctgtagccaacagtgatgtacgagaaaaagttagaggatatgctcacaaggcagccattggttggtgtacacttctcaagagcaaaccagaagccaacggccgatggagggtcggtgtacaggaacgtgctatcgttatgcaccggaacttttcctccaatctgcgtttgtaggtacagtccaaaaaaagaaaaacagttcatgatgaccgaaaatcacaatcgagacatgagtcaacataccttaggctgcttgcagatgatcatgctctgcaggacctttggatctttgtgagcgcccaactctttggcaacgttctttatgctttggtttcgaagcgtgaactctgtgagcacaaagaaatgggaacagagaggcagttcgtcaaaatgtcgtcatttctttctatacctacctagatcaggtgaggaaggaaattcttcggcacaaacctcgatagacatcatctaattcatgcagggcatgcccgatcttattgatagaagtctctttggacacacccgatctgaagtccttggctgtaagatcgagaatgaaaagacgttctcaatcagccatagaagagatgaagctacatcagaggagtctcactcagagatcattcagactgactatcatcatcaaaagcaccctcttcgaaaaagtaccgaatcttgtctccagagtcaaggaagtagtcatcgccaacatggtcgacgccttcctcgtaattaccattccaagaaattcatccgagtagttcaacaagacactatcagattgacacatggcggtgctgacggactgggttgggccgagcacaggtttcactcactctctcctgtactgaactttgtcataggatggccttccagagaaaagtcctatttccgtcatcgttcaaaaatgtatgaccatcaggtcccgtccatttgtgtagctcaacagatgagacgacagccaacatacagagagtagcttgtgagccctgttgagtaagccatcggtctggctcttggagaaaaagctgggaaggacaagatatccatccgaattgaactagattttcaaacgagagaacgacattattgatgaaactccggtcctcctgatagtttgactggttgactcaaatctattgatagaagccaagtaaaccatagactcgccttgttgatttgttcttcggtcaaatgataaccgctcatgggaacaaggatgtacgaattgaaagaagacacggacgagaacgaggaggtgaacggagtgaaaacgcgaacgagaataaaggcgatcggcgttgatgactgagatgcgagacaactcgtgaataatcaacggcggccgccgccgggccgtttagcagtgccttgtgtgcaaatctccggctgttacccttcgcctcctgctgcggcattgagaaggctggatttaaacttcggtcctgcatccgtcattaatccctagcacagcaaacggatccgaccttcgttgctggtcgtgtgttataagaagcattctggtgatgtcttgtcgagttctcatcctcatccagtcttcatcctcatcctcattctcaacttgtataccctttccttgatactctgttgataatgcttcgtcttcgaacaactcttgccgtggcggtatgtctcatcgcggctcttcagtttgcgccgacagcttctgctgtggatcttccatcctacatcactccggccagtacgcaggatcccagcaacacgacaattcagaacgtatgtatcttgttattagttcaattgaagactcacaagacttgagaggaatagatggatgttgcttgtcggaatatgtcacgtgatggcccaaatttgtgttcgttttattcaacctcaacaactcttggtctcttttactacgctcggcgcacctcccttacaaaatctggatacacgctcagttttatcctcaatatgatgttcgtccatgttcctcaattatccactgaagaagatcgagcagcctgaagcggatcggggttttcttgattaaattaaatttaccatcacctcaggaaagcaacccgttgagatatctacccaaccaagctctcgccatagtggtcaccgcgctttacgctctcgttggcgtcgcgctctttgttcaactcatcatgcatggtcaaaaatggatgtgtacgttcgacaaccttggtcactgttttctctcaaatccgtccctgtctttttgccgttgagcgcgcagtgttaaccctcaatctatatgttacattcttgggattgtttctgcgtggtcaactcatagtgactttgatcatcggtagcttctgctatgctgtcggaatgggcctcaggttgctcttccgaaagaactctgtttgttttatgctctttgaacttccttcatctgaaatgcactttgatactcatttcattctcaatacattgtcccctacatggtttggcacagcactcgatgggaatttatatcgctctagatatgttcaccgtgctctcgccctgtgcattcctcgcgaccgactatgttctccttggccgtcttgtgagacatttgggaatgggcaagcaccttctgatgtatgtctttgtccttctacctctgttctgaagaagtaagctcatccttatttgacaaattcaatacagcaaagcgcagaagaccacaatcatcttcgtcggatcagatgtgctcactttcttggtccaagctggtggcggaggtctggcgtccagcaagtcttcttcgacgtccaacatcggctcaaaagtcttcctggttggtatcatccttcagatgatctcctttattctgttcacgtaagcttccaggccttcttgtgtagccttcggatagggactgatatcttaccttttctgcgatcctgtgtacagctttttggcccttgactttggtttcagtacgtctttggctgttcgaatctttttggtatctttaattttgttgacttgctgatcatttcgtgggtgccactttcagagatctacaagcacgaacctcaactttggtctgcgcctgacaaaaatactcgacgatggaagcacctttattacgccatgctttggacatgtgttgggttcattgtacgtcttctgagaagcttgtctcctttttcctcctcatacgggtctcttgtgtggaaactgatcgtgctattccgttgttccgcaacctcatcgattggctcatattttttgctcatcaggtccgatctacattcagaacagccgagctcagtcaaggattcattggccgcttgagcacaacagaaggctacgtcttcgttctggacactttgccccttttcctggccatcattgcctatattccctgttcgtcttgcctcctttctctcatcttgtcaaattcttttcgcaccttggagcagtttggcttactgtctttctcttctgtctgacctaattgtgacagtctaccctggaagatacctccgcccaaatgtagccggtgctgaccagcatgcatacgatactgttggctcgctccaaatgatgggtgattcgagcatagagatggagtctggaaacaaatcctggtatggacacaagtagaaaatatagattacctctgtcgagcctttttcttttcccacaaaatttcacttcaaccaaaggagttaggttggattatctaaaattcatgaacgttctctaagctctttatttatgtccactatcattccgaattctccccatccttctcctcattcttattgacttttcgactttgatcagagctagctcgtcttctcctcctgtgtgtcgtataatctctcctttagtttataatctcttcattttagcagatggcttgtggcgctactctttcatctccgtttcactttgatcctcgctatttttatcaaaataacccgtcgttcgatattttctatatctcactcgtgcatcgcgtcgatatcagttaaacacttttattggtgtgcttcacaaatcaacgcgaaaggatgatacaaggaaaaacgagagtcactggcgagaaagaatgtgctagaaacttcgagtgatcagtaatttatgcacgctctatttcctttggttacttttgatgttcaatctttaattcgcccacccgtttcacgatcgactttttcaccatctcttgcttttctaatcatctatcatctatcacataacatgtctactgtgagcaaactattcctttgaataaacagacatacacgttgggcatctgctgagacaggaagatattgtgttttgtggtctcttctttattcacctactaggctgaagaatttaaggctctcggaaacgccgccttctctaagaaggattatgacgaggccatcgttcagttctcaaaggttagtcgtgattatcctttcccatatcctgatctctgtccgagagagagagcgagaaagagtccgctttgaatgatatccttgtttcgcatatttgaatgcgactaatattcatatcctgctctcgtattgcttcacgaatattcaggccatagaattggaccccaagaatcatgtgctattttcgaacagatctgccgcttacggtggaaagagagactacgaccaggccttggttgacgccgagaaggtctgtctattcgttcatttccattctctcgtttctgtgatacgtatttgtcgaagctgatgtatcgcgacatatgaattctctattcagacgattgagctcaacccttcattttctaagggatactctcgaaagggatccgctttgcacggtcagcgagagtacgctgcttctatcgagggtaagctaaagtcgatcataaattggattatccgatggaaaaaccaagaatcctcttccgtgtttgtagtacctgatcgttcttcttccggtatctctcgttgattacagcatacgagaagggactcgaagtcgagcccactagcgctttgctcaagaaaggtttggacgaggtcaagaaggctcaggagaaggacgaggccgacggatctgatggcatcgcaaagatgttcaaggaccccaacatgtttgccaagttgggagccaatccgaagactgcacccttcctttccgaccctactttcgcagccaagcttcgaatgatgcaagttaaccctcagctcgcttccgatgcgttccaggatccgagaatgatccaggtcatcggtgtcttgatgggtgtcgacttgaacgcgtttgagcgaccggagggctcctcgtttgatcctgccaatccggaggcttccgagccggcccctgcctctgctcccaagcccaaagagactcctgctcctgctcccagcaagcctacgcctgctccggcaaaagagcctgaagctgagccaatggaggtcgatgaggatgctcaagccaaggcggaggctgaggctagcaagaagaaaggaaatgaaacctacaaggctcgaaaattcgaagaggctattgagcattatcagatggcctggtcggtttggcccaaggacatctcgttcttgaccaacttggctggtaagttcatctttgctctgttccgtttcattatgcatgtagctgatcgtgagagacaaaactcacttgctactcaaacattgtctatgtgctgtgaatagccgtctactttgagcaaggaaactacgatcttgctatcgagacttgccagaaagccgtcgaagagggtcgagatatccgagcggattacaagatgatggccaagtaggttccttattggtcttgtgatcacctttcctcattatatttaaatctatgtctgatgccatttctcgtattcttctaatcttcctccagagcctacggccggataggaacgtcctaccagaagaaggaggatttggagaacgccatcaagttctacaacaagtctctcaccgagcacagaacccctgatgtgttggagaagctccgagctgtggagaagcagaagaaggacgctgacatcgctgcctacatcgatcccgagaaggctgaggaagctcgaaaccagggtaacgaagttttcaagaaaggggatttcgccgctgccgtcaagttgtatactgaggctaccaagcgatcgccaacggatcccaaggcgtacaacaaccgagcggccgcttacactaagctggctgccatgcccgaggcactcaaggatgctaaccacgcgatatcacttgatcccacgttcgtcaaggctcatatccgaaagtcacttgtcttgttcgccatgagggaatacaccaaggctctcgaggcttgcagcgctgcaaacgatgctgatgtggatcacaagaaccagagggagattgaaaatcagatgaggaagtgttataccgagcttgagaaggaacgacagggagagtcggaggagcagactctgcagagagcgatgagagacccggaggttgccgtacgtcttgcttggatcttttcattcccttgtgttgcctattgtttgctcgactgatcggatcacttcgtgtcttgggttttccttttctgtaggctatcatgcaagacccaggtgcgacttgaatcatccctcttcttccacgatcaacccatcctacgccacccaaatctatcgaccgatctgaaactaactttcactcttgttccccctcaatttcttcttttcttgcctcagtgatgcgaaacattctcgaacaggctcagagtgatcctcgagctcttcaggagcaccttaagtccccgttgatccgagaaaagatccagaagcttcaggtacgaagttctttcttcatcaaaccttctgatcaccatcggctcggatcgatctcactgacattgttttctggccaatcccgacttttctttctattcaggccgccggtgtcatcagaatgggcactcgataaaaactctatgtctaattaatctacgaattcgagatgccgctcatgatggttttaaattgatatgccttcgagagtttcttacaaggcttgtggcgaacaagaacacagcggaaaagaagtaactttttctgattctgattcttatcattgcctgttttttttctcttccttttcttgagaaagtcgtcatcatatgtcttgcaaaagtaaattcatccggaaaagaaataaagagagcccgagaaattaaagagtgtgggttggaggggcaagtgaagtaacatctaagaagttgaaaggaaactggtcctgattcggaagaaaaaggataagtatcttagaatcgatcacgcctccagggctctccctcgtgcttgtggttgatctaagataagagagtgggggacgagtcgatcagattgagaatgcgaagaactcaacacatttcttgtcaaaagtatgaaaaggcggaaacttacagcaaggagcttgacctgctggttctccttgatgtgctgccacggctgagggtttccgttctataatcatgccgaagacaagtgagaagtaaggacgagaaacgtatgcaatatacgtttgaatgagactgaagagaatgcttaccctgtcccagataactgtgtagatcgagtgttcggaagacgcaggaaggttgagtattaacgcgatgaggatcgaagaatgacgttggtcagtgaaaagtggcggggaagaactgggttacaagccagcataactgaaccagagatacagagaaggagcgggaaggataggaaggctccacaaaactttgagacataccatcgggacctcgagccaacctagacaagtaccagccagcaccgccgacagcaccaatcacgacggcgtagatgggaagaatctcataagcgaagacggactatgaatcgacacgaagaagttgattgagaaacgataggacgatggggaaagagacagatgcatgatccatcgagaaagcaaacgaaatcgatagagtcagtcgttgagcgttttcaccttgtgacctttttttccctttcttttttttccttgtgtctctgacgtatcgcctctatgagtactccccaaagaaaaaagatgttcgggagaaacagaagctacagaccttcctgaaaaggggggtagggaccttaggcatggtgtgcgaaggtgtaaaagatcggagagaagagaggaagggggaagggaaaggggagggg

SEQ ID NO: 2626 - DNA, 41040 bp, Xanthophyllomyces dendrorhous
ggggaggggaagggaggacgggagaaaggtggtggttagacggcaagaacgggtggggcacggatccatgaccgagtgcgagatctgtaggtgatttggttacgcacgggcacgcctcttatcacgtgtcggtctcgtaaccatatcaaccgacgtaccccattctctcaagagaaaagctcgctcacgcaatcccggactatgataagtcaaagaggctcggcacagtgcgcccattgccaagagcgtctggatgatagaccacttggttatgagtacatgaagcaaggtaagcaaacaaagagtacatgtgcatcctttgaaacaaaccaggttggctaggcgcatgaactgaacaaatcggatgacgtttcaagttattgatgcatttttgtgttaagcccatacggacttatactactcaccttctcaacgcactgcctctagcagtcgtcgaacgaagctgatccttccgaccgagtgttcggaatccgtttgagccttttaatttccgccctgctgacgattaactaagttgaaggaagtgctgatgataaagcaaggacgatccgctctcttgagccggtctaggtctagccgagatcatgttcattaacgttggatgacggcgactccaagctgatatttgggcctttttaaactccctgattgtcgatatttctttctttccctttatacaaacgctcgtcgtgttcttatcgattaactacagatcaggctagttcatccacttaaccttgattctgtttggttcagtaattccatcttgacctctgttatcttgatcaagaagtgaatacctgatttagcatatcacccatatcgtccttcactgtcttattattctaccctgttgatcttcaaagtccgctctcccaagccgtgaatactcatacacatcctcttccacttgatggtttctcagttgcacctacttcaaatatgacatcctcatctttaacaagtcctgaagacagatccgacatagtcgctcttaccaaatcagatcaaatcactaaaacttctgtcgaaacacgggcgaaggtggagatggacgaaagagttgatctcggaataaaacggaaacgggtggagagggcttgtctgaactgtagaaagagaaggatcaagtgcaatggagcggaacccaaatgcgaagcttgcacgaatttccgttcagagtgtgcctatgtaggatcttacctttttgttactcccctcaattttcttcatatagaagaggatggtaaacaaacaatgctgataacatatatctacgtctaaatctggacggtatctctttagccacctcccactcataagttgactatcaagttagtgtcacctacatcacttccatctgcaccaccgatttgttattgtgatctggctgacattgttcctatcctcctttctagaaacttcgaagcgctgcaacgtcgaattcatgaactcgagtccaaattagcccacgcgacagagcaaacatctctcagtcaagcttcgagattggcacatgagcctatctatcctttagtatccacacagccactacctctttccgcaatccagcacgccagcagtacatttcctcagtcttctgacatctctcatcaggtatttgactttatctcttgagcctttttatcctgtccgtccgtccgtccgtccgttatgcgtaccctctaagacaatcttacctctatctttagacaccattccaaacacttccaacctccacctttcaaactgagcctgcaattctacccatcttatcgacatctctgtctatcattccggaattggtatctgtgcagctagacgacccttcgaacactggccaaccctatacttttcccacagagatgctgcctgatgagacccaaacaggttctctagagatcacacaatcacaacatagttcgcagttgttcgattctatgagagacatggatcaatacggtatcccgacagggtcagaaacaattctgaggggcgcgcaattcggagaggagtacaattttgaagagttatttgagacggaaacgagagcgagccaggagagcgagcccgtacctatggtccaagatttcataacacatgcacagttggaaccagttcctggtgagtgggtgcatccttccacgccgagaatatgagattgaagcgttaacatggaaactcaatcatcctatcctacatgtttgtgtcctttttctaccttagttcaaataaaagtcgaacctatatcggatgctcttgatccggacctagtgagagtgtttcagtcatctcaccattacataattccgtagtctccgagttttgctgattcaatgtgagaatggaattctttcatcagtatggtctcccgtcgtcccatgaggtcgcagcgatgttgacggtctactatgagaaacgtaagtatatctcaaacgttgtgatattattgctctgacttggctgagccaacgacctttgattcagtttactatgcttttcctgtgttcaaccttgatccgatctaccaaaggtatatttctttctgaattgaacggttcggcggacgcttgaaagctgaccaacgatatacatgccgaataagatacacaaatccttctgtacaaccactacagcaaaactatgacacttcaaatattctccagctcgcaatgctcaatcgaatcttgtccatagtgatcgcctatcggggtcaagacggcgataatgtacagtcgggagttctttcaacaagaagtttgcgactgattaaaaaaattaatagtcggtcatcttacctgattcattaagagaatcaaactagatggaggacatgatccgctcattatggatctcgtatgctattgatgacgaactcataataaagtattctcggccatcaagatagaggtagttcaatatgttcttctctcgtgttgtgagtaacaccttcacattttttcgttagtttgtcagctcaagcgcctcaagacttgaaagatccttttagttgttattgtatagattattatagcgaagtgtaagtgtttgacatacttgctcgttaattgtggttatgttttggtgctttgttacttcaaattgttcaatcgaatctttgcaccgttacgctcccctctttgtttcactctcatcaatacttcaccgtatccagttgtcctagcgtctccaagatcgatgttgccaaagaacacgctatactatcatcgttcctcgtccacagcctccagcttgatctgccatcagctgacggtatgctcagaacagatcgtgagattcagtatagtctgatgagggccgctcatgttagtttcatcactgcttttgtcatgcgaacgtgctgatgggtttagatgatctatttgtcttgttgactggccaatcgttttcgcgctctttgatgatacttagttgtgcataactgtccagctgtcaagcatgctggatgagccaaacctcaccaacggttgcggccccatgttggaatccgagttgatcatgttgttgctctatccagcctcagtttggtctgctgtcgagccgactagatctttgttctcacaaaagcaacacatattttttgtcgagactactaaactatgtaatctcaagtgggaaataatctccaagtacattctaatcatttcttcatatttcttttcgctctgtttctctctttatacccgaagccctatggtagttattaacagtccttctttgtattaaagatcatatacatcttacaacgtccatcaggcgtctgagatggtaacagaagctattacattcgaagaacagctttcggtttggtggactcgacttcctctgtttctaaaaaaaaatcaaactcgaggcattggccagcactcctcttgatcgactcttagcattccaaagtgggctgcttcaatgcaggcacgtaatcctctattccctttttttcacgtggttctcacatgccaatgtcagcattcttatgcacgtgcttcttgatatacaggtatatcgaaacttcgatcatgctctatagaccttgtttagtgggcgtaagtcgcaccgttcacagcagcaaatgaactacagctttcagattggtttctgattgcttttgttcttgatttcgactgtacagcacttccttggacaagaagtctcacctggatctataggacagaccctgagttcgtctgctcatttgcgccataattcactttcaaatcttcaatcgattttattcgacgttacgaaacaatgctgaccttctctttcaaccaaatatatcgacgcggcagccaacctaactttatgctgtgccgaggcggctctcgcttcgatcaatacggtgttgaagacatggaacactatcctccaaggattttggtggtatgtaagaatacctaagtagaccagtttgcgagtgtgtggacctgtctcatttatgtttgttctgtatgtgcgactgttctgggacatccctaaaggtatctagtgggatttgcccacaactcatgtttagtcagtgtttttgcgcacaatcactatgcacagccgatccttgatcattcatgatgtcttggtaccgtgttgggtcctcccgcagatccttcttgcatgtgggtgtctatgatttcaatcttatttctccaactgttgtttagtatatatctgaaccggctttatcgttcatctttcgttcatagttcaaacgactccgatccacccgctcaattttcagtatgaacgcaaacaagcacgatcctttgagaccgtccaacatgccatcggattcattctacaggtcgttcagtacaacccatcagcgtttccagagtctgttgaatgtcccattccgtctgaagacgttcgtttgatgggaagacgatgcatcggcgtgttggacaaactcacgaaagttatcaacccaaggacggaaggtcagatgagggcacagatattgccgcttgatctaagaaatgaggaggcctccttcaaagatagttgttttgttgcagattggattcagagtaagagtcgctttattcaaaccgtacaagctatgtacgcactttgtctcgcgtctgatgattcagttttcctgccaccactgtagagatcagtccggatcgaagaaatcacgaattcaccagttaattccatgaaaatttagtatctcttgagtggatctggtgtctacatgtcttgttttcaatataaactaattaatggcggcgctgttcaacacaggtttattgcgaagtacgagcaccgactgggttctaagcctgcccctctcgaatggagatgtaagcaggttggattctatttattctggctctttccttctttgcgaaatatcgttcatgacagctttatcttgacatgcgctaatgggtgggtcgatttggactatgggattgacgttttctcacagtgctatcagggtcggtaagtccatcatttctgatgcatgccttgatagaagaaaatcaatcatattgacggtcttgattccccccgtttttatgccatttagggctccttctcgacgttgaagtccccttctacttgaaagacctgacgacccggtcactcgtcccacctttaacatgtagcctcaacattcaatcttggctttttaccacttgctgcattatcatccttctattcctatgcctttcgttctagagcgggattcggctagtcggtgttgtttgatgatgtacagcatctgctcctactcttgttcttttcctgttggttctccatactctccactgagatcattctcactgtatcatgaaacctttccaagttttttaccctcttgtcgagatatgtttgacctatgagagcaaatgcattatataaatcatgagactatagatgtattccaccaaatgctattcctcatttcagatgaatcctccttcctataaatcatgataacgagaaaaaaaagggaactagaaaccagctagatctttgactttttttattatattaataataattctttcagcacgaaggaacggagttggtaggaggaaagaccaaggcaaaaaaaaatccaaataaaaagatgtgttgcagatgatcaagaagatgcgtagatttggtagttgaagttgtactgttgaaggtgcgcgcgttcgaagcagagggagaagcaaaacggttggacgattgtatttcagaagaagaagatacgaagaacttgtgagaagaaaatgaagaacaggaaaacttacagtagtaggtgagccgttaaaggtgaagcttggctggtaattcacaacggacgagccactcctcgtcattgtgaccttcatcgtgctaccggcaaccaacgcataactcaatctggtcacaccagccgccacatcttgagtgacactgccgaccgaagaagtcaatgtcaccgtcgcggctgattttgcaaagacgagagcgtagaatttatcttgagagtatccaccgttcgtaggggtgggcacggaatccgcagaggccacggcgttgacaggatgaggtctagccatcaggtagaccttatcggtgctgaccgtagggtagaccccggtcttgaaggcggcggcatagtacttgttgatctccagaagaggagtatgatcgaaaccgtcgacccaggcttgggagttgggctgggctccggaaatcggtccgatgtaagaagactctccgtaatcgttccaggtgagagcctcgacaagatcaaacctggctctgttagcgatgagttggtcccatcggtaagagtacaaccaatcgtcagatctgtagatccagtttttattgtaactgtcgacaccgtaatgagtaaagaacaccggggagaccgttgtggcgaaactctttgtgccgagacccgagatgtaggcttcatccgtgctggagaaagtaagatcggtggagccggtaggccaagctccattccagttcagttctccgtctataacgttgaccgagctgaatgtgcttgggtcgacaaacacacttggcaggaagaacacgttgtaaccggcagacttcaacggggtcttgaacgctccttgccacccagcatcccatccggagtaaccaaacgtgcaatcgctacctgcaaaggtagaggctaagatcttgtttttgtaccaagcttggtttgagtgggaaccgtatgtagtaatgtacaattgaagagcagcaccgttcgaataggcagtgcagggcaagacggacatgtcaaacgagatgaacaatttgaaggatgtgccgaaggatgcagcagcggcatacgcgtaagacacttgggtccattgccaggagtctgaaccgatgttgagcgcaaagccatcactgggtatcgagaacacggaaaaccagaatcagatcaaggacggaaggccaaagtgaacaaaccgatagaaagagaacagtggagacttacaatccagcaccagcagcaagagtaatctgtgtcagccagtcagcctgggtgtatgggtacgtgtttccaaccatcatgtggacataaacggcctttgatgaatccgcaaccgccgaggccgaagccgaggcggccgaggaggtagcagatacgacagatgatatcacggcggaagaggaagcgcgagcactggaggcactcgtggctgttggcgtggctgtcgaggatgcagcagcagaggaggaagaggaagaggagtttgatagtagagaggtcaaggaggaagtcgaatagattgagagagcccaagatccaccacagacatcaccggtaccgtaacagtaccagccacaactccagctttcaagtttggttgctgttgtcgagagggagttaccgcagaagcactttgaagcgagaaagaaaggagaaaagaaaagtacagaaatctttccgttagctttctgatcgaaggatgagaatgtgcacataaccagacagacttggaaagtgatttacctgggtagcgacctcaagtccggcgatggagtaacctttagaggcgcagaggttcgtgcagccactgacggtccagccagtgagctttgattctgaatatccggtgagtgtcctgctggacgagtctgacacacaaccttggttcacccagtttgaagtcgacgagctagcagaggcggatgccacagcggaggaagaggaggtggcagttgatgcaggtgcggtgtatatgaagagcgaaagcgaccaccatccaccacagggagaaccgtctaaacggaaagaggtttaatagtattgtgtgagcacaaagatagaggataaggaagagtcgcagggaggtaataacataccagatccaacggcgctgcagtatgaatcggcaagtatcgttccaagtccggttgagccggcggtgttctcataatttccgcactggagtgtcagatattgaagataacggggtgtcaggtaaagaggagcagaaaatggcagcaaaacgaaacgagatttcaagagcacatacgaagcactgctcggtgtctataacaagtacccacagaacacgagaagtcaaacatgagccgcagaagggacaagtcgaagatataggagatcactcacattcgagtccggcgtaaatataacccatggactggcaggtggtcgtacacttttccacggtcatgcctgattcttgataggcatatccagtcagatacctcgctggtgcgtcaaatatacaacctcccgcggcccagccagtgggcagagggtacgtcgttcgggcagccagatcagtcgaggaaggggcatcaggctgaacgagaatggtggtgatggacggatttgagtgagtggtcccaacttgggccagccgagagtgatgtctccttcgagcgtttccgattgaatgtgaggaagaggcagagacatgaagaggaaggatggtggccgtcaagagaaggagggaggagaatatggaggagagcattatatggcgaaatagaattgtgtatgtagttttgaggatatcaaaacaaatggatagaatgggatatgatcggactggactggacagtctgggataaagaaaggatagattgattgtgatacgatacgatacgacacgataggataggatagatcgaattatcacgattgagaaacgagtgtgggcgtctgtcaaagacttgggagagagcgaggaggggaggggagaggtatcacttccaaagcagactagctgtttggacttggggaggaggagaaaaaagaggaagagaagggttgaaggatgaaggtgttggtgtagatagaaagaaggaaaagaaaagaaatcaagaaaggagatacatgctccctccggtgcttgttttctaatataatctgccggatctaccggaatcggaatttctcttgacgcgtcgatcgcgtgtcaatttgttaaatgacgacccagcaaggtttcgtgaaaatccaaacaaggttgggcatgtgccgtggatgggcgtggactgtcctcagtacattacacgcacacttgtgtgaaccgcagtgctgtatcgtcatgatatcccaacggcttcttgttgtgagattctcatgttggtcgatcattctactcgattagataatgttcgagacaatcaagaacaagcgagtgcttggcggcccaaagagaacggtaagcgaatgatcgagagaatcgtacagctacggaacacgttagcacacgtgaattcgttggagttatcctatcaggagcgcgagctgtgcatgtaacagaaggtttcactgtgtgtaattgattgagggatgagcgcagaagtggaagttcaggctatctaatcaaatcgttagagcaggactgcagcgagtaagtttggtgggttacaaagttgggatacaagctcggctatcggatacatggactgtggagaaggaaaacaggaaagaataaaaaaggattcaggctagggggttgagctttgaaacgcaaaggaagccggtcttatatatgatcttcagacgtcaaacgcactgcacgaaggcagaatggcgagaagatacaatacgctaaaggatagatcgtacaacatactgaacatacatgcgctggacgactgcatgttggcaagtcgatgcgttggaaggggatgatgagttgagcaagcgcaacgatctcaagccatagctgacggctgtgtaacaagcaggtcacacccctgaatacgaaatcttgaacgtaatctcacagatatgtagtaatagcattgtaataatagtcatcaggaccttcattcgattcaatgcatatagtccagtcaacagtctatatcgccttttgagtctctgtctaaagacactcatgatcaacttcagattccaggaaagaacaatcttgttcagatgtctagcaaccagcgtatccattcgctaactgaagagtctaagtagactcgatgagaacgaccttcctgctcatatccctaggttaagtctatggtcaggatttgtaacacgtgactgttgataatctagatctgggttgtcacctttcttcccgtcacgaactcacacccacatacatacacacacgagagaaagagagaggacacatactcacgtctatactcaaccctctttgtcgtacgtttcaaaaaatgccaggtattcttccaggcaacacccatcacccggccacgccgtctgctccaaggcgagttttgatcctgctcaaacgccgacctgtcttttcgtccatcctagctatcacgttagcaactaccatctttctcgttctctcccctgctcaagctcagaggatctcctcggctacaaaatcctcctggtactcctcctcagacggagattatacctcagccgcctccaaagctgctcaagctgctagcgatcgtcaacgttgtgacaccatttggagagaggaacaccggggtgccagctggggagggtcgcctgggcagtccgacgtaggcgcggtccctcccaaaggtggttggagcaaaaccggtgatggtgcagacgatgttgaggatgaaggctggggcgaggaaggtctctcgtcttcggtacatagcggttcggacaataacaacaagttcagcatggcaagagaaatcagcaaaggaaagagtagaaagcgggtcttgcaggagatggtcgccaaaaccaatggatattatgctagagactactccctgtcagtccttgttttttatttctattattcatattgtcttttcgaagggagaatgaacacttggatatgaagccctcatggatgtgcttcatctccattccctccgtctcccgaggctgactgcttgaaaacgacgtttatctcaatagctggcttggttggaacaacgtgcgatacatcatcgaagcctccgttctgcaggcagacatccttaaccgaacgcttgtcattccgacatacgtatacgccagagcttgcgaattcgataagcacacatgtgcttgtgagtctaccattagagtgaacgagggagatggcttttgtaccagatgattaagggggtcgtctttcgcgcgtcactgactcgttctcctgtgcattatctcttctttcgtagcgtttgcaaagatggtcaaccgtggagatgccctcgagtcagacgagtggagagatcagcctttggagaaacagtgggcctgggtgattcctaccgaggtctgtaacttttcatcttgatcactcagatccattgttcaaataccctctttttcatggcttgatgaacgtttttcctaatttgatctaatatcctcttacaatacgctcttacccaaacagctaatgatcgacgtgcctctacttcaagaaactcattcgatcatcaccaccgccgatttcctccttctccaagatcaaccggcttcgatcgagaccgccaaaggaaactggaacaaggcttatcatccttcagctagctatcacgagattcccaacagagattacgacaccgatctcgtccgtgtcgaccggttacctgatggataccggaccttgacacatacgcagaggaccgcaggtttaggaggagctgtcaggaaactgtttgagggatcgaaatctggcgacgtcaaggatctgggagagctgttagagaaaattacggagctgagtggaagaacggaggatgaagcagaaaagatgttggctgaggtcggcgtttgggtgctcaggacatggcagggatcgtcagtcttgtaatttcctctcctttctctcatctgacatcgcgctgcaacactctatcctttttgaaacaatcagacacaaaatggagtatgtcaggactgtgaccgatccgatcaagcaggtcgcgttaggtgaaaacatgaagggctggtggaacgattaccatcatatcactgatgaggtttgtttgatcatagttcttctccgttggcattttctcatcatcatcacgcttgattgaacgtatacttgtctcctttcgttttctgactgtacccacggatatcataggtcctgtacctccaaggcgagattcattattggcgtgagtttcttatcgtctcctttcctcactaaaaatgaatgtatctgaacacgaaaaggggaaacaaacaccttctgaacgatttgacaggaaaacccgtaagtctctggcattcctctatattacatttctgactcaatttgcttctcactcactaagtttttctccttatacggcatctgaagggttccgtccgatttacctctgccaaagcccagagcgactttgccaaagttgttctctttggaatcatgcctccatcaaagttatttgaactctcgatccgtctggacgaacgaatgagagagaaagttgggggtcggatgtggatgggagctcatatgagacgaggagtacgtactggttgtccaacttcccctttagcccactttttgtccaaactagacgtcatctgattcgtccctcgttcattttgcgaatgaacaggacttcgtgaaacacaactgggtgatgaacaacgatgcttatcaacatttcgataggatcaaaagatggatgggaactggcgcaaagtttgtcaaacgtccacacaaaacaccattgtcttcgttatttatatcgaccaaaagttgaccgaagtgaactcacaggacgcttcaaaatatcaagtcgagcggaaagcatgaaacgtactctgtaccagatgcttgggttgctagggactttgagctgtatgatgctccccaaatcggtgacccgtaagtctatcgcacctctcttgctttccttgccaggcgcctctcattcgatttgacttcatccaattcctccattccttccaaataccgtttgaactttctcagattctacttggcgaccgacgaacggaatgccactcatctcgagtactttaaagccaacggcgctatcttcatcggcgatctaatcactgctgcagacagacgggatcttgacgcctggagtctcgtgttcacagatgtacttggtgtgttagagcaaaccatgcttgcgagaggttctttcttttacggacatgccttgagttctgttgctggtgagttatccatacaaaaacctcaatatcaccacttgtcataattacgttctattgggtgtaatcgtgagaaagatcgtcagcttacatcaatcaacttgaccttcgtttcaataggcggagcggtgaatcatcgagctactctcggtatgtacatgaatatcctatatcttcttcctcttcttcttcctcgtcgaacaaccaccgtactgatatttctatttccttctgtgtctgggccttgcacgtaccttaggcaaggatcctcggacgactgtgatagattagaatatgcactcttctttctctagtctcggagtttaccttctctctattctctacatttaccattcagtcccatggatacttcgatttcgtgttctactatcttgttcccaaaagtcttttgtctttttatctttcccttacatggctctcctacttgagatgagagttggcatgagtgtggtgtatactcgtaaccacatgtcacatgatcgtaacttcttacagccctcgacgcgtcgcgtgggttgatttcttttttattttctttctgcttttaatgagattgttgcttttctttcttccgtccaacaacaaatccttctcaagctgccatggtgcgtctcactctttttggttgtatctgtcgcttgggactgcctgagatttctgaagacataaagagatatacatgattgataactggacgtttggaatctgaatcatatgtttgtgttgttaaaccttccttatctttcctcttctgtacctcttgccctcgtcatttttgggtctaaatacaaaacacgaaaatcgaacatccagtcttcacctggcccatctactatccgaaacaaacgtgctcggtcgccttcaagagatgaagactctgatgataatggacatgcgccttcttctggcctcccaccctcttctccaaatctaccgccatcttcactcccaccttcgtctcctcctccaaggtttgacgattcaggtgatgagttaccacaagacgaagaggatgtggatgatgtagatgacctggatgctgatgtagaaggcttagtccttcgaagggatgaagaccaagatggagagctaggggagggagaagaggtgccttcttcagagggggatggagagtttctgaataacgatctggacacgatgcgacagtgcgtctcatttccacttccctttctatccattctctcttgcctctctctttcttccttcatgtgttgaaaggctaacttgatctttcatccggttgatcttctacagagattatgctgccaatccggagctcgaccgatactctgatgccgacctcgatgacgaagagtacgaccagatggacgcccgagatcgacgagaagctgaagctgctatggcacgtcgagatcgaggccagactggggggagactcggaaggagatcgaaggctcctgctttcttgctttcttcggatgatgacatggctggtgatggtctgctcgatggaattgattctaggagaaggagaagacattatgatgagcgaagggatgtggatgatatggagggggaggaagacgtgagtcttcttttctttctaacatttctcctgttctatcgttcttttgtcccttaccattgcgtttgccctgtttcgtttacgtggttccctctactttttctttctaccgaatcgaaaggaaattccgttccaagacctgggtgatatcaaagccaactcgatcaatgagtgggtggccgtacctgctgtaaaacgatcaattacccgacatttcaagaacttccttatgacttatgtcgatgagcatggtcactccgtgtatggtcagcggatcaagacgcttggagaaggtatgccagtttcgattctcgcgtcgcgttcaggggaggacgaccaaggtagaaggattcaagagtgaattactgattttgcctctctttttacagttaactctgagtctctcgaagtgtcgtaccttcatctagcagcttccaagcccattcttgcctacttcctcgccaactctccccaagcgcttcttgagacattcgacgcgtgtgcgctcgatgcgattctcctctattacccgtcctaccgacatattcatgacgagatccatgttcgaatcactaatcttcctacttcaaactctctccgagatctcagacagaacaacttaaattgtcttgttcgagtatccggcgtcgtaactagacgaagtggggtatttccccagttgaagtatgtcaagttcgattgtggaaagtgtggggcgacactaggtccgttctaccaggatacgatgaaggaggtcaaaattagcttctgctcgaactgcgagtcgagagggcctttcactgtcaactccgaacaggtcaattcacatcttcacacctttacttcattattccctatcctgaaattattcgcaaataaaacaatttattgacccgtgttttttcctgtgtatttacgcgtcttctttattggcttcctccagacggtctaccgtaactatcagaagatgactctacaagaatcacctggttctgtgcctgccggtcgactaccccgacatcgagaggtcatctgtctttgggatctcatcgattttgcgaagcctggagaggagattgtcagtgcttttctttctctttcttctgttctgagaacgcactggttaacggtttgacgatgttttcatggaatgaacggtgtcaatcaggaaattacaggtatctatagaaacaactatgacgcctcactaaatatgaagaacgggttccctgtgttctctaccatcctcgaagccaatcacatcaataagaaggaagatttgttcgctgctttcaggttgacggaagaggatgagaaggagatccgacttttaagcaaagacgaaagaagttggtttacttctatccttctcttcaacaaagtcttgaggaagctgtcatgttaattaattctctgtttctatttttgttttcaagtctcgaaacggatcatcaaatcgattgctccttctatttatggtcatgaagacatcaagaccgccatcgcgctatcgctcttttctggtgtatccaaggatatcaaccggaagcatcgtataagaggagatattaacatccttcttcttggagatcccggtacagcaaaatcccaattcttgaagtacgtcgaaaaaacggcccaccgagcagtttttacgactggtcagggagcgagtgccgttggtttgacagctagtgtcaggaaggatcctgtcacgagcgagtggaccttagagggcggagcgttggttttggcagataagggtgtgtgtttgattgatgagtttgacaagatgaatgatcaggtacgtttctatatctttcatatgaggaacttcgagcagtatcgtctcattatcagggatctgattatattgctactctactcttttcaggatcgaacatctatccacgaagctatggaacagcagtcgatttctatttccaaagccggtatcgtcaccacccttcaagccagatgcgccatcgtcgccgctgcaaatcctatccgaggacgatataaccccacgatccctttccagcaaaacgtcgaactgacagaacctatcttgtcccgatttgacgtcttgtgtgtggtgaaggatacggctgatccagtcaaggatgagatgttggcaaagtttgtggtaggaagtcatttgcgaagtcatccggactttgagaccgcaatcgatgaagtcaacatcgccaccagtctggacgccgatgtatgtataatattctttttgaaatgcagatttctatcttgatactaacgccaaggtgaacgaatgccttccaatgtgtctgtctatttgacgtactgattagatcatccctcaagacctcctccgaaagtatatcatgtacgccaaagatcgaatccggcccaagcttcataatctggatcaagaaaaactctctaggctatacgctgatcttcgacgagaatcccttgcaactggttctttcccgatcactgtccgtcatctagaaagcatgattcggatgtcggaagcaagtgcgaagatgaacttgagggagtatgtaaggagtgatgacatcgatctggcaattcaagtcacggtggctagttttgtaagtgctcaaaagatgagcatcaagaagacacttgaaagagtgagtcaaacttccgtttttgctgttttctgccttgatgagaatattttagcttattgaacattctaatttttcgttctaggggttccgtaaatatctcaatcaagcgactgatcgtacgtttcactttgttaaaattacaacttgttacctttccttcaacaaatcgactgatcaatatccatatctcttcgcatgcacaacctttgtagacgaggagctacttgcgttcctgctcggtcaaatcgtcaaggagaaagcattacaataccacagtattcacggtgaacaactcgaccaagtcaagatcagagttgtcgagcttgaagatcgcgtatgtcctgatcctgtgcttttctatacattcacacccacttgtccgtcactgaaaaattgtctgcgtcttttgtttttgttctccacaggctaaggatcttgagatctacgaactttcatcgttccttcggtcagctctgttcaaacgaaacggatacgtccatcagggtaaagagatcatcaaatcatttgaacgaagacggccagcggaggaagatgaggagatgtaatctcttttcttttccttgtctactttgttctggattactttctactagggttttggctttatctcttgtgtcccttcttttctgtgcttgtatactttgccactttttccatcatcgtcggctttcgtcattcgtctatcttcgttctatttcatctttctaaatcttcttgcgccattccctctcctgattcaatatcacgactctcttgttccgttggtcgccttctgttcgttcgtataactatgttgtttcatattgtcgtcagattctgatgcactctactcgccgccccttctttcctgttgaaatatgcgatgtgactgctatcagatactaatatccacaaagattgtttgaccgggacatttgattatacagcaggtttagtccgctcaggatgatacaggttttttgtgcgctgttttaggagaaaaatacattgtgtgaaaaataatataagggggatcatccgtacgttgcaaagcggactgtgcgaagctagagtttatgaaagatgaaagagggatgacatcgaaaactgtaagaatgagatgagttggagattagctgtaagaggagagcagaacgaaccattttaaaactctactgtttgcaattccacttcgaaccaatagtaagaaatttctagtaaacatcggtccttcgttgtttctccactgggatttgtttcctcacgccgtggacttcgtccagatcgatgtcaaccacgacccactcggacttcataggtttcactctgtccgctgctgggatatcaactagcgaggacagccgaccgatctcgtttccccacggtgaaaagatcagggtttcaccccaggaaatgttatcctcagcatgagcgcccgcctgagctggagcgatgacataaacctgattaaaaatagcgatggccttgagaagaggataccaatgatcctttccggtcttgggtccaaacacggatgggaaagtgatgatttgagcgcctttccgtcggagagctaggtgcatctcctggaatctgtagttggatgaaaaggttgagcgaaaaagagggagttcgctttaaatacgcaaagctatatatgcgtgtacaaatcagttacgcaacataccggatgtcgtagcagatggccaatccgaccttgccaatttcagtatcgagcggatcacataatctgtttccagacatgatcctgctgctctcggttggagcctctttcggcggctcatccgaatcttcatcggagggattagtgttggggataccagactcagccgaagaagcgtttttcacatccaagtcacacatatgaagctatgttccagttccaagcaaatgaagggatgcgttggtaagggcctggatctgaactattgaacggcttatattctaaactatgaacccacctttcggtaggaatcaagaatctctccatcctggccaattataacctgggtattaaagactttttcacttccttctccatcagggttctcctcgtcctcgccagggcgttcgtgaataccagcaaaaatggtgaccttcaattctttggcaagggaccgtatggccagctgattgttacaaacgttaacgactatctatcgtatatggagttatgaggaaagaacagtagttacgtacaacgtatttgtgatccttcaatgttccgctcatcaaatatcctttgtgagcgtccccggtgaggtagtcagcggcttcgggaaggaaaatgacctatcaagaaaccagtacagatggtaagcatcggaaagttcgatccaaagacattagaattgatgcttcaagtgcttggctccaactgatcaagcttggatgcattttcagccatcccgtttcaaaatacttacacgtgcaccgtcttgagaagctcctcggatgacctcctcagaaatccgaatattccgatcgacgtcatcggtggacgttatttggcaggcagcagctttgaccattgtttcaaacggaatgaatgtggtgaacttaggttgatacgagattgataaagagatgtagctgaaaagaacggcacaatcgatcttcttcttatggaaaatcgacggaggaacggatgaaaaaagagtcaacttcgatcggtcgagagagacatcggagggttgtaaatattaggacggtgacatcatcagcctagataagataaccagcgtgacaccaacgcgtcgacgcgtcagataacagttttcttgttcggccatcgttctacattgtctggtcactcgcttgtatctgcaccggtgttgctactgaccctcacactcaatctcttgatcgctgatctgttctgtgtcctggcatacaatgtctcaacaacgtacgacaatcgttcatccacttagtccgctttctgtgcttcctcagccaccgtcgctcttgccgttccatatcgattacataggcccagctcctgtgtcgacttacctcctgactcgtcctgcaccgtctccatcctccggctctacctccaccctatcatcttcttctgattctttacttctcagctcattccgaggtagacagatcgttggtcaacctctggtccttccttcaaattatgaaggatacatccttgatgttcccccgccgccttcgactcttgcattatcatccggtcccagcttgaaggatccctcccagcgaggaacaacctttggtcaggcttctctcagacttgataaaacacaatcaacggatcagcccagaaagtttgcaagaacaagatcggctaccaaaaggttcttttcggaacaggaagtgacaccttcatcaacggaggccccatcattccgagccaaacaactaggagcaaagaaacaaaaggtggctgctaaaaaattcaaacttgagtcagactctgaagaggatatagatggtgaggaggaggcccaagaaatcaaggccgttccaaccgctataccaatcgagacaacttcctcgacgtggacagtctcgaccgtcgttaccgactctgattccaacgttaacacgcaggaagacgaacaaacccctctctcgacgatatccaatgctaccgctctttcctctgttgacgctactggcttgacagcaacggatgcaacgacaacagtacactctactctcccttcaacggacatgtttccttcttcggatcagcctatagattcgaaagctacgcaggacacacttaacctttgcccatcctctgttccttctgttctacatgatattgcgccttcagaccctttggcctctctaccctcagaagagattgcagaagatgagggagacattcatgatgtcaacctcgatgccgaagacgatgcagaactctacacaccccctggtcctccgccaagagaacttgttccaacacatacgttcaagcagatcaccatttggacggcagacgatccagttgatagagctcgtgacgagttctttagatgttttgatgtaggaggttggattgacttggcgaaggctatccatgctgaggattaacttgtgttttcttttatcatgtctatcatcgccgtcatgattgttgttgtttttttgcattatcattatcattatcctcggtcaaactaccaagacacaacacagcaaaaacaactgcattaacaccaaatcgaattcttaaagccataacctcttctttctcaatcaacccttgactcaaatctcaaccaccaacaaacatcccaacaagttctctagatttgagcagccgcgtgtctatccatcaaaagagattgaaccaaagatgaatttcagatttcagttgaaatatacgacagagaagtgagggcttacccgtccgctcttagatcacttccagcggcccaaactcgtctgccagtcgttttgtctttgatctgttgaataatctatgagcattaaacaacaactgttacatatcagatatttgtcccagagacttgaatcaagtcaaagaagacaaagacgtggaaagctgaacgaacctgaccacggcccaaagtagctcgagcaaagcctttagcttgtcgagcgtcatgacccatatcttatcaccatccaagttcgacatacaggatgtccaggtcagccgtgcaaagctttctactcgcaccatggacatagagagatagacaaaccgcgaagggcctcgactgtctctataggaatcccctcttcgatataaacctaatccgtcattcggcgcgcagttaatgagtgagagagagagagagatatgattaggttgggtctcagtctgaagtagagttttatttatttgattaagaaatcaaaatctgataagaaagagacaggtacctcagagttgacatctccggctgaatggctcgtcttgacttctgcatcgggtaacccagcctgcaaccacgttatgttatcaaaatgactctactcttcagagatcacgcaagcccatcaatggtaggaactagacacttacagagatgcaaaatctcggagcatccaaagcctcctgaggagtcattccacggagcatgttcaacaggacctgtacgtgtccttgaggctgcatgaaacctgatgattgccaccgttttagtacagattgatacatcatcttgtatcaaatcggtcggacagtttgggcaatatgtgtacttcgtgctcaaaaaaaacagacttacctcccataacaccgtaagaaaggaacaattcgtcacctctaagtgccatagcagggactaaaagaagaatgaaacgggtcggaaccatatatcaactgtcctgttcccaggtcctctgatcccaacgatacagggtcacttactgatcgtgtggtacggtcgctttccgccctaaaacccgtcgaccccaatcaccagaatacttcttagccaaaattggtggtaaactcggaagaatcaaaggtaaacgcaccttgagctcgttgggatgaccctcctcgagggtgaatccacttcctcggtctatgcacatcaagtttacatgtgttcagtcagacactccatccattgggttccttcaagaaggaagcatgtacagaatgggaaacatactctgcaacgtgaatccacagccggcgggaatagcacccgtcccgaaccctgcatagttagaggcgatgaaggagcatgcattccctgatgtttatcgaataagcgtggaagtaagaagtatattaaatcattcaggtcggtctgtttcgatcactcattttatcacgaggccacgcaacaaagaaaaccccgagacaaaccatctttatcgcatgtcgtaaagtatactgtgtctgtagaagcgcaaggcttgccgtggtgaacagaggcgactgcctgggaaggatcaaatagtttggctcgggtcttgagatattcctgtgtacacatttatggggttgttttgttgagaaagagccaaaactttcttggatatttagtctgacttataggtaaggtagactaatcttacctcgctaaggagctcggccacaggtacatgaactttatcgggatctgagacgtaatatctaattcctcgttccgtccacaggaaacacaccggcgggcaggtcacgattcattagctctgcgatccagagatgatacaacagcaaagaagcgtgtgatgcatcttcctaccttgtatcggcgaaactcaatcgaagggcctcgatgaggacatgaaggtactcgaccgaattgtgatccaaatttgtcaaatcctgtatcttgcccgtagcttggatctgctctagtatacccagagcgaggagcgcagtgagaccttgaccgtttggtggacactgggtttatggtggtagattgtttgaatcatttcgtttcagtcttggttgaacatctcatgaacatcatgtcatgatgtgttaaaataccgattgatttcacagataaacggacggacctcatagatcgtgcagtcgttcttgtacgtgtaagagataggttctacattagcagaatgatgagcttccaagtcggatagttccatcactcctcctttgctctgttcgataggaacaagagaaaattctttgtgagtcttggaatcaacctgagcaaagatatacaccgagagagagcaaacctgaatgagatcgacaatggcctgcgcgatccgtcctttgtagaacccatctctacctttctcagcaacctccttgaacgtgttggctaagtcagggaaccggaagatctctcctgggttaggcgcccggccatccaaaagcatgctatccgcagaaggcgaggcattcttgatgagattgactgaacgctgccactattcgagataggtgaggatatcattgagaccgtcagacataactacaaacaggcgcagagaaagataagggaggacaaacggcgttactgtgcaattcagagacgggaacaccttcttcagccagacgaatggccctgagccatgcagaaaagagcgagcaacacgattagtttttagagttagccttaatagagaaaacatgcgacgaacggatccaggatctctctcatcgataattttccgcttccgaactctttgatagtcgtacaccatccatcggtcgctccgggaacagtgacggagttcaagttgtcgagagggatgtgtctgccattaatcccgacgctccgagcatattccatcgtgagcttggcgggtgatcgaccagatccgttgatggctttcacggtcttatccgatgcattatagtagaggcagaaaacgtctcccccgatacctagtgtagagaaatttgtccggccgaaaaactcagtctacatgtcatcaccttcaagctttgaggatataacccatggagagagaacataccggtgcaagagggctcggtcacgttcaaagcggcggccgtagctacggcggcatcggcttatgtcggatagccgttaccggcgtttattcgcgacaaagatgaggattcaaccgagaacaaaaaaaattaatgaaaaagaagagatgtaagcatatacaccactacttgaagcagctttaatccatctagacagcaaaccagccaacggaagacgaaccggcatttccacctttattcaaaacctcgattccagctgagacagccaaaggttgagaggccgcaacaagtcctttggtagagaacactacggatcggctgtatagatgagcatgatccgagtttaattctggagccccgatttgactgactggatttgtcgacgtgatgtgaagacagagtcaaagaagaggtgatagaaaggaaacacgaaccgagatggatgggtcgcaaatgcaacgtcgacgttcggatagacgcgagaccaatcgttggacattctgattagatcaaactagaagatgatatctgcgggagtgagtagcgtatactgagcaagggtggctatcaagatgggatggagatggagagaagaacgaagaacgaagaacactaagaagtacccgtgtgcttcaaaggtgaaaagcgttgatggcatctgtacgagcgtcggccaagtccggatggatgatgtatcagggatgttagggttacggccgctcttttgtaatttatccgttcagtcttttggcggctcacattagatgatgaggaggtctgacgacaagcttcgcaccatcatcactcaatgattcccatacatcccactccttctttacagtgagttcttgttcgttttcctgagcttgtggtatggatctttctcatcctgtctgcttgaatctatagtacacccggccttctttgtctcgttctcgatttgaccccgctatcctggcacgatgcgtctcaaccttcgtcatcttctggcccatcaattccggaccaagccgaggagtcgttcgagttagagtccatgctctctcacgtcatggtatttttgaacgcgtttttggctgagaaagcaggtaatggactagccatctggggcgtcaaaggtcgaagaaggtttgtttaggtcgtcttctcacgattgaatgatagcagtttgagttggttctgatcaccttatgttgtgtgaatctggtagctacttgttatatgccactacagacccgatttcttcagcccatagaccagaccctaatacatttgagccattcaaaatcatggctgatagcgtgatatccaaggtcaaacaaatcatgacggacgagtcgaatcccaccgaaggaatgggtgcgtgtcttgttcttcttatgacgtttcgttgtaccttccaatgaatcttgtgaaaacatctgacttaaatctttctctgatgccaacataaaaacaaccatagagacaacatcgctggtgacagcactgacgaaagcactttgctgtaagaattttgcctgttgatacttggctttcgtttgcttcccagaggcttacatattcttctcctgatgcgtcttcggacccccgcttatacccatccacctagatatcaatcgcctgcataccctctcggcttcatccactccaatcatcatacctcctcctccgcgtccctcttcgccttctgccaatgctcagtcaactgctgctcctccgccatcagcggcggttttaaaggcgaattcgttagcggctgagaacgcaagttataactcgagaattctcgttgtaagcgcctcggaggaagagagctctggatatgtcagtctgatgaactgtatcttctctgctcagaaggcggtaagtacagctttcccgtgatgcatgcttcttctttaattcattacagcctgatgactcttgttctgtcctctctttcccttccctttagagaatcatgatcgatgtttgcaaagtgactggatcggacgcgatcttcttgcaacaagctgctcatctgaccggtgggatctaccttcgtactccaaaacgaactgctcttcttcaatacctcatggtgcgcttcctctttgttgtctgatgattgaacagaaagttaacctcctgcattcacaatggcaccgggcctgaaatcataaatatagatgactttccttccgagcagaccgctcagacaacatttacttctgccatcccaagaaagggtcgacttcagagccgcctgcttctgccacaaaacgatcgttgacgtcggttatgtttgttcggtctgcctaagtagtatgtctcccaagtgccttctgtatgtaccactacttaagaccagcccatctcattctgatctctttttgcttctacagtattttgtaaacctatcccggtctgctcgacatgcaagacaaagttcccgttgaagacactccaggccctcggcttcagcatgcctcggccccctcctgctacatccgctgcaggcggagcaggcaaccggttagctgctcttcaagcaggaagatgactctttgctatccatgtatagtatacagatgattgtatgcgcatatactcaaaaaagcataaggaaaataatctcgttgagtcaccggtaaattgaaactaatgactccatggtttccatggcaacatatgcagccgcggcctaccttctcttttttttttcccaactccacttgcgatttcatatggcttgaacatctttcttcaacacacatctcttcctcttttctcctcacatccatcatacagaaatcatcatgtccaagctttctcacccttctatcaaaggtagctttgttcttggctgcagagatgagttgataactggattgtcgtattgaccggaatggtttctcattcttctcttgttcttttacctttatctagacggctggttccgagagatctcgagccagtggcctggacaggctatgactctccagttcagttcttcagttcttttcatctcagctcatcctttcaatgaatcctttgaacataactgacctaatgaatcgtgcttgtgcctcaacacttttccggatttcatcttcttatcggctggtcggttcgtcatccgttacctataaacttaaacttcttaaatacagagttaagcagatcctccacaccgagaagtccctcttccaggacgtcctcgtgttcgagtccgagacctacggaaacgttctcgtcctcgatggtgtcatccaggctactgagcgagacgagttctcgttcgttccacctttgcattcatccttcgcgttttattcgcttcaatagaattgcattttgatcactggtgtctcctcgatatcctgatatctgtcaaaaacagctaccaagagatgatctctcacatcccgttggcttcccaccctaatcccaagaacgttttggtcgttggaggaggtgacggaggagtagtccgagaggtccttaagcactcgtctgtcgagtctgtcgttttggttgatattgatgaggtttgtctcttcatcatgatctcctctttcttctacagtttgagcaaaccgttgactctcatcgattgcttgtctgtttccttgtgtttactcgttttcactttgtatcattcatcaggctgttccccgggtctccaagaagtacctccccggtatggctgatattctctctgatcccaaggtgaccgtgctcatcgccgacggtttcaagtaccttcctaccgtcgaaaacaccttcgatgttatcatcaccgactcttccgatcccgtcggacctgccgcctccttgttcgaggctccttacttcaccttgatgaagaaggctcttaaggagggaggttccctctccacccagggagagtgcctctggttgcacttgcctttgatcaaggacctcaggaccatgaccaaaaacttgttccccgttgccgagtacgctttcactaccattcccacttgtatgtctccttgtttacctttctttcgagcattgtattgagtgagcttgagttgactaaagtaatcgttaatttgtacgatagacccctccggtcagatcggtttcgtggtttgctcgctcgcggctgaccgcaaggtttctgagccgttgcgagaggttcccaactgcaagtactacaacaacagtgttcaccgaagcgcgttcgttcttcccgagttcggtcgagctatggtcgaggatggcaaggatctattgacgggaacgttcggaggagttaacactgctcgattgaacgaggctgctaaggctggtcaaagtggaaagaaggtcttgttgctcggaagtggtttcgtcgctggaccggctgctgagtacatcaccaggcagggaaacgagttgaccatcgcctgccgaacgctcgctaccgccgaggacctcgcctcctctctccctggcgctactcccgtttctgtcgacgtctcgaactccgctgagcttgacgtcttgatggagtctcacgaccttgttgtctctttgatcccttacacctaccacgccgacgtcattgaagccgccattcgaaccaagacccacgtcgtcaccacttcctacgtttctcccgccatgaaggctctagaccagaaagtcaaggatgccggtatcactgtcttgaacgagatcggcttggaccccggaatcgatcacctctacgccgtcaagaccatcaacgaggttcaccaggccggaggaaagatcaaggagttcctttcgtactgtggaggtcttcctgcccctgagtgctccaacaaccctcttggctacaagttctcctggtcttcccgaggtgttttgcttgctcttcgaaactctgccaagtaccacaagggaggaaagaccgtggaggtcaacggaaaggagctcatgggagaggcccagccttactacatcactcctgctttcgccttcgtcgcctaccccaaccgagactccactcctttcctcgagttttacggtatcccagaggccgatacttgcatccgaggaactctccgataccagggcttccccgaggtcatcgccgcgcttgtcgagatgggtttcctcaacgacgagcctaacgcgaccgtcgagaagggagctgaagccaagacctgggtccaggtcatgtccgccgccatcggtgccgaggaagcaaccgagcaagccatcgttgccaagctccagacactcaaggctttccagccggcctcgctcggttcgctcttgatctccaagttgcgaaagttgggtctgttctcggataagaaggtcactccccgaggaaacctgttggacaccctctgcgctactctggaagaggagtgccagtacggagagggcgagcgagatcttgtcatgcttcagcacaaattcgttattgagaagaaggacggaacaattgagaccatgacgtcgacccttgaggcttacggaaagcctgacggtccttccgctatggcgctcaccgtcggtgtgccctgtggtatcgccgtccagctcgtgttggacggtaccatcacgcgaaccggtgtgattgcgccttacgatgaggagctctgtgttcctcttcgagccgctttggagaaggagggtatcaccatgatcgaggaggttctttagatttggctgaatccctctctaatctgtagcttttcttcttcatcatttataaataaatccgaatcgtctgaatgctgtttatcgtatgtttctatggatatctctgagaaagctcgaaagtattggtgacatcaaacggaacgctacagcggggctgaccgaacataatttgagacccggcgagtttttaccggcaacgactattctttagattttctcttggatccctcatcatacatccatcactttcgacacaaacacaaacacacatatcttctctctctatccagttgtctttctcctatagaagctgaggttggtctagtaaacaagttcttgccaaatgttttacaatttgcacattccatttccttcagcctcgacttcctcttcctcagctccaaccaacaaaccttccaagaaggccaaaggatccaaaggacagcccgtgtctgctcccgctgcaactcgctcgacctcatgcttcgatggagtaccgagggatgagaaggagaagatcgagtccgcggtgaccatgtctaggcatcgttcgtagagaccttccattttgatttgctctgccattcctctctgtacctccctctgcgaggcgagggcgtactttgagtggggttcatgatcttgtttctttgactgacatcatctacgcattgtcactccgaacgaacatgtaaaccacctcatcagttggctattctgtcgtggcgtttactcaaacagctacctctcagattccaacgaccggtcaccaaaacccatttgccgactcaaaggtcccattcggccacttggaccctcggtatagtacgaacatgatggatcaagcaggtagaccggtggtgcaactcagcagactacaccttgttatggatgatgctagtttgctagggagtgggccgggtttcgtatgtttctttctctcatcgattgtgtccaaaccgtgcttcaagaggtctggctaaatatttaaagtctaccttcgctcctctttgatatcttcttgatagaccgcccataatctgccttacttgtcccagtacgacttgctttccgttcagcctctctctcaggctgcgttcttgcacgcctgtctcaatttgagtgtccccggcccaagtcaggtagatagctttttcctcttgtcgctttatgctctttcggctagaaatattcttctttcctgtgtttggtgaagctcgatgctaattgatttggatgtattgatgaaatggtaactatctagatctctatcatcactctcgatttttcgagtttacctttctcgactcgaggaggagcaccttttagactcaagagaaaacctctccttcaagctatccgttcaggcgttgttgttagtctctctctctccttccttcttctgtcgtttcttgagagattctcttgttattcagaatgagtcctaatctctattccttctgtctaaccctgtgtctgatgtgaccagtttgagattttatacacacccctcctcccttccgctggtgaatcatctgaagaaaatgctcaacgaagaaggacaactctgtcgttagctagagatttgatccataccaccaaaggaaagggcgtcatcatttcttcaggaggagccaaatggggtgacctaaggggttcaggcgatgttgttaatctgtaaaaccatcgtgttccctcctttgtcctctttcttgtaagaaaaatatattgaccattcgtcttgggttacgatgcaataaactttcagagggacgatcatgggactcgctccaaaccaggctcatgatgcaatctgtgctaccgccaagaaagtcgttctcaaagcccgtatgtctgcttttcctgccttgatgcattcgcttccttcgagacgcgtggtgaactggcttgaggtggtctaatgttttgtcaatcggcatatctacatccctatctcaaccttcttcttcgtcgtccttccagaaagccgcaagacgttcaaaggtattctgagtgcgcctcgagtgatccttcctagttctcagtcggaaccagtagtagataccggatcgaaacgaaaagcgtccgatggttctatggctgttgaagattattgatgaacttcaactcgaaataatcacatggttctgatgtaagcgctgaaagtgtacacgtatctcgaaaaacgaaacgagtacacagtcgttccgccaaagaaagaaagagaaagaaaaaaaacttgttggctcgtgtcgatcgcaaaagatctcgaatgaacaactaacactcacgcacctactaactcattgttcactcgaaaacatctttctcagacaaagatgtctaaacaggtcgtagcccacttcatggtaggttgatgcattcgatctgtatagctgacctcagtttccatgagcccttggttctgccagacaaatgtttgaagagggaaaacgcacaaaatagaagaactcacccgctaccttggtttatcttttcttgacaacaacttcacggactgttgttaatcgcccccacaaatggcaatgaaagctgggaaacacgtattcgtatacagatgagatttgggtcgaacagatcgaattggctgtcaagaccgggttgtaagttctagtaggcttctatggctatgagagatggtcaacaaatcggccagctgaaatagtgatcggctcggttgtgcacagagatggattgtcacttaacttaggcccagaagaatggcaatttgatcaagcctgtgaatctttctctctttcttacattcctgtttcattcaactcgatgtcttgacagatgagaatatgtacatcgctaatccaggtatgattcatcataaatcgaccagtgcgagcggctcaactgtgtccccctcacttcaaactctttctgtccttggacatgaatgtccttccttcgtccacaacttcctccgcttctcttcttgcctccaagatcgtcaactttgcgtcatgtacccggtatctacttgcaaacaaagacccctcaggaccaggtactcatcaaatgacgagaactggaaagatcgtcgtttctacctttggaggggcgaacgctacttttggtggtattggatggaaaggactgttcaaaatggttgagaaggagggattcaaggtaggggctctcagtattatgacataaacgtacgcacacaaaagctaggatctgattactcttaagcgcaatcttgatgatgctgtccgacttttcattagctctttttcgtaccggccttctttctacctccggagaagatcatgaccgatccgttagtggatggtacgttctcatggaataccgcttggcccattaatggctctggccatatcacttccgatgaggacaaaccattcttaaaatctgtgagtgcgttctttcttctttttgttctggctttttagaacctcgcatatgcgacatagtctgatgcctcttcttattgtacttgattcggatttgatgaagtctttgttcaagaagagaaaaccgtatatggctgcagtcagcccgtgctttttcactcattacggcacggagcctccttggggctggaacaagtaggctgtcactacttcatccttttcgaactaaataaagtgctgctcgagctcatcatacccacgcgtacgcgtctccttttatgtttttagaaattggatatgtgcgtgtgatagatttcctttgttcccttgtccagagatgaattctaaagcgtcagtcaactgaacctcaaggctttttgatattcaccttctaaacagacccgtctgatagggctctttactcaaagaggtggcatcagatactagaatttgatcctgaatgggtgcagatcatcagctggaatgactacggagagaggtgagcagttggcgtcgttttcttgcaaagaatagctgaactacgttcttcgacgatgtgtttcgctcatctcttctcctcgtcgttgttcggttgttggaaaagccactgtaagacactcttgcggtctgcgcttgacgagatagatgttctcgttaattcgaaacttacactcgatttacgttgtattcagacataggtcctatcgtcggctcacagccaggctctgaagcttggacgacaggattcgatcactctggcttcctctctctcactacgcatttcaatcgactttataaatctttgactcccaatcgtactgttcttccatctcaaagcgggggtagtatcgtacgagatctaaaagacaatatactggatgaagaacaggagcgcctcgttatatattacaggacatgtaggaaggaaggacaaatcagagaggatggaagggccgatagggtcggcaagccagacagagcagagcaggttcgatttcattcagttttctctcgacttacctccttctaaaagcgtatgcctttgcgacggctcattatgcaacattcgtgtttgaggaacgacacaggcagaagatctgatgacaatccactcgattcttcaccaaccttatgtgctgacgatcacgaccgagcccagttcctcgcgctcatcctcttcagagtgtgctaccgaccagattgttccttttcaaaaaggtggaatatcactctcttcccacatcagacttccgtttcttgtttcgtgacttacacaactcaactactctatgcgacaacatgaaaacgatctataggttctcgctacctgaccgtccccttttccccaggaaggatcttctttacagtatctcaagcatcggatacagaagggaaggttgtcggtcgacttgaggggatagagatccaaagtgaagtccttaatgggtataacttcaacctgtgttcgaaggtcctgcatatccgatcagatctggacgattgaagatgcgtgctggaaaagccgtcgttcaagtcggatgttttcttatgaaagtcagatgatatattttgagatttctcctttttactgaattgaaactagagaacaggtagataagaggaacgtgaaggaggtgaagaaagatggtgaagctaacagatctcaacgagggaaaatgtcatcgaaagatactgaaagcgatgatcggtaagtcaactgaaggagaaaaggaagaaggctgtgggaaagaaacggtatcagagttttgtccatggtgaatgtatgcaagaaacaaaagagaaacacgaagggaggagagacacagaggacctcagaggatgctcgaagagaaaggcgtagaaacagagagaagaagaggaaacaagaacaagagggattgagaggaacatatgacttgactgaaggattttactgtactccagccgggttcgctcctcgcagtcggattcttccatccttggtgcgctcggtgataacctgtatgcattcgatcagacgagaacgaagtatgtgctgttcagtatagtttttgggactcgagatagtccaatactctgctccgggaaggatacacatacaggggaagcagctggtcggaacttgtgttcgtttgaatacctgtagcacagcacgaacatacatcacgatcaaagtcatttgtaagaacgttcagaacaagaccaatcagacttcttgtcagcattggacctaattggcaaggcataccagaggaggagggcagcatgcaagagaaagaactgaccttttggcatgaacaacatttggcccgtacctgctctctatcttttccttatagatctcgtcaatcgatttgtgtttgaccatgttcttcgagttggacagcctcagcgagaaccagaagaggaaagcaatgaccgcaagaaggagcgctcgtttccagctagccggaggaggagggttgaaatctcgaggagttggaacggttcttgggcgagcattctgtcgacgttgggagtcagacgaagtgctctccctcggagaagtctcgtccgaggtggggatggcttgatattgattggacatggctgattgatccaagttgtgtgttcagcgagtcgtccagacagaagccagacataagaacatacagaaatgaaacgtacatggcagactgcgatgatgatgaggctgattgaactgctctggttgttgctgccgctcctgatgtagatgatggttcaagtgagagttttcattttccactcgtttaccttcaccatcgactaacatcaccatcccatcccacttcgccatcggctcttccttcactctcttctatctgttacatattccctctgctctatccctgatcgatctcaagtcatgatcaacattcgaccggtggtgtccgctcccctaggtacggcacttgaggatcctcctgatacgcatcgagatcttggatcccatgcttgctctcaatgttgtataaacatcggcacgaacttagactaacaatcatgaaaccctcggtggtaaaacgtttctttaaaagctggctgctgtagtgttctttcggtatttggagtgatcattctctgtggtaagcttagctcccaccttgcttttacacaactctcggtggaaactgatctgaatcttcctcttccctcttaattgttgtagctgtactacccgttttcttctgcttgtctgccttgtgttctttcttgtagctcctgactgattcgtgaaccgatatgggtctctactcgtagttcggttggttctttgatcacaatgtcgaagccctcatgggctcaacaaaggatccgttagatggacacgcggtaagctccgggccttctccatctatggattgtctcctctcctcttccccttctcggcttcttctttgcatcatgtcagttctttcgagcaagacttcattgacaaaacgtgtctgttcttttgttcttacgcgtccggtccttttcaggtggccgtgacttgttacacggcagctatcatctatgtcgcttttatcgtcttctgcggttgccaggttcgtaggttgcattcgagatgaattcaacatcaccatcaccgtactctttaatacaccacttctactatgtgggtttaggatacttactgacagacgttctaatgatctcatcatatagatgggcattcataacagatatcctcgaggagtgcaattataataattcacccaatcgagtttctttctacaccatattatgtcttctttttatatgacaactgtcttccaacatctgaggatgacaaccttgatcaacggaagcaaggttcctttcgtcctttattgactcggctgatgtatcaagcatgcggaaaatgttagagaatatacattacgattactcgtcgtctgggtccacaggtcgaacccaacctgccgctttgcccctctattgttgagacacagagagagagagagagggaaaaaggacgaatcagcacatggcctaactcgtttatacgagctcttggcatcatttagaagagtagaacaaaaagagggagagaatctaaccgtgcaagcatcgtacagctctaacgtcacacttgccaggaaacaagggatttcctgtctttgcgtgacccaaaagtctcttagttcatcaaagttcttggccatagagccggtgagctgcatagttccgaaatgaccttcttgggaactgaacttgaaaccgagcgccgactttgaggcatacgtcgtatttagacggacgtcaccgtttggcgaaaagttgattcgataaccaagaagagaatatagtgtatcgaggaattcctgagattttgcttgaaacacctatgtatgacacacgagttaagaaaaccaaacgagaatgagcgatgctttccaagagtctgaaagaaactcatagcgcacctctttcaatcgaagaagccgtttctctaactgagctttctccgcttctttttctttcctgagcaactccatcgacactctgggcacactctccccttctttcccctcaatcattcctaacagcgcctggttttcctccctgagtgcatctagcgtagccgttcggatggcaagatcctgggaagaaggattgatcgaaagctgtaggcactggaacgtctcaggattatattctcctcgggcgactcgacgttcaagcagtgagatctcgctctcaagcgaagtggtttgatctcgaagggagaatagttctgattcaagttctggtagtgaagtaagttctgtacagatccattcaggtagggaaagaagagaagaggaaaagaaagagaatgcaggcgttgatttgattagatctaactcactccgctttcgcaaaacatgtattatagacggatcactcggacttacgactctgcaagcttccgacttgttggttcagcgtgtcccgttcaacggacagctgatcaaacatgtcttttcggacgtatccctttccggcagccacatcctcctcgagttttctcgaatccttttccattccctcaaccttttccttgtaactctcaagaagctcttctaaccttctgaccttgtccgtcaggtcaccttcgctcaggacgccagcggctgaggccttccttccgccctcggcagtgacagctccatccagaattctgacttccttgctcatcaactcggctctcatctctgcgttctttcgaccttcctgggcgagacggagttctcgctcgagtgattcgacttgggtcgataagctcgagattgctccccgagaggaggcagaaagagattcgagtcgagcttggagggatttgatctcggtctctttcacagatagagttgagagagcttcttggtggagctgtatagttgtttggagttgtgtttgtgaggtttcagaggactgggcagatgcaagcgcactgcatgggttgaagatgattaaaattaaggataagagtgaggttaaaggttgatgataagagctttgacgagctatgaagatgaagatgggcgacagaaggaaagcaggaagacggcacgaaagcatgactcactcaagatcagaacgaagtctctcagctgtctctgcggccagatgacatttgtcaccccatgcgcgatctagttctttgatctgctgttgtagtatctcgacgtcatcttttcgctgtcgaagctggacaagctcggtcttcatcgttgacatagctagatcctggttctgtagatttttggcttggccttgtatgattaattgtcaatcgtagaaattccacttgagcaagtacttctcctttctttcgagcacatgatgtagaaagggcaaactcacgatgcaactcttctctgagaacgactccaaccttttcttccccttcttccctcttggctttctcagcctcctcaatcaattcttcgacttgtcttctcaaacttccaatctcaagctttctctcctcagccctctctctccattccttggattcctcctcaacaacctctaactggccggtcagcaatgtcacctggttttcgagcgatgtgcgcgttgaatttgattgatgcgtcaatgtcgttagctgggtcgagagttgagcattggattgctgaaggtcgtttcgctcggaccggagccgatggatagtctgttgggacgcttgctgtttagcaaatccaaccccagattttccaacccgtcagcggctagaagatgggatgaacgaaagagaaccaagagcgacgtaccaatgtttcaagctctttttgactcttctgagcttcagtttcttctcttctagcatcatcctccgctaatcttcgattgatgtctcgagcagtctcgatctcgtcccttgcttcttccaaaagagcgagaagctcagcttctttttgctgggatgctcgaagacggcgttcaagatcactctggaggattgcctgggtttttcgagcggtggacggaggttctacgttcagtatgaaacaaagatgatagctcaagaagaatatcagttgttaagtaacgcagcaagtgaacgatgataggaaaaaccacacatggtctcgagacacacacataccttgggttgaggaagcgagaccagcatgctcggccgtcctcttaccaagaggaattctagaagatatagg

SEQ ID NO: 2627 - DNA, 5410 bp, Xanthophyllomyces dendrorhous
acggaacataccgcgggattgacccggagctcattgatgacctcttgtccatcgatgtatgtgagtgtacagagtaaacaagacgatgtagcgttgaatgatggtttgttgatggtttgctgagaattcggatacaagccgggtttcggtttcctccatcatttccttccatctatcatctcctctacacatcaaccggccgtcagatctcccattcagatctttcatcatgagtggatctataaatatatccttgccagactatcctccagaattcacgtcacttcggaactcaaactccgtcatagagttgccagaagacctgatctcacccgattttcggccgcttccacctagagaaccgtttcctgaagatcgctggcagaaacccatcccgatagagcctacgtacactcggaggattgtcaatatctaccaggacccgccaggatggacctcaagactaccttctccgatgctcctggctgttttgtcgggaatcatcattggcgcaaggaaaggagggcgaatggcgagctataggttcgccgcagagaacagtcatcgaaagccggagaccttgaatggatggtacttttacaagaaggttcgttctgatgtctctcatctgttcatcttttaggaaagcttgttgaaaccgatgagatctctaatctggaccgcacgctatttagcaaaagaactactatgtcatcctgaatactgtccgatctgcaatcgcgtatgcggcacgatactctgcgttcaccttcactcttatcactcttgaagcttctttcgaaaagatctatccgacgttcagatcctggggtcaacctcctcttgacaagtcgatcactcttcctccagcagacccgagcgcacatttgaacggatttgctacgatagatctgaatgagaaaacgttctggacggacgtgccctttgagatagatggtgtagtcgaccgaaagttggttttcagcagattggcgagcggagctcttgcaggcggtctcttggttggtgcactggccagatggtgtaagattcacttttttaagtcgttcttcttaggattgcgcatcgtgttttcctttctgaccgagatcttgcttctgaacaccgacagatcggttccatccacctacgattcgaaagatcattttctggggtacggtcaccgggatatcccattctgcagccgtgatgtttatcgagcgtgagaaggctcgcgaagcctccatctcttcctctaccatcagttcttccgagcccgctcctgtcacgtcctctatgtccacctctacactaccctcgcctattcccccgaactttgagtcgaccttacaatctacctctctagctatcgattcctccgcatctcctccttctgctcttatacacaaaacgggtgataccgacagagatttctcagaatctcagcttaaagtaccctcggacagtcctgacgaatcgtctggggaacagaatcaaaccaagaagagttggtttgctcggctcaaaggcgtgcttagagcatagagttgagactgtttgcactcttattcgtgatctctctcccagaagaaagaataacgttttgtatttccagatgagatgtatatgtattcgagaaaacatggggaaaaagggactaagaaaaaagtgtttttctctatcaggaagagtacgtgttatactggaaggggcaagactcaagcgtaatcggaatacgtcagcgcatacaaacaagcgagagtacccaagaagtttgatccagttcgaacgaattgattgatagaggagggaagagatgcacgttcgttctatcttttatctatctataagttcttctttggcttcgggaacgtgttcgaggcctctgtcgacctggtgacctcgccggattggaggaaaccgacgtaaggcatgatgtgatagttaagagagtacgtcaaatcggttgagtctctgttgtagttgcgtgccaaggatgatcaacaagagatcagcaggtgagcagtctagccttatactaacctatacgtagagagagagagagagagagagagagagagaaatgaaaccaagactgacttgaaagagtttgacgcctctttaaatgtaaatgtgtttcgaccgccttggatattcaaccgggctttgcgaggagactgaatgatcttatcccaaagaacgaccgagttggacgactgtggcagacagagacaacagagaatgagtgattctgcaagcatcggattgggtgtctgcactgtgaatagatggatagtatagagaagatatggacaaacattgttaggcgttgtgtattcggcgttcagttgaaggaagatctgtttcgtgttccaatggaatagcggtcggagatctataaaccaagagaaagaagaacgaaacctcgaagattcagttggtttctacaatgatcattcgcagattgatcataggatcctcagatacagaacacaaagagcgaaaagccaagagcgaagaggaaaggaaagaataggaaaatgagacggacctgctttgagatcaaacctgacgaatccgtattcgatctcctgattccaaacggatcttgacttgcccatcacactatgttcgactcaaccccattcggtcagcattttcccgttcaatgctgaataaaacctctccgaccatcgtagcatcaaatagaccgagaagaacagcggaaggacgaacacattcaacgactggacatcgatcttggcagcctcgaacggcccagtgagtgtcaaaaagtaagacgaaacagagattgcaaacaagagcgcgaacagcgcggtcgtggctagggagactacctggttggctctctgtagacaagagtacatcttcagcttcaaacaaggcagggtagattgtgttaggaggtgatcagtaccagcatgcgagcaacaagagaaggagatggtcgagctggcagaatggaaagctgtgcgacgacgccacagaccttgactggctgggtgtcattcgatcattgtaggtagcgtacagagagttgtaaggataggaggaaattgggagcaccaggtttattaaggataacaagcaaacaggaagattgagatcaccacgttgggaacgaaggtttgaagggaagagaagaaacgaagattgtacagattttatgctgggttgataacaggacataggatatgtgaccgtaggacgaccgatgaagtggtcggaagaacgctaagagacactaacactcagtatcctcctcgtccttcgtttgctagttggacctcatccagtcctacgtcttctggagaaggctgaagaccaagcgccccgtttacttgactctcatctaccgccatcccagagtcctcttcttcatcctcctcctcctcgccgtttgcctgcatggcctccttcatcttccgcatagcctctccctgagggtagaaagatgagttatgtacaaacatcgatcagcctgagtctctagagtacaaggagagagtacatgaacgcacttcattagagtagtgtcttagacgagctttgacaaactctttatgcttctcttcctgctcaggtgtcatgtcttcttcttcgatttctccagactctccggctgatgctccgtctgctttgggcaaatggggataatctgatggagggagagagaatgaggtcgaacgagacgaattgaaggagctcgttcggttcgatctgggaggtgacgtcgggccactaccactggtataatttgatgcgagaatagtcattaggttagttaacgcctaattaactatatcaaagttgctcaaaccttacttgagagcaaacgactcgagatcacccgttgctgtcagaccagactgagactgcccgttgacggttgatagatcgaacccaggaacatctgggagccaaatgaaatgaaaaacttggtcagattggtatcaaagcaaggaaaacaagatcttcatgagcaaagcacggtcataccactcaaaaccaggtcattctcggcatcgtatcggacatagggcgtcttgggctcagtgatcttcctgataggttgagcgcgacggtcagtccatctggcagaagcatcacaacagaaaagtcaagaacctacatctgggaatctttcgcagcctctgtcatggccaggttttcctcatcccacttcagactaaaccagtcaagaaacaaataagaaacaaacgtatacaaaccttagattagcttgagctgatcttatgattatcgtccagatccaaaaagacatgtagaaagaagacagtgatggaaagtaacgtgagaatcaaactcaactgagtcccctgcccatcagacatcgtcacgttttcctcttgccctacggttggggatccatcaacgaaatccgatgttcctctgaaagaagtagaaggggtcacgttcttgaggattccttttggtcgctgcggaggcagctccggtgtcggtctattcgaaacgggtgacgagtcaagagggatcagaggaggagcgttaagagaatactgatctggttctgagttcatgccgatgtgtgagagtgtgtgtgtgctgttgtgttggctatagcaggtaagaagagatgatggctggcgaggttcaatgtaggagacgctcgagaggaaactatgacgagttaagtgttgtctaaggtatttgattttatttaccttacttaagttgaaccccatctccccgctttcgttgctactgttgatgccgttggcaagttcatctgatcacttctctagctggagatcatcaccagacaatgtcatcatcaacacctctcccagatcctatcgacttttcgccgctcaatttctcgccgttcgagatggcttcgatctgtctgcacaggccggatccggtagcgaccgagcggttcatccaggaaggtcttctctctaggaaagaggtcgagacgatagaatccggttatgcgactcttggtagatacatgtttgtgcgtgctgccctatagtttactgcttcgctcttgtttctatcaagcttatttgtctgtcagaaacttggatccttgctcacgtctctctgggcgcccatcacaccgtcacttgggaaccgtagagcacggctgtatgcttgccggtcgcatggacgacttacctcttaagaggaggagtatcaggcgtctggacgagaaagaaagatttcaatgttctgctcggaggtgtcctagtgttcagtacgcttggacttaaagttggttatgagattggcatcattcacggaggagagaccatctggaaagagtctgtcttttttctattccatttccatcgtgttgctctctgtgtgttctagatgagccaagttgaccacttcgccc

SEQ ID NO: 2628 - DNA, 1412 bp, Xanthophyllomyces dendrorhous
tgctactcccaaccgcgccgaacgctcaaacgaaaacctctatatcttcgttcctgatctctctcttaggatcccaaataacaccgcggtcaaagtcctcacatacaaataccttcacgccgtgcttcatcccgatcggcttcctccgataggttctaacttattcaacattgatgggcaaccgatgttctcgaccaagaaaaatccgctggttgaatacgaacaaatagcgcttgaaagaaccggtcagactttgccatcgacggcaatagtaggtgatcatgataccggtgcacaaggagagttatgggatgagggtagggtaggtgtcgtcgcggcactcgctggtcgattcagagatgcctggaatagggtcgtacgagatgaaacaccaccgaaaacagatgagaaaaacttctgatcttcatagattatagcatgtattcatatatagagggtgtggagaggttgtacagttcaactcatcaagtcaggcacgtgtccagagagagggaaagcatgttgcattttagaactgtttctccttctcttctaaatacttttatttctgttttaattgcatctagtgaaatttattaagatagattggcaagcttctcgttcttgactttacctatgtttccaagattaccccaagaaagagtgaaaacaatcagtacacgtcttttgttaatggagagaagcaacggagaaagaacatactctcggcaaggacggtgaattgaccgccgacctcacagtcccttagatcagacttgtcctcgaccgtacacctctgagaaaggatacagttctccagtttcacactgtttggaaacatcaaaaggaagaaagaaaaggtgtgtttagtacgcgtgttcgtcccgtatgaagcaaaggaaaccttcccaaagaaaagtcttacccgtccccgatagtgacgaaatccatgatgacacaacccagaatcttgacgttccttccaatcacacaatgcctgccaaccacactcttcttcacatttgtccgttcgccaactctggtggaagcgccgacgagcgagtccgtcgagatttgagctcgggcatcgatcaagctcgagtttgatgggagagctccagggggaagcatggttgattgaattgctagattcttaacaaactgtgtaaaagcgaagagaaaacagctcgaaaatgttaatctgatttcaaaaggatatcgagaatgcaaagaaaagaatgaatgaaacggtgcgcacttgacggttgagctcgaaataggtcggtaaagtgttggctctcgccacgaacccatcctccaacttccaaaccacaacaccacatccgactttgccacctccaaccttatcttctttcctccctcccctaccgtcttcctcttcagatgtcgat

SEQ ID NO: 2629 - DNA, 22481 bp, Xanthophyllomyces dendrorhous
tgttggagtgagagcctaagcgggtttggtgtcgggtttaaggctgtagcagaaaatgaccccccggttagcgataccatgaatactgacccagcattggaacagataaaccaaggaagaaaaaataattaagctaaccagacttccaggcctgagccagccgggtttgatacccgcccttaaccaaccaagggacaagttcctcgcgaatactttcaatttgagggtacatcgtcaagagctccagaacagaatgcttaaagacgtatacgtgagagtcgagtagctttgtggtgagggtcattcgagggtatctagttcaaagtgacgtgattcggccgagaaggaaaggaaaacttcgttagcagacgtttgatgaaaaaggaaggcttgtgtaagaagaaggcgatgttcagaatatgtttcttatgacttaagaacccaatggctgtcgtctttgttgggcgaagagaaaagagaggagccagagaaaagaaccattctcgtttgacggatcaggcgctcatctttggcgcccagcatcactcgaccccaactcgaagaataaggatgatgtcggtgtattcatcataaagctttctatctgaacctctccactatccgaactacactcaaacgtagaaggatggagagacatacagaaagaaagacagagcgagtgtgaacaaagtttggacttgtacgtacttccagaggagactcatgcggagctcgatctcatcatcgacatcttcaatctcctgaacgtgcaacagtgactttgtctgtctgtcccacccgaccaagatccgctctggtccgtcttttccgacttcggctcgctcataaaagagtgaggtcattgtcgcgttcggccgcgttcgatgggcgtctagcagggctgagaggggtaggttcgggggagggatgaaatcgcaaggaagaagaatgaagtccgtctgttgatagaaaggaagagacattcaaaggatgaaacatgaacgaaagagattagtcaagctgagtctgcaagaatggcaaggaaacccgatacaatcgggacgaattatctgaccgaaagatagttgctgtaagctctcagtaaatcagccgtctttgacttcaagatctcgtcatcaatctcgcctccatctgactcgtcactgctaccaccatctacaccagtaagtcctcctgaatttggatccagtacagaggactcgatggctcgcaaatcaatcttcatcgccccctcaccgagggacgtctgggattgccggaaggactgaaggtgatgggacagggaggaatgataaggtgccggggtaaggatgagcacatctgtaggaatttaaagagaaagaggccaaggttgttcatgatggcaaaaggtcaatagataagagcagatattagaattaaagaacaagaaacttggagaacaaaagatatagaagggttaagtagaacaaacctagaatgccggcttgttcaagccaggtaagtacatacgagatcatcggctcgtttccaataggaagcagtgctttacatagtgtgtctttgcttgtaagagggtagagactgatggagaaagaacaaagatatcgaggtgagtgtcgtattcaatcaagaaaaagccagagccaaaatataacgagagcagaagcagagggaaggaaagtccccaaaaggtgacgaccacagtgaaaagagatagaaagcgacagactttgatccatggccagccagaacaactgcctggaactcttttgatcttttcggagctgccgagaacatcgagaaggatggtagagacgatgaggacgttaaacgttgaaggttggatgtttaaggagagtctttgagaatggacgactatggttacgctggtgttacagatagatagatgattgatggtattcatttatacattcgtaacagggagacttagctaacaccggcgtttcaagaagtcaccgctcgtttcatctttctcgacatttggacgttcacagagagcgcagagattcgtcgtcttcccgccgatgaatacgggtcttgaaatcctttgttcggtggcgtctgataatgacagctcagaagagcgcggtctactgagaccctgtcgttgtctggagaagggactgtacacgaggaattttgataacgaaatccgttctctagtctgcgcttactgtttgtccgtgctcattcgatgcgcgcatgtatctacaggttctcgttcgaaatgataacttatcctacagctggaagcagagtcggctctaattttaccttggtctctctatgagtgtgttcgaagaccttacgattgtgacccttaccttgaggggcttatcgtttctgttctatctcgaatagtgcaacttgcaaaacccttgtccttcagccaattcggcaactgctcggtcgagagtgagcatattgattgatggaatgctcaatctttttttggcagacggtttcttttcctttggctttgaaagatatacagacagattttttcatgatgagtcactccaagtaagcgattttgctcttctctaactcctgagacgtttcctgttttcagctcaaagatctcaactgaaacaacatgagaatcacgtactccctcgtctttgactgtattttcagctcattctatccttaaatacaccactttaagaagaagcatgagccaagtcatgtgatgatagggaatttgctcgtaagtatatgcgcggtgttacggtttccatttctgaaattttctttctctgtttgattgtcggtgatcgattccttggattttctttctttcggatcaacgaattgcttcttcaacggtggtacacttccacctcaactatattcatctgttgacatcgaaagctataggcttagctattcgaacgaggaccaagaacaaaagagaagacgatactttccagagatttctaatgtgactaatgaggtatttttattgttttccctacacttcttttgtttgtctgtgatcgacctcattctccagttttatcatatccttccttctttcattctctccttctagcttatgatttctttgcaactctaatcgtctttcccaagtttcctcaacgttcttaatgcttgccttccttgcttctcgtcatacttcccattcgaactttcctttagagacttctattttccattcagccaactcgtgcatgatccagcaggtaaagtgtcagatgtaaaggttcttagggcacaatagtatatcaagcctttctccccatcgttcttgattacaaaactaaacatacatataataagttcccttaataggcaatgaagagcgacatcgaagggggaacaccatgacaagccgaagttttagttttataattactttgaaaagtcggacattcatctatttcataggaactactttctgcgccgaggcggctggatctccacctgctccatttccagtctttccttggctttcgttcatagggataatattctgagcggaagaagatggatcttgtcctccagtttggtttttgtcggaacttggtttgaatgctcggtgtgccagggcgagcttctcttgggcttcctctttctcattcgcttcgagaatatatgcccatgagtgatccgctggtggtttctgaatattttcagatgaaaggaccgaaagaaggggagaggaggaatcagttgtgatcggcattagcatgatgagaataatagagcagcatactaacagaggggtgagcttcatctttcggctgatatgtgagataggcagatcccaaaatcaacaacaccgtcagaccttgagcaaccattcgagagttcacgaccttctgggcgttcgtcaaatacgggttacggtaaaagtaggctcccgatccggccatcgaagctatatgatgaggaaaggggatattgagaatattgaacgagcaaaacttgtgaatcaaccgcccgagtttttggacgtaccgacccaggaaccaccgacgattgcccattggttttccttgaaagtcttcaaagccttttcttgtctcgacaatcgatcccattcagtaacttgtctcttcgccatttcgtccaactccactttacccgctcctgtccagagggatttctcatatcgaagtcctagattccagacagatgtcgaacgcagacgtatgtgagtgtagattcagtgtatgcatagtttgggaagcgctcccgagaaaaaagtgaagaacaagacagtaccttcgttttcggcctcaatcactactgccggggcaaatagcacgatagcactgtcagaatgagatcgagacaaggtagagaatagaagtgtgcagaaagttagcatctttagctgtctacgtaggatctggctcagttgaacgcagtttcatccaggattgacacggaagaacgaacccaaaagccttcagaggcaacggagcaatccggtaataatgagagtatttgtaggccgctccaaagatcgggaccatagcagcaacggaataggcagctcctcggattccgcctctgatgacggcggcctggtgatcatcttcctcctctgtttggacatcaacaaaaggatgtcaatttaacaaaatctagtcaacacaagatcgagaggatcaagagaaagtgaggaacaggaactttcgatgatggactaacgtttggttaagagctatgggttgaagagcacaaaaagttgattagactgttctgtgaacaaagtagagcagtatagagcaatgtccagagtggaaactaaccttcattttctatgtgtatgtaactgagggtataagtgtgttagatcgaaagagagataagacttgatggttgtcgaatgtgtatcttgaacgaaaagattataaagatcaaaggactgttgaaaagtacgggctccaccgtaagaagttgacggaatgcggagtgctgacgacatccgctcgatctgatctggcctggtagcgtgtctcatgagatatcacattttcatattttatacaagtacacatatttacgcacgcagctcagtccagtctgatcagattagtctacccaagaaaccttgtcacttcacccttgacatgctataagaacaatccattgcccgaacatgtgtgaaggtgggcgaaaaagaattgtgaactctcgcgaagatcgagttgaaacttcaacccctcgagatttcataaggtccttgtttcgtcatctatgggggatcgccaggatcacaagagaagagaggaagggatcaagacttgatgagatcaaaagagattatagtgttctcgatggtatatgtgactgtggatgtatggtaggtttctttggaaaggaagtcaagaatcaatcagacatcgatccagtctacagaatcccttttttcgctcatagtcaagaagatggacctactgtacaggttggtcggttcaggaatatatcctctctatgacccagagatgcaatgttctctcgcttgatcttacacaaggatcgcgaccaacaagaggatggcaagaacgatcccgagaacgagaacgcaccatccggagcctcttgctgaaccccgtacacgaacccccaagatgtggctgttaatatacgtacgaagaggggaaggatgccgtatctccaaaaagagaaagcagatcataccttctgactttgctacaaactcttttagcttgcccattgctcttcccagcttgtcttctgtagaatctacccggtccgataagtcctcgagcatcctggagagaaatcccacgtttggttctgtttaagtttctccttctatgtcttagatacaaagaggggatgaacgagggaagtttgcttacatattttgctcgcctacttctcggcccatcaaatgtgcttgatcgtgcaacgtatttaatgtcccagagatcaaatgtaaatcatcgtcctggttgcgcattaaactctacactttcacatagaggatggtcattagctcgagggattaagaaaaaagaagtcatgaacacatgacgataggaatatagacggacgagttgttcttctcgttcccatgcctcggtctctccattcggtggtcctgatcgtcctcctataccctcttcctcgtcccgatacgcctggcttggactcggccgagttgcttttgttgatttctatacgttcgagagtgtgtgtatatcaccagggtaataagctttcggcgtgcgtggtagacatcacaagaggaagaagaacaatgggggaacgtactggtgtgacaatcgatgcccggatgctctagaggaagaaccctcacattcttgagcttgcatgtcgatatgaatccagaagcagaagcgactaatgttgagaagaacctacctcgacctccgctttgaccatcttcaagaatcccttcctcctttgtatctctccatccagaatcccaaactgaccgtctccaccctctacgactgctctcacgctctcctccaaatcttcgagatcgacatcaatcgagctgatcgttcctctgacttcatccctcgcagagatgacttctctagaggaagctggataggaagaaagggctcggtggtattgagaaacaagagattggagatgaagtagagttgactcgacttcttgctgtatatgataatttgtggtattgagaatggagaagccgtggtgaatgtaagcaaaaggaggtggtgtggacgtgatgaactcggatacgagtgaaacgaaccttgacgtcaaagtaagctgtgagaaagcaagatacacagagtaaggctccaagggctagagtatccaagagcaagaatatcttccaggtaaggctgaaacgaagagttcaacttacgatctccgcccatgtcgataagagttcgtcaggtatgagatgatagttcagcgatcagagatgaaatgaaaaggcattccagatgtttacacttcacacaggcggcgcagagaccgggctgatccgctagatttagttttctttggcggtgggtgaacttttcattcttattcgcgttcttcattttgtactctgcctcaaaagaaacagggaaaccatggatacatatataggcagaactaagaaaaggcaagggcatatacgaatctaagtgtagcggatattgggcgatcgatcgaacgatcaattaagcagtgacgccgacctgtccattggtcttaagctctccgttggtgttaatctccgcgttggacttgggttcggcctctttgtcagtctcaagcttgactccagcttctctcaaagtcttttcgattcgatctccaagagagggatcaaccttccggaagatctcaatctgtctctgcagaatgtaaggatatgtgactcctccaaggtggccacagacattctattttcgaacataaaagagtggcgtatcaggttctggccgtcttagaagaaaagacagagaaaaaacaaagaaagacacgtacagagacaaagtggtccttggcctcatcatcaaacaccttgctccaaagcgctctgggctgctcaaagtcgagctcttcagacccactttcaaacgaaactacacccggtccatcgaacgcgtccgaaatcgactccctggtgtagggcttgttggccatctttagcgggttgagcgatgatggatagttgggagcagccccgccgttggcgttgaaggtgtaggctccacttcggaggtagttcgacacggacgcgacaggacaattgacaggaagctcgttgtagttgattcccagtcggtatcgatgagcatccgggtaggagaatagtcgagcctgaaggacgggatcgttcgagggctcgattccaggaggcagatgggaaggagcaaaggcgagctgttcaacctctgcgaaatagttatccacgtttcggttcaaagtgaactttccaatcgtcctaagtgggaactccttgtgggaccagaccttggtgagatccagaatgttgtatctgaacttctgggcctgctcaggagacattacctgtacctgaaccgtccagctagggaagtctccattcttgattgcgtcgaacaagtcgtctccgtttgaatcgggattggaggcgtcgagtttcgaagcctcttcattggtgtgagtcttgacaccctgatcggtgcgcatgtgaatctggacataattccagtcaccgttcttgttgaccatcttgaaggtgtgtccagagtaaccatgcatgtgtcggtaagaagcaggggttcctcgatcactgaacaggtgcagcacctgatgcacggactcggggttttgggatactataaaattatatcaaagacaaggtcaacatgaatcagagcggcacgcagggagtgacgaggttatacgaacggtagtcccagaaagcgtccttgtctttagagtttgtctgcgggttcctcttctgggtgtgaatgaagatcggaaacttggctgggtctctcaagaaaaagatgggagtgttgtttccgacctagaggtgtagacagagacacaaaaggatgagggtaagagagcgataacgagcttgatgactcagtcgataagaatacgtacaaagtcccagtttccctcagaggtcttgaccttaagagagaaacctatgttgaaacaaagagaaacacgaggatttttttaagttaacagcttcatccatgcgaacaaagcgaaagcacacaaacctcgaggatctcgagcggtatctgagcttccggattctcctccaactgttgagaaccgggcgacacagggtgacttggttcccttttggaggaactgtttggatggaatatattcatcaagtcaactccgaattgaacaaaattgcgataatgaggtagattgagaacgtacatcggccatgcataggtcagagttgtcttcagtagcctcgaacacaccgtgagctccggagcctttggcgtggacgacacctagagatgttgggaatatgaaccaatcaaatagaggcaatttgagatcagggatcgactacatatgacgtaagacgaacaagcaaagacatcaacctaaagagacgaaacgtacgttctggaattctctctctattttgatgagtgagaagatcgatcaagtggaaatcctgaagaagcagggctgaatgaatcgatgaatgatagagaagatactggatgatcagcttcagcatagcacgatgatgacgacgacgactgagataaaaagagctcgcttacgtccattaggtccggctcgttgggcgctctgagccgaatgtctagggactccgttcgaatcggtataggcaacaccggcgactgggcaaactgttgagttggtagcggttgcagggattgtggacacaggtcgagcatgaacaagagtcaacctcagcctcaagggatgatatggaaacgatcgagagaaagcaagaagagactacgcacctggagaaggcatgcttgtggttataagagcggatgcacgtatgtgtacttcgaatcagctgcctgcatgagaggatggatattatgagcaatgaataagaattccgatgttctatcctcgatgagccttcttaaatatcgtctccagctctgtccggtttcaacgggatggacggcaactgacattctgacgtcagtcacgtgcatatttgatacacacgtgcttcagataaacatcttacgtaagtgccgttcggcactgtcagggatgtgacctgagtgttacatcccggtaaccttcctttcattctagttctcctcctgcctcgttactccttatgcttcctcactgtatcaacatgcaggtatatagtctggtagcgcaggtgcttgtagcaccttctatgatctgttgtcttatgattaatcgctggagtctgagaagaatgcacaagacgagcctcctttgccacccatagcataggtttccaagcctgaatcctttgtcactccttggttccctagtactcttgttcctagtgttatatccatctttttcttccaatctcttcgccttgcgccctcgtcacaatcaccaaagctggagagcctgagcttcctcattgtcagctgcattccccgtttgattacacccttcgtaacctctccgctgccctctgaacccggatcctgacatccaccctctctgtgccctctctcacatcgtatgcaacacagatagatacgttcatgtttctttgaatacatccagtacatctacagtctactcatttatgatatcagacctgcattggagatccaccagggacagcagagtccacaggtacgttctcacggataggctcctcgtcaaacatcaacctgtgataacatcaacgtggagggaaatttcccggattcgatgagtcctcaaacaaatgggcacatgaagcaagaaaggcaacacagaagaacactcactttccacccatttctttaacaaactcgagactccgcttctcgtcacagaaatactggaacactttgacaagatccggcacttccaccgtcgtcgccttccgtctcagcgccactaagtgggcgggcgagatcaactggagcgcatacctcaatgaggtctccactccaatgttggctaatgtatcaagggcagagtccgacagcttgacatcctcctcctcgcatcgaatcgaaacaatctccctaatctcgctgagctcgtaagccttggtgctgatgatgagcactctatccaacagatcgatcgggattccatgggggcttttgtactttgtgcccctgattcgggtaactccccggttggaagccatgatcactagcggcgccagatcgttctcaagagctcggttgaggaatgagaagcactcgatatctagcatgtgaacctcatcgatgaagaggacctgtacaaaggaggagcaaacgtttcaatgcgggtaacattttgacgatggcttcagaatatatatcaaagaatgcagagtggaaggagcgcaagagcgaccgacttacaccaggaacgatgcttgcctttccctcctcccgccattcgcccactttcgtattgatctgatctctcagctcaggcttgatctcacctgtgtctcctgtggtttgccaaaaatacgtacgggaaatgatactgagcaatagaaacaaaatacgcagacaagatgaaacgctcaagggaagataaaggtccagagactgaccagcaaagagggcgaggaaaccctgagtacgagagttgatcacatcgatctcgtgcaggctaacggtgtgtgtgacttctcgtctcttctggagctctccatccggacattgaacaaatttggtctatcaagttcaggcaggatgtaaagaatcaagatgtgagttagaaagaacgcgatgtgaacccaagcatgacatgaatgagtgattgatgggttcgcgtcatgatcaacgaattgagagaaagaagaaacaaagtacatacgtccccacccatagcatcgtagtctcgcgctcgggcaaaacttcggccgaccttggagatcttcccagttcctgtatggatcagaaggcgaaacacgacgatgagagaggaatgcatcagacgtagcagcatacctaaacgcgtcggactcgcgtacctttatcgatagtaatcacgtctccagcagcaaccttttcctttgtcaactgatcaatcatcttttggcccaaatcatacacagtctccatatctgttgacttgattgtcagctttccagtctttgtagactgttattggatcagacatgtatccatcattttttagccgtgaagaaggatttagtcaagttttcttgcagaggtagttttggcaatacaccaaggagtatgacaaagaacgagatccagacgcaccccggttaatgacctatcgacctggatttcgactacttctccttctataacttcagactcttccttgatcctcactccaatcgaccgtcgaaacgcttgcgtcaatgcttccgttttggacatctagtcaggaatgtttagattggatggatcgatcgtttgaatcagcacctttggaagggccagttcatagcaaagttcatgtggccaataaagaatggaacccactgaaagcgaaaagacttcggagccggacagcatggtaaacggaacgtctggtcctaagctctgagccatacctattttgcaagacgtttcgtccgaccaggagagaagacagagaatccaataagatttgtcagtcgttccatctgaaggaccttttgacaaagggtatcctcaagggttgctcgcagttcagacgaacccatagcgatagccgtctttccactaccgaccggcccggccataaggattgctctaccggcgatcctgccctcctcgaccattttgatgatcagcccggctgccttcctcgcctgagcctggcctaccatgccctcggatgaggggagaacttcgagctgggcagagagcccgagccctcgaatatgtgagtgagaaccgattcgttcaatcttggtgatgtccgacaattgggacggggttgtgattgttgcctgtggttgagttgcatatcaacaatgagttgtctaccacaattattaacagccaaacgattattcataccattataagaagtctccgagagtatagagacgagggtcaggatagatggatggatggacggatggatgagggtgaggaggaaagaaaggtaaaaagaaattcgctgcaacgtagccggccagcggaatcattcgagttctttctccccacccacaacgacgacgacaacaaccatcccacacatcccatcccattccaccttctctctacattctcaccagcgcatccaaccagatttattagatcggtgtagatttaaacagctgctagtgtggtaagtacacttatcgtcttgttgtggcagtggcacctcggccgtccctcttctttcccttcctgctcccgctggtgtcctcgatttctcccttccttcctttatttccccctctctctctctttctgttctgcctatctggtttgagacacacagagtaagcaaagggttcaacacctgtttttattgatcgagagccgactttgtctctagcttttcgaaatcgatacaccggaaccttcgagacagaggcagagaggcaaagaggcagaagccgactgtttactcagcacttttgcctctttgaagaatctggatccgagtctggtgtacgcatatacccagaagggaacacaccgctccttttaacagcagatgtggctgagcaagagatggtggaggtgaaactcgtaagatgggacctcgccggcgtatgggagcgtgtgcgagatgtgatcttttgagttctctccagccgactctcttgtcctcttactatctctcctttgcttgctcaccttcttatcatacactaccgacattttgttccctccgcactcatacggtcatattacacgtaaaacttgctgacaagatcatctttgtgtcgtcttgggtgtagcaaacgaacagaacacatcttgctccttcctctcgttgtaccacaccccgaccatgtcgagctctccttatcagtcctcacccaagtttcaaatctcccaaccctctccggtggatcgccactcgacctttattcctgagccagcacccgtttcctctattgccatgccatctcctccgtcttcgtcgtcctcacttctatccagctcgcagcagcagacgacccggtccagatcttcatcgtctcctctagcattcatgaaccgatcaccttcgagaacaatgccaaccttacatcgccaccactctcatgttcccaagggagcctcggttgacgagaccaggacacccgtctcggtccttatggccggagccagcagtttgactggcagcgactcgagctcgacaggggcgaaaaggaatcgggcgagaagcgcgagtttggtcaccatgaaagaagtcggcgttggagagggcgagaacgatatggccgatctaggaagctcggggacggaaaactggaaatgggttgacggaaagggtgagtagttttggtgtttgtgtcgtgtttgtgtcgtcggtcgccgctcgttacttactctgttcgctgtgtctttcgtttcttggtcaggtgcttggatcattcacatcatcctgattctcgtttgcaaggtcttgttcgactccattcctggaatcgggcacgatcttagttggaccctggtaaactgcggttatatgatggtccgttcctcctgtcttgctcttctaatataagagtctatccgattgacccttctcgttatcacgcgcattcaggtcacttatctgatctttcactctatgactggtctgccgtttgagaatatccaaacgaccggcggggcgtacgatgatttgactttatgggaacaaatcgacaacggcgctcagtacaccccggccaagaaatggttgacaagtgtgccgataggactgttcttgatctcaacccattacacaaaatacgaaccggtgttgtttagtgtgaatgtcggggcggtggtttgtgtgttaatccccaagcttccagctgtacgtcctcattgtctaattaatatgtttctcggtctcttcagttacttgatgttctttcattttattttcctttctcttagctccatcggttgagattccgattcttcgaggccccgatggaaactccttacccgtctcgaccgtcgagccctatgaaaggacgaagcgaagcgtccattccggaagaagtggaggacgaagtgctgattggttctcggtctgctcgatgaggtgctcgcaaaagttaaggacggaaagaaaggggtgggtttgatctagtgttccgcctcaaattttgtgtaccctctgtcccatctttctcatctcattcatcttctttgcttcttgcagagagatctgtctcttttcttatttttctttcttctcttttttactctcacttctttccttcttctcattatcatcgacaactcatcttaattccagaaaggaatttcaccatcactctgctatcatcattttggtttccgctcttctgtcttgtttgtctccgtacgaattccaagacaaggtgaacgaacccgtgtctttcgtctctcttcattcccctctttctttcttgcgaatgaacgcgttctacataccgatcatcaatccggtttctttttctttttattcctttttatgaaaaatcttatattctctgtcctttctccccggtcggacgccaagcttggttcattcatcctttagacctatgcccaactcgtttgtcgtcgtctcggtcgaccccgttcctgttggtttgttggttttttcttttcttttcttttcttttcttttcttttcttttcttttcttttctcctccttttcctttcctcttccctctttccgcgttcctggctctggctcgcgctcgctttttgagatcggattcctttcgttagtcagttatttagttgattcgttcatcgtcttgacgatggtggtggtgccggtggggggaacgggggacacgtagaggcgtgatctagtgaatccatggacaactgtgctctatatttattcctcgtctcatctttcatctttctctgttccctttcttcccctctttcctcttttttttcccctaattcttatttctgaacacccgagatttcgaatccagacgtcgaatacagatcgaaacataacgcttgaatcctcagatgatcctcctcctcctccttctttttgttctctttctttttctttctcgggttagctcactggatttgatgataggttacaaacaaaacaaaacaaaacaaaggcacatgtgaagacaacccggggagggacagcatgggatctttctctctgctcgtgtttgtgcccgagtttgtggacaaagacgtcaaggatcgaatatacaccttctatatgatttatgcttttttgttctatttgaagaaaaatagagaaactgtaggatgactctggctcgcagaatcgtgtagacatcgttgtagacaagagatgagggagagatgatgattctaatgataaagataaagatgaagataaagatgaagatgataatgttgttgttgttattgttgatgtgcgtgtgaatgatgggtattgcgatgaatggaaccaagagacaaaatcccaaaacgaaaaggacgatatgacagaaaggaaaagaaaaagaaaagggaagttggggaggggaggggcgcaaagacttttaagtggcttggggcgtcagcgcagaaacagggacgatcgccggcgttgaagcaggaggaccacagcatgccttcttcgcgctcaccacctctatcccgtcctccttttcgtccttcgtctcgacctgctgttgtctgtgacagctcttttcttctacgattccgcttgggtcttcgtccgcgctcaccggcctacagtcacattcacagcctgtctgtccgcactctgagggatcgcaacattttgcctgtcgtctgtaatatcgagtcgcgcacacatgcacaataaggtcagcatcaagaataaaacatacggatgacgacaatgagggaagggaagggagactgactttaattcacggtccttgaagtaaaagacaaaggaagcaacaatacagagtacggcaaacccaagggcagctctgtaacctactctgtaatgaggagcctgagcggccgggtagatcaggactatcgaaacagagaaggaaaaggaaagtcgagtttgagcacagaaagaggagagacaaaggacgaggcaaggcaagaaatacgaaccgttggcccaactgtcgatgacgtagacgaaagtgacgatcactccgatctgtaacgatctctcctcgggactcgggcaccaatctgccatccaggcctggtgagaaggaaggaaggaaagaggccatcagaaactcgggacgtttggtagacagagagaaggagtggacagaaaaactaacgatgaggatcgggccgactccgttggacatccaaagtagatagtaaccgaccatctttgtttcgaacgatgctggccagatctgagagacgacaagcggtgttggtatgaatatcaaaagagagaggcgcgcgggaaaaagacgtaccgaaagaatgatggtcccgataagcatggtggtcatctgtccaacgatccactccaactttctaccggtcctaccacttccccaggcacagccaaccatgacgatgatctggaggacataaccgccgatagggatcaggttcaactggctgacggagaatcgggtagtgccattggcgttctttgctgctttgaggaagaggatgatccaggtgtttgcgttctgggtttctgtccagccgctattgaaggtaggatagaggaaggtcaagtttataatcaaattaaaaagacttctaaatcagtatcaagacgaaaaggaagatccgagttagaatacgatcaaacgaaaactcacacataagccaaaccgaagacatagagggtccaactggtaaagactttcttcacgagcgcgagcgtccattttgtgggtggcagctttttgacgtccgacatcctttcctgcgcgatcaaccgttcaagcttgctcaaccagatcactctggtctctcctgggttgtcggggatgaggagcagtccaaacgaggcgatgatgacggtcatcattgcgttgaatacaaagctgtcgaaagaatttgagtcgaagggacaaaatcagttttgtgttctttggaaaaggaattgagaaagagggaagagggaacaagaagaagaaagaaactgacagccatttccaaccgggaagaccaccgacgccatccatgtttgaatggagagcggcctgcatgaagccgacaaagatgttggcggccggataactagtcccaaagatggcgagcctggtggccaactcggaaggggtgctgtgagaaaaggaaaaagagttatttttttgtctcgcgtgcgcaaaggagaaaccgggtggggaggaggggaacttactaccaacagcaaagcacgcagacgactacagagatggatcagttggagagcaatcagcatatgtgctccggtgattcatacatatatagaagagacatacttccggggtaggaactagcttcaagcaaaccgataaagaatcggagggcatacattccgttgacggtcttgcaggcggccatgagtcctgtgggtgtgggcgcgcgcgcgtgtgagaaagagaagagtaagagagagaaacaagtcgtgtcagggggttgtcgtttgaaggttataatgatggaggaaatcagacgaaccagtcataagaccccatgcaatctccaatccgggcaaccagtaacttggtctaatttttgtgagaatgatctgagagggaatgatcctagaggtgggatgatgagcgtgaacagggtgtgtcagaagagaagaattagtgaaaggaagaggagaaagatgccacggggagagaacatacatcaacgcgtagccgactcggtaagtggtgtccatgtagtttagttcgttccctcccatattaagctgaacaggagggggtaggggagaagagtgagtgagtacttgtcagtatatgagtgagtgagtgagagagtgtgtgtgtgtgtgtgcgcttgctagtacacgttgggcgactgagcgcacatacacccatacaaacgaaagggaaaggagtagactaacatcctccttcattccacttgcataggctgtcttgtagtttgatgcatcgatttgctggacgggtggagaattaaggttaatagtaaccaggcaagacagatggtcagccaaggagaagggatagagggcaaaggaagaagggggaaggacggaaaggcaaaggcaaaggcaaaggcaaaggcaaaggcaaaggcaaagaaagagcgactaaccttgatgacataggagaaccaagcccaggtcaagagacagagatccaacttccagaggaacttccgttcggcctgtttcgtcctgtaggactgttggccaggtggtgagcagcagcaaccctgggggggtgggtcgacggatgagagcgttccctctagtttttctaactttgagtctgacatcgacggcgagtgggagggtgagagatcagggttgtaagccagttgattgtgtggacacatggtgggtgtcggatccgacgctcggtgagcggaggaggaggaggaggtgagttaagggagggaggggcccagaggagaccgaagcagaaggatgccagggaaggagagtcgagcgatggaaactggacgcaaactgaacgcaaagtcaaacgaacgacgaggaaagaaagaatgaatgacgggggaaaggagaaggagaatgaaaaagaaagaaaaaggaatgggcgacgttctttttgagcgatcgggttgacaggtaggaggaggagaggcaccaggcacgaggcatcggagtgtcaggcattaggcacaaagcactaggcaccaccgatcaccgaccatgcaccagccgcgagagaaagagaacgccgaatgaaaatcgctcgttcctgccgcccgatgaggctcttatgcttttgtgctcgactgaatgcgctcactcggaccaagagttgggaatgagcggggtttgtgttgcgttgtgttgcgttgcgttgcgttgtgtagtgcagtgcagtgcattgcgtattgtgtattagatagtgtgtgatgtatagtctagcattctaatattctatagtccatagtatacaattcacagcacctactacgcacaacacactcactccatacagacaaacaaacgagggatttttctctctttctctttctctttctttttttcctctctcctcttcccctcctctcctctctctcctttctctcctctccaatgacttcttcctcttggcaatcggctcaaaactcacagaacctcttctttgtcgcctcccacaggcctttttttttcttaggtctttttccttcgcctcttcttccccttccggctccgtttctctcggctctctaatgaatgagcaattttcgctacaatgccttttctctctttctccctcactttctccctcaccctctgacgtgctctcttatctgatttggccctccatgtaaatcatcgacgtgcacacctcgctgtgacatgggctgatcgagcgatctcactcccataccggttgtatccaaacaatccatgttgacaaacatcatctatatccaagaaactagacctgctcagaagaagaagccttttgtgccgtcaacacaacggaaagagcagtcataaaagcaagcaccacagaaacaagcacgcaagcgcacaagcaaacacagaaagcaagaggacaagagaattagtcgtcagagttctgccgaattatactgctcttatcaacacacccgcccactcacctcgtccagtctgacggacggtctgttccacccaacaaacacccgtcggccgaccggcaggatcaccccaaccacgcccagaatcgctagcctggtccacaaaaaggcggcagagtacttttccaggtgggcactctgatgcttcccgtggggcggatgaagcccaatgtccatcggtttctcgccaagcatcgcaggaagcacattccggatcgcgtacaccatcaatccaaccaacgtgatgacgatcaaatgtaaatctatccgccggatcatcgccggcttcgtcacggtgagcgaaagtagcgacagcaacgacagatagaactagacagtgtgaaaacaacatgtcagtctatctttctatctcttcacaagattaaacatctctgcccaacacatacccacacacacatatatatatagaaaagaaatacgtacaaacacacaacactgtccaatctcaacccattcttcccttccgaaagcctgtctcactctatcctccttcttgttcttgttcttgtgcttgctcaccccaaccttcgatccgtcctcatggttcaccacctcgctgtccaacaccgcagacgcgatcgacagcgccaacagcgagagaaagcctacgagccggagagcgttcgccgaaaagtccacccacccacccaccaactcgacatgagccttcagatccgcccagagcgatcctccggacgcagaaagaaaccgaggaggagcagccgtcggctgcccgtcagacggtccgtccgcctgctcctgccctaaagcctgatcccggtcgacatcgtcctcgtccagaaagatctgcggtcggaaagagagtcggatcttttccaacacgtacttccatactcgtcgaccgaatgggaagaacaggatcacgatcgagaccacagacagatacaccagcaccgttcgtccgtccaccaacgggttcaccgagtgtttctttctagagtatatttccgtgtgtgtgagagtgtatatgtatgtgcaaatgtagatggattggtgtgtctagtgtcaattcatgcctctgtatattcacatgtgcatctctcttcctctctctctttgctctctacccacctgcctgtgagagtgttttgagaaagaaagagagagaggaaaattagaaaacacgtacgacgaggcgggtacggtagaattcgttagcgtcatctttgaatttgtttctgttcctgctaaaagagaggaaagaatgaacgaatagaggtcaaggacagaaagcaacgtcgtcaagaagcagagaaatcaaaaattgctggggtgtagagagatgaagagaggggaagaagagaaaataaaaaccgagactcgaatgctcacacgacaaacaccgcgttagggttataagtaatatgagtgcttttgtaaggctcggtgtttgagtgtcagggatacgggttgggtatcacgtgatctcatacgtgggttacccctacaggctattctttccctccatcccttatgtctcttcacccattttccatcatgctccagtttgcatggttcatgcctcgttgtctttggctctcgtgatcttgatcctctctaggctcgtcatatgtatatcgttagtggcagaccaaatgcgcaaggggtcctgatataagacggggacgccctcgcgccttcttggataagagttttcctcaagctgaagttcttgtcgaatcctcttatcccaagtacattgttaatagtttggtctgcttcaggtatcgtccttgtatcttgttgaaacctcttatccaaagtatattgttaatagtttggataagaggattcgacaagaacttcagcttgaggaaaactctcatcaataaggcgcgagagcgtccccttatatgtcgggacgtctcgcgcatct

SEQ ID NO: 2630 - DNA, 7935 bp, Xanthophyllomyces dendrorhous
ctgaacccggaccctgacagacatttcctatatgtaaccgtgatctgccacgtgataaccctaattgcattcgcacgtggtccgccctcggccgatctgtcctttggcggcctccgctctctttacgatttgctaaagcacagggaagataacagaagaagacagaagattggtacaaagggcagaacgggaacggcagcagagcaagagcagccaggcaaaagcatccatcataagcaaaccccaagtcattgtggagtgagactcttttccttcggtcaaacaacaagagacaagagacaacctgatgcaagacgcccacactcaaaggcgcacaagccgaattgcatctgatgttttacattctaattctatttcgagcctcattctctctatctctcttccttcagctctctacaccatctccccttgatgccggacactgtaaatgtccggggcatgagaatgttaatattctttattcacaacctctctgaccttgtctagctgtccatcccaaacccaggccagtcgttggacccgactggtaagaaaatttcccgaagccgatcagcaagtcgattgctcgatcggccgatcagaatccctctacacaccagcatccgcagtgcttatcctccggcgtttgcctctctctctgctgccttccatgtgctggtccctcgcccggggcaacaaacccgcccgcccccgcgttcctttcagacgtgccttgtttgtcactcatatctgtgccgcctccctccgccaccctcctagggcgtctacagtagccggctcggatccatggcctttgaccataaccgagccgatccaaagataaacgccatgttctgactcaaatctgggcacacacacactctctcctctgtgcgttgttgagatacggcactcggttttctttctttctccatcactctatatgaccgacgctgagaccgtccgttgtgtacgcgtcccaccagctaagctcagactcagactccggcttgggacgtcatgcgttgagaactgtgcttgttgtatatgcctcgctgcgaatgaaaccttgtcgcttcttttacttggtgagaccgatggattaaagatgatgtaattgttcgaattcgatccaccacatgagtaaagaagaaacagtacacgtcccatactcttgcagcttctcttgatccgactggcctagaaagatttcgatgaatttatccggcaaatagaatgaaagaaagttgaaaaagagagagagagagagggagaaagaaacatcgctttcgtactcctatctttctcaagcattccagtcggtcgtctctttcctttcttgtcccttccctcctttctaccatcattccttccttcccttcgtgctcgagaaagagtcacaaaccaagcaacacagaaagaacgggagacagaaagaaaggaagaaaaaaaaagagaaaaaaaaagggaagaaagaaagaaaggttgtttcaaccttcacttgcttcctcgttcccgactgcttcgctatcctttccaatcctattttccgtccgcctcggatccaaccatgcccaagacctcagcggattatacacgtcctgtttgtctctttccttgctctctctctctctctctctcttctaattgttcttcttcgacacggaaaccctcactctcgatacctcaccttctgactatctttttcccatgttccgaccatcttctctccgcctcgcctcgcccctccaaagtcgaaattcgtggtcccatactttttcctccaaatctcttgtttcgtctcgctctccaccctcctgttcaccttccaacgtatcaaaggaatccatcgggatgcgacgctcaaaaacatgctgctcatctttatcatcaatagcttgttcaattccttattgtctgtcctctgtcctctgtcctctgtcctctgtccttttgtaattcgctgtccatcctctgaccgaaccatcgtgccgatcgctacctaccaggatcttcaatggaaacctacagtcgcgaacgaaagaaccatcgttcgggctatgcctcgtcaacggttctgccgtcatgggcggctcaagcggtcttgccggttctgccttttccgtggtcttcagagtgagaactctcttcctcgtttgaccttcacttttctctcaagaaggccttgacctcgtcgtgctttctctctctcttcctctctcggggccctatctcatatcatttacctccccccctttcccgatcgcgttcattcctccatcattttctgcccgctcgactcaaaaaggtcttcacgaggatcgttgcctcccagggttatgccattcgcatcatcgattccaaatggttctccttcaccctcctcgccttgccgtgggcactctggggtggagtagcgtctgccagtgtagccgtgcggtcatttcttacgctatctctttctctctctccatcaggcttgatgaatactgacccttctgttctgttcgacattctctcatcttttccctctattctcctctgggtaaatcagatctcattacgcaatagaaccctcattcacagagcagtgtacgtccttcctttcaccgtctttctccaccttatcagactgtctgatgccgatcgttgtgcgcatccgttcttttcgtttccccttccctttcttactccagattctactgcactgtagacgaaaaaaaactcgaagtcaccactacagccatcactgcatctgtcaccggctttaccatcatcatccaacgtacgtccgatctctctctctctctctctctctcacgcacacattggctctcttcctgataaaacatgcttgttcaacaatacacatgctaatatatactttcactcttacgaccatgtcatctcctctccccgttgacatcccactttctctagtcatgatgttcggtctgctgatctaccaccgacgagcactcagaaaagtcctccgaccagcctcctcgtccgtcgtcccatcatcctctgagtctgaccaacagagcaaccagctcgacgaagaaaacaacattttcctacagccaggtgtgacttttccaccagacagtccacaagaaggcgaagaatcatcatcatcagcagcagcagcagcagcagcagaaggagggacaccaggagcaaacggacgcaaaagcggacagaagcaatccgcaacacaaaaaagagcgaacaaaccgagacagctcaaagggttgcatggtggtttggttctcagaatcgggctctttatgttctgtgtcgtcctcgcttttgtgtatgtttcacccgggatttttattgatctcttctttgacttgctcatcttcgccttgttgtatcgttctctgacgcaatttctcgctctctttctctctttcgatcggtctgtctacaggatatctatcgtcgtggccgataatttcacgtccgtcactggtgatttagctatcggtaagtttcttttttttttctcgaaatttttcttcaagagtctgttcttgctgaatcctaaactcgggtcttttatcttattatcaattttaattattaattttgttttcatagcttccatcggtcctggtgggtttattcttcttccaattcatataataatataatatttatcatcatcgtcgtcatcgtcggcgttctctacaattcatcgcccaggtgtactaaccttctgtcttctcttttctcctttattttcttgacagccgtctttctcatctttgcttcgcagggtacgcgctttcatctgattttcacttgtctgtatcgcattgggggttcttttctcttcttacttacccatcctgaaatttgattccatctttcccttgtccgcccgctctccctagacgatgtcctgcgcgcatggggcttgatgaaacccaaaagagatcgcctcaacagcatttcttccccgtcatggctaccctcacccgacccacatccgaacacttcttccatcttcaacgtcatcgacactgcccgctcttggataagcttcaagtatctctcccggtcccagccagataaaccgatcggacagggaagagatctcgagaccgattcaacctctttccagatcgggcagatcgagataacagaggaagaaccgttcgtggagatcctccggcgagacggaaagtcgacaagcgacttgaatgagcttggtttgacggatatcaagtcagcaacaaaaagctgttcttgatcgttcttctttcaagtctgaccggatttctttctagattatcttttcgtttttttattttaatctcttgccctttccctaagtttatacatcatatcttatcttgttagcgtctggaagcgcattgtgcttctaaatcttgaaccgtcccccaaagatgttgttatcatcatcatcatcgtcgtcgtcgttctcccttctctcgccctgtccgttttctgtttgctcttctggttgattttccctttcatctgtctgtaatatacccctctctccctacccatccgtatcggctgtaacagcatcgtaccgccttcaccactcccagctccactctgctttgctttccgtgtgcttgcgtgtctctgcttttctcctttatgtctatcattgttccccttcatctccttgaattctttactcgtcatacgtatctcaaaagcaaagtctttacttacctcccttgtcttgattttctatcctatctccttcggtcaagttgtttttccttttggtcgactttgcttttctcttcttgactttgagatcttataattttaactacaatacattggccatatatatatcaatgtcttactctcatcctctacatagaattcagactgccagaacaagacccaagctaagctaagaccagagcggagcgatactgaaaaaccagagaacttcaatcaaataaaaacaaatagagccaggagaagacactggatgaaaacagtcgtgacgagatgagatatataatgaccagaccgatgacgtcgtttaccttgagtgtttgggatttctacttaatccttcgttcagccacactcactcactcagccacccaactttacaatctcacaccccacttcacgctcttctccccttcaaccaaagaatcaaagagaaggatgtccgatctgaagcatttggagaaatcgataaagaaggaatcgaagcagtctgtcaaggagctcgaccaggctcacaaggatctcgaaaaggccattaaagcagagaaagaagcttctgtcgttcgtccctcttcttctttgctttctcttcttttttttcctcgtcaagaaggggctggccgacatcaacatcggatgagaggcctaccgatagaggaatctcacctgtctgtgttgtccgatgcacgacagtactgaccagtccttgttcatattttcatctttgacatccgcccacgcaaacaatcgacggtaaaagtctgaacaaaacgcgtggaaggccagggagaagacaatcgagagagaaaacaagactgcccacaaggttctttcctctctctctctctttgaccaagagtttcaactcaacacgcgccgtcttgtcttcttgccgttctatcttacgtatccatcgcccaacttctatacgccgatagctcacacatgcggagcacaaaatgcaaaacgcgaagcgggatgttatgaagtcagagaacgagattgcccgagcccaaggccgtaagtcgatcgatcgttctcttgtccaccctttctgaactttgaggtgtgtgaagctcatcctactcgatcatgagcagtcgtccatcagctcgatagtgaagtggccgagaagaagacgttgattgataatctgcagtcggccagcaagacccaggaggtttgtctctctcgtgtttttcctctataaacgtctctttcctcttgagcgtgacgtgtttcgcgctctttcagaatccatctcttcctcctggcgaatgtttctaacccaaatttctctccccaacttttcatacggcgcaggctcaacgatcagctcatatagctcacgtgaaggaaacgctctgatgaacggttgacttgaaactcaaacggctgtcccgatactcaactagctgtctctccccttttacttctctctggtagaatgtcgtccgcgagagcagagtgaatacgaaggtttggcgatttggagatccgtggcaagttttggatgacttgggtagttcgtagagggagcgcgcttcttttcttttctcttcttttccgcggttgatacttggaacctcgatctagtttgaacaatgatttctcgtgtagctggtgcatggcttcggactagcgtttcctctttccgtgttgtgttgtaatctacgatcatctgaataattatctaatcattttctttctttcgttcacgtattctcttcggtccatcatctttcccgatcaatgtccttctgactacagttcgttttatttattgatttatttgttctgctctttcgcacaaaagttctccggaaaagatgaggaaagagacgcgcaagaaagtaaatatatacatttgatccatggtccaatttgacttatgctacatagtggccgttttgtttttatatatatattcaagaacgaagccgcttgaaagacagagaaagagagagagacactattcgaagagcaaggattggaaggacagttttaattaggatagggcagcgtctcgttaatgttgttcttgtttttttaattaaaaaatcatgcttttacgaagcctggtagatagaaggtccggcgacaacgtagtcgttgatgagcgacaagttgtaagaagtcacaggcaactgctcagacacaatcgtcacgaaagaagttccgttgacgatcgcgtcgtcgggtgtcgagtcaaacacagttccgttgggctggatggtcgttccggttccgtttccggtaacggtcaacagggtgtaggtcgtgttcaactgggaagtccaagcgacgtagagcggggcggaagcattggtggtgacgaggtctccgatcgcggtcgtctggttgtaaggaccgacgacctgcccgggagtctcccaagcgagctcgaccaatcggccagggtaagagagagccgttcggttgtgagtgatagctggtccgccggtgggataagggagcttctggaaggcctcatcaattccggacggtccgttgacaacggtcaagctggggaagatgttgaaagcgatcggcgtgttctcagccgggcaggaaacaatgtagggcgaaagaagcgtccaggcgaatgtctgagggattccggcctcaaagtagacgggcatggggaacaagccagaaagctgtcggaagatcatttgctgtcgagcctcggtcgagatcgactgaaggagtagctgagcggccggtcgagagtccaagtgaggaaggaacccgtaaacaccggactctccccatcgagtaagccgctggcagaagtcaacgaactcgggcacggtggtgaagttgtacctattgatgaataagagtaatatggataagagagctgagaccaagagtaaagacacaaaggaggatgctcacttgtaggtgcactgcttgggagctccaccggggtagccaccgacgatgttgctgatcaacgtagcgtgtccaacctcctggttggccatgaactgaatgagggacctctgctcggcgttgattccatactcgtcaaactctgcatcggagaaggtagcaagaccgtagtggaacaggtcgagctcaatccactcttgatgaagagccagagcgagagactggtagtcaaagtcagaatcaggcgcgtacaccggtgcaggcgaagtggcatggtgtcgactcctccctgcattcggt

SEQ ID NO: 2631 - DNA, 1018 bp, Xanthophyllomyces dendrorhous
ggttatataaatagcaacgtcagtccatatgagcttcaatatatgcagaggaaggaaaggggacagccacatacgggaggaggaggaggagcgtagatcgagccgttcacaggggcggcggccactccgttgagggcggacagaataggaagcgcggcgaggaggacgttagcaatcatctcaagaattcttggcaatggaagaaggatgtggcgaagaagaaacgaggatggatgaggtatatgtcaggaagaaaaacattcgatcctacaaaggctttatatacacgaacgatctcgatgtcacatgggcctgccgatggttggtccaacagccctccacctcatcatcccaccgaaccgtccatccaacctccacctgaatgtccacatatgaacaaagtatgctatatgtccaagttaaatctggctcaagcgaatcaaacgggatttgatcgcgtcatgccgaactcggagattagtacgaacaaacgggaagaatctgatcggaaggcagctttattgtaagcatgttataatatctccgatcccactcgtccggcggtgtgcatgtagccagtcagcatgtctgaatgtgtgtggtaacgtatgataccttgatggaaagagggtgtggtgtgggatgtgagcggtctaatcctttgaaggatgacgtttggaaacttgccgcgcagttagatagagtgacgtcatcggcatgtttcaactcatcgtcactacttgctaccacccacaccaccacctacaggaccatcgccgcctcgccatcggtagatcccattctgtatcgttggatcgggaagaggacagcccatcgtatgatctagatcgcccgatggattgtcgacctttggtggtttgaaactaactataaatcgcgaagtctaacgtatcagacatctcatcccgtgttagtagcacagagatcgtttcaaatgtcgattgtatctcgggtacatatatatatatatatatatatgtgtgtgtgtgtgtgtgtg

SEQ ID NO: 2632 - DNA, 13224 bp, Xanthophyllomyces dendrorhous
tgtgtgtgtgtgtgtgtgtgtcatgaagcgtgttgggcacagaaacagaaagaagtgccttgagaacaccagaagaaacatgttgacctatccgtcttatgcaaacgaatcattcagatggacagaacccgtagttccggcgtgctatcaaacatgtcgttcgatatacaagttacgcaagaagaacagacagatacgcgcttggttcgtgccataagcgatatcatcacccgatcgtgagcagatcggctaccagcaagacatcctccttcctttctcaatataaagcaagctggtcgagcctagactcagtcatgtaacatcatccatgacataaggtttctaagagtagaagaagaagcgcaaaacggccgaggcgtacgcgggatttcgggcgtgcagtcttggtggatagggttacgacacacaagagattcgaatggggtcgtggaacaatttggtgatcattcagtgtaagcttcttaggacgaaactcatttcaggcatgagtgagatattcatcaggcaagacttgattgagtaggtcaatcaatgaattcttcccaacctcctattcagcaaggaaagaaagacaagaagccatacgaaaaggaaccgtctgtatactatctctgtttactctattcgcttatgattcatcgatagataccgctcaccgtcttactgagcaaacaaggggaaaggtaatcaaacagtttgagtgaacccggagctaccttcacgaagcaaagctccgagagagagcggattggaagattctggaaacgggctgaagagggcctaagaaaacaagcgattacttcggctcaactaaatctaacaagtgcgaagcaagatagacatagaatcacataaaagagaagcaagaagaaaacagtgatacaggtaaacaagcaaggaccacagccaggaagctctcgaaaatttatcgcgcgggcagagcaggtaggaagaggaaaccttctggagcaaaacgaacggatgaacagcgcacggagcgaagttcaagaaacatagaaaaaccgcttgaacctggatgaaactgatctagttaagtcttccagacttgtcttggctgcggctgataaggtccagcacagaacagaacagaatagtaaaggttaccagacggagacttcagctcaaggatgagagctgatggaatccgagcagtcccagatggcccaaaagaccccatattggacccacctgaaaccccaaaaacacccaaatgatgggcacgggttttgatccaggtttctctaccttcttttgaaacaaccatctttggatctcacccacagtcagatacagtagtccgacacttctttacaccacactgagcatggcgaatagctccatcctgcccagcagggcatacgaggaggcgttcattgtgagtctatctctcatttgcttctatctcaagactgtccccttcttttcccttgtcttcttccattctctattttctcccgcatcaagtcgccagttctcaggatctggttgaagtatagcgtctatgagagagacaaggaagaaaaggacccgaaaggactaaggttgatcctgatacaaggacgcatccaatgagcgaacggatggttggctgaatgaatcgagcgatcgcgtaggtgcccaagtcggattcaatctcaccggaaggagcctcttctagacagacttagagatatcatcaacccaggcttcgtcatcacaaaatcagatccttactgttcatatgttgacatgtctgttctgtcgtctactctcacttggtgaactctccaatttgatacctatctacaatagaacgcgtctccaccccgctcggctcattcgacactccaatcccgaattcaactcgcgtcaaagcagaatgagcaaatggccgacatctttagagagcgagcggcgattgagacccagtacattgcgtctctccaaaagtttcagactaaacgcggtggtggaggtggaatcaatagagatggcctcggtgggtttgcaggcgtttgggagaaagtctggggtgaagttcaagaggttcgtgtgctttctctctattcatcagtagccatgtcctcaagggtcgccgctagctcgatcaatttttgatgaactccttacaattcatacaaaccagactatggtaactcacacaaagatagaacgcgttatgcgggacgaggttgaaaccgctctacgagcgatgagcagccgaggcccttgggccaagcagagtaccgtaagcaatcaccctgacttgactgtcgagcgtttcatttgataaacttccaaactaacggttctatcttggtgatcaaaaacaaacgaacgcattagttcgactccaacatcgataagactttgaaatacctcgagtcttgtcaagcacggctgactaaagtgggcacttctcttcagtctcctatgatctcgctcgatgccatgatacccaaacatgtttaaacctatatataacaggctcagaaaaaggccgaatcctctcgaaaagaaaagactatggccgagctcgcagatgctcaatcgagtctcgctgatgcccagcagggttggttcattgaggcgccccaggtgttggcgctctaccaggagatcgatgagtctcgacttgagagactgaaagagatctttgcaaagtggcaaacaacccaaggagatatctcgagagagaacttggagagttgcgaacgaagacttaacgggatctttggttgggatatcgctagtgatcttcaagagtttttgctgaagaaaggaatgggttccggcgatatcgttggaggcagcaggatggacgtcgagagagccagacaggtctctggcgtcagcgttgctagccgagctcagagtacgttgaatcttttctctcttctctctaccaagaagtccctctctatcctcacccttctaaatctgacacaattctctgatctgcacatagccgtccgccgacaatcctctgccgcgtcatactcccagttcacccaaaacaccaacggagccaacaacgagtttggtgagaacggttctatacactccaacggcggtaccggagctggcggtcttggatccaccctcaagcctctcaaatctgtctttggcagaaagaaccgagcatcatctctcgccggatctccatccactaatcaacgagcaagaagcggaagcgtcactggctctggacacggtgaacagggaggaaatgggttcagcacgttgagcgatgccggaggcgaagaggatgatgtctcgcctctgccgacgagaagtggaagtaactttgttactaccggatctaaagacgcgaccaataacaatggatcgagcaacgttcctgctactggattaggcgtcagtctttcctttaaaaaaaaataacctcaagctctattctcctcatgatatcaggttgaaactcggcactaaattcacccacctcactcacgtccgctctgtagatatcttcgccttcaactaccgtagatgctgaagggttctcgatccctcctccggatcacaacaagaaaccttgggagatgggaacccaactggaggatgaccatgaactatcatcggctatctcttcggacagcggacctctcaagatggctatcgcgcccaccccaatcaaagagaccgaagaagaacgtcaggcagcgttattcgcgatgaagacagcacttcaatctccagcgatggctccccctcctcaacgaagaggcacaatcgcccgtggaaggcgagacgtgagaaacacaacgttcggaatggtaccggacgatgtgccactggctcaagcgcttggacaaatctctcgaatcaacacaaacgttggtggatcaggtacgaccccgagtccttcgcaggtgaccaactccggtggattggagggttcctcagtcgcatctccgttcttcacttcaccgccagcgatgtcacctttcccatcgtctactggttccggagatggaagccctgccacagctcccactacctccatcgctctcggatcgagcaatccgttcgcggcaggtcaagcttccggtctgtcttctgggttcagagcgtccatcagtgagacatgcaatgtcgtttctcgttcgggttctgtcatcaaagcgatggttaccggtcaagtcgcctgtacgttcgctgggatttctacagacgagatcgcctcgaatggatcaacgatcttgctccgactagatcagtttgaacagctcgagaaggtcgcacccaacccacagttcatccgatctctcggaccgaatcaaccaggcgaatactctgccgacgtgaatgcgctcgtccaagcttcaaagacgagtccgggcagaccgatcgtgctgttcaaatatcagcttcatatagccgaaggcaaagctgaaagagtcgtgccgctgtcgatcgtacctcagtggaagtgcgaggactcggaaacaaagttgctcatcaactacaacctcaactcgaacagtactatgtttgccggactcgcttctgagccctctccgtttgatgagccgtcaacgacgacgatcgatcaagtctccttcacagttcctatcaattccagttctgtgtctaacctgcaatcgaaacctcttcaggcgagctggcatccagaattgaatcaagtcatcgtccctggagaagaggtttctgtttcgcaaccatcaaacaaggtagtagctaggatgggggttgataacaagtcatccgttcaacctatccaggtcaagtggattgccaggggttcgctttgctcgacactgagtgtctctgtgatgaacggtcagactggatggaagctggacgaggtggagaagatcgtgcaaagcggaaagttcttggtcgattgagacccttccttcttttcccatgttgcttacctcctttcgcaatcttgacttttgtcaacttttctggtttctaccatactctttctcttgtttccaacgcatgtctttatagttcgagatttaatttgtatccgcttcctttttcttttcagatgaatggaatgctatgctatgctatgctatcaatccttcttcaataaaaactatttccccgttcgattcttctttatttgaatggcttggcaaacggcaacactcgtacttttcgaagattaaacacattgatacatagtgaatgccacatccaagtctaaacctacagcgtctagaattttgcttatagctttggataaataagcatgtgacggaggtcagtttgggaaggagaaagaacaaaaaacctatgccggagtggtagaaaacatgaataaggacatacctcgccaaggacgcccatacctagactttgaacaaccatgccacccatcgtcttctcaacggcctcctccaaatgccgtttcgggtcccgctttcctacatgtctggttgccaactgctctggcgttaatgtcgattcctccttgacggaagcggtatacagcgatgcgagcttgagcatatcctgtggacgtttggtagtttcgttcacgaagaaaagcactctgattagcaagatgagcccaagcaaactggtaaaggaaggtgaacgaacttgaacggctgcctcattatgatgtctcatatcatcgaactgctccagcttgagcccttccgtccaaccctgtttgtgaaggttcatcaacattccctgctcggcctctgtctttttgtagtcgatcgcaatacctgtaagagttgaattcaagaatgaaggtatgttgagcactcggattagtctctaaaggagagggcatcggctgatatgtcaatacgcttatgaacgtactgtaataatgccggttgagaccgtgaatgagagcctgaatggaaggtttgttgagatgaccaatattcgaagtcgtctgacgaggctcctgacccatcatctatcaatatccatggaagaaattaaatttatgttaagtaaaagagtcgatgcgcatagatcaagaagggtcaacgggcataccaaagtctggggattgatcgtcctgaatgcatctatcacgacctttcctttgacagattggatgggatcgatgaccactgctacagctcgcgggttcagctgctcgaaagactatgaaatcgaagaacattgtgcattagaacctctctgttcgatacccataatttagctagacagagatatggccgaacctgttgagtgttcacatctaccgaggacagccaacaaccgaaaccaggatgggaatggtaccagcctaccaccatctccggtctatcaagaacataagcggacgttatgaattggaacagaataatgatagaaatcagatgagtacacatgtttgcgtttatagcccgtcagtcaaagcatacacttaccgaccagtctgtttcaacatatcaagcatttttgtttggaacacatgatcaaccgactcgacagtgaccgacgttccggattgaggcatagcaaagacatcaaccacatgcacctatgatatatcgaataccagcaatatgggcagaagagggtcagaagtcgcgcagcttgaagacatgtgttcttcctgagaagcgtagcggaaacatacagtgtactcatcaacaaattcaccgagcatcagtcccattacctccatcggaactcctgctcgtccatgcttgagcatctataaattgaatttgtgcaacaacaatgagtggaaactccttcagccaccatcgatgtgattcattctaccggccgagggcggtaatttgagacacaccttcaaaagagcgagagatgaaacatgaacgatctctccactgtttgaccctcggattttacatgggataagaagcgtgttagcgactaagccatttcttttcaacaaaccttgaagaaagccatattcaaccaagcgattgaaccaggagtatctctgacaaagcatctccttcagacctttttctctcgaaactttgaatatcttggtaacccctcgtactatgcacatgtatcgaacgcagctagagatccacatactctgaacttgtctgatgtatttcctcgctcaatcctgaaagatggaaaaatataggaacaatagactcacgtatctccgatctgagtctgagctggaggtccacccattccaccacctccaccttgttgtaataatcgagcaagtccttccatgatctatgtgagtgtttgggtattcgaatatctaggtataagatgttggattctttgtgtcggttcggtcgtttggtcggggtgtttggttgtagtgatcgaggaagagacgtcagtaagggttaagagatggccgaaagctgtcgaggtggaacttaaaaaaacgaacgacgcaagtcaatttgaccggccctaagcttttattgaacttctcaagtcaacatatagagtaaatcgcataaatcgttcgcaaaaacattcattcctcaatcctttgtccagccaagatctgaaagtggctgagaacgtcgacaatgaagtcccagccataataatttactgccagtcaaccaaggaccatctaggtttgtggagcaaagctcacaacagcgtactttccattgactctccatttaggatcctatacatcgagccagacataaacatatattatcagcgcatatcctgatcagcctcgatacctagagatctagcaaagatctactcacttctttgaccgtgcgctcttctacaccttcagctagaccgacgctgtgtttgaagttcaatatttggtagaagaatccacgagatgagtgagctcacacattcttcaaacgcctgatgaatgttattgggagagaacgtacatgacctcagctttgttggttctcagagacaggatctgttgcgaagatagtgaggcaaacaaaatttcagtctcaaaacatgaacggagctatcagcgtcccccaagactcacaggaattcggccgttgatggggcccaacaccttgtcaaaaggctcagtagtcttccactgagcatccgccgtcagttttcgatagcttcaccagccataccacagtacacagataaggatgatcagacacatgttcgcttcatcatacaagaccgagaaaggaagagtggaagaaaataatcacttgaggtctcccttgaaaacgaccaagctacttttgcccagccctcctttctcatgccctaaaacaccgtcaaattcctccatgcgttgatactctgcgcttgtcgtccagaaatcgctcttgatgtgtttagaacccagttccgtgtccaaaggaaccgaaagatcaaacgccttcttgtcaacaagagattgccatctggctgcgagatcggtaagcgccttgaagtcggcctcgttaagcgacgtcgaggtaaagaatgaggatggattcgaaagtgtcgaaaggatccatctgcccagagaacggggaaggtgagagtaagcaaaagagattttgagtcagatactaatggagttatataatgaccgatataacggcacacgtgatgggaagaaaaactgaccggaagtcggtggggaggacgtctgaaacaaaccaggggatagtcttggggctgttgtaaatccatcaaatttcagataaagacaactgtgacggctcatgaataaagactattgaacgtactggaaaacggcgtggtcgaagaaaggagtcatgctgataagaaaatcggcaaagaccatatcggtgaagagctacagtcagattaggcatcgaatgaggaaggaaggccacgaatgtcagctcataatcaagttaaaggagtctgacgaaaaaggaggatcatgcggcggcatacctcaaacccggctacgaaggttgaatattgaaagaaataaagaccgatacgttaggcagtatagcaaagtaggagcgtttcttaatttaaaaaaataggttcgtgaacgattaccaaccattgtccaacacaaagtcgacctgcttctttccaccctgactctctaggcgcttacaccattcccaaactggagactcatcatctcgcaagatgaacttcttctcctcaattcctcgggattgaagcgcctgaaggctttcctctgtggccccaccggcaaggagcgaaaggtccgttgcgctttgtagaaaaaaagaaaacaggcgaaaagaccactgctcttgagcgtttttgttcaagacttgaacaacatgaaaatacacaagaaccgatcgcttacttcccccaaagacacatctgaagcatcgagctgaatattggctgaagctcgtctaacgttgtgggaggcttctcggccagggctagaagcgaatgagccagctctgtagttttgaagttggattgttagcaagcttcccggtaaagtaaagaagaagaagccatctccaatagagagcactgaccaacaaccgctttagaggaacttcggaaggtctcgattttggacgtaaagtaagggtcgtatgtcttccattcactctcgacagccacgaagtttcggattttccgatagctagagaaagaggacattagataggaggttaaatcgagtttagtcgccttgtgcgctcatagttctccgtcttgggaagtttaaaactgtgagaatactatagctgagaaagcagaacgtacagaaaacactcagcccataaccagggcagttgatgccaggtcttctttccttctttcttcagtctctcgacctcttcattgtaaatgcccacattgggttctccatcatcgaccaaggggtggaattcagaattggaggtgatttcctctagaagatcgtcagtcttgtcaacaatcgtctttacctgagagacagcaagggtggaggtatgtgtggttaagctcgcattcaaaaaagactgtctagtatccttgctataaggtggaaacgatgacaaggtcaagattcagacgcctgtgcaagggtcaacggtaagaaacaagaagagacaaacatgattacaggccatctgcaatataaaagcaaatccaagcaatcagcctgagaccggtgtatccgttttaaatgattgatatcaaatgagagacactataaacctaccgtgtgatgacagtggctctcctgagaggaagaagaaagtacaaggctgagtgaatttatactattgcctcgatagcagagaaataacatgaatcagacatacgcaaagctagacaaagatggtttagatcggaccaaatgtcagtttcaactacccagccagacacaagagtacgacaagagcttagaccaaatgtcggtactacgaacgttccctcctggtcgaatccccatctcggaacgggtagatcgtaagtagacatggttgatatttggagcagattaaaagctagatgggttgaaacgagatgaatactcggagatggttacaccgctacgttagatcgctgggtaaatgattacgcaagagccaagcgagctttcttaatctgatagtcaaaataatcagttgataatttcttttcctcctcatcttgaccacaacttcttttgatttgctcgtttgcttgaagaaaaaaagaagtaaggcagatcgatcgtgtgttcatcctgcacagcactcttgtgataaagcaggctggagggccggatatgtaaaccttccggtcgcttggtctattgtttgagggcttcttttccctcaattctccttcaagtccatctataagagaaatacaccagagaagaagtgaatgctgatcgtttcttctttcactcggaaaaccctctctagaagcgtcatcgtgaaatacactgcacacagaatgtcttcaacttcagctccagctatctccccgagggttctcaagtccctggccgatccgaactcgactctcaagacggtccttgttttggggggcgcctatggagggctccaggcagccaccacgatggcaaagagcttggttagctctgacggaaaaggctttagagtagtgatcgtggaccgaaacagccatttcaatcgtgcgttattgaatttttttcctatctgcctcatcagaggtcacagctttccttaagaagaaccggtatctgattggctccatgtatattttatttgacatactgcgcgcaaataacagatctgtacatctttccccgatgctctcttctttccgaccacactcctaaagcttgtgagatctcggttttatcgtttagcattctttggcctagtcgcgctgataggtcaattctcattgattctctttcatcttcaagtcatccctgttgcgcctcagatcgaagcacctcatatttatctccaatctaccttgctctcgctcgattcagagaccgccactgtcgccatccctcccactctctctcccacttctgaaccggaacaggtctctattccatatacctatctcgtctatgctctcggaggctctctggccggcccgatggatatttcccagggctcaggcatgaagccggatggagctaagcggttgtcgatcgtgaaggaaaagatggatgagttggtaagacaacagaaagaagagatcatcaagggtcgagtgctcatcatcggaggtggagccctaggtgtaagttgatctgaattaagggcggatatcactttttgaatgatgagaagcgagcgttgacaagaggtgtcggaaaaaaaaaaactagattcaattggcgacggatatcaaagagatttacccaagcctcgaggtttccttgctgcatagtagggaacggctaatgcctcggtttgataagttcttgcacgaccaaggtatgtcttcctcatctaaacctgatgtctgtaggcttcactgaactctcttctcatttccaacgcagccaaaaagaggtttgacgccttgggggtcaaatattttctcggtgaacgggctgtcattccgcctggcgggttcaaagatctccgcgtagagagcagggaggttctgactgttaagggcacccattctataggaactgattttgtggtaggtcttgttcttttctagtttccttgccttcaatatactttcgtctgggtcacgacgaatgagtacggctcacctttcacatctaccctttactgcccgtatctgtacagatcacatgcaacggccagtgtccccagacgcagtatcttctgacttccttcccggactctgtcaaatcagacacctcgaagcaggctagggtgctgaatacgatgcagctcgagtctggtcctgatactggcttacccgtgttgggtggaaggttatttgccattggagattgcgcagatagtcaaggtgtcatcgatgccggctacagtgcgttttgttgatcgtttcacttttctctgctgctgctgcctgtttcttcgaatgtatcatttagagaaagatcgtcgagagactgatagtgtaaccttgtttgctctgtcatcagctgcctggcaacagggaaacattgcatctaggaacattctccggatgatcaggaaggaaaatccggaaatggtttcttcagacttggacctgcccaatgaccagcttgaagattgtgcgtccctgtcctctcctctgccaatctcttctatctccaaagctaatcggctctatgtatctcatcaacgcacctattttattcatgtgtacaaccaatagacgagttacagaagccggccatcaagctcacactcggtctcaaacattgggctatccagaatgccgaggaacttactgaaggcgatgacggcaaggaagatctgggtgccgaactgatgtggacgcatatgaagtgtgacccgacggacaagtgggcctgagaaggaaataagtttaattgggccacgagaagtgtacatcggttttgtttatcttccccttgcatcgtccatcgatttataatttgttagatggtcatcggggttggagcaatgtatgaattgatcggcttcctccgggaagggcggctgccgaaagctgtgccgaccggcgtctatttggcttggcatgggattcacgaaccggttcagaccgaatgatcttacgtatgaagttgagcaacaggtgtttgttggtgacatccgggtatcatataaagcacgttgaactcttcgcaaagctctcaacctcaatcaaccgtgttctcatctatcatctacttcttat

SEQ ID NO: 2633 - DNA, 825 bp, Xanthophyllomyces dendrorhous
aactgtgctttgcgctgatcctgtccctcctttccatagtcaactttccatttctcacatcaccgggttcactcagagctcagagactgcagcactcatgaaccaacggctcctcaccgagttgtcgtcgcacttcccagacccatctgatccatcagccaaattcgatctaggctcagatcagctgaacgaagagcgcaagactgaggttcgagagttcttccgaggaggtatgaagagcgtgcaagaaatctgggacgaccacaacaggaaaattggtttagatataagaaagaatgcggcgctcgaaaagaccatgaaagaggtttgtaaattcatcttctcgaaagtttaactgtactttacggatctgacctgttttgttctttgtctatctatcttctccatactcttgattgtatacgccttaagacggaagttctggggcaggtacgcctcaaccgaggctcgatttggagttgatctaactggagcagtgagggctctatctgttgtctattgtaacgcttcttccgatgcttactaaacctcgtccccgctagagcaatctatagacattgaggcttaatctcttcatcgaaaagatgtgagcctgctgactttcctcaggatatgatctcatgactgactctttgtgatagatccaagattggatggacaaacccgacttttttgagtaccaagcgcactttcatcgcttaagcgatcgcgaggtctattgatgttttcttctttcgatggaaatccctgcgtaccactggctcccgttgaacatccatgtttcactcttatcgtctggtcagg

SEQ ID NO: 2634 - DNA, 3368 bp, Xanthophyllomyces dendrorhous
gacttgatctggcatgcccaccagttgaagatcgagtcttatagagatgacacttctcggctgttgaccaactttcttaatcacccggacaaggtggatgaagcttcgctagaagaggccttcattggcaaggctgaggcctggaagagtaagcgattccttttgcctgtccagtaaagatgataagtgaaaaaacggactgatcgagcattcggtaatgctatcttaggtcaatatgacgaactttagtgagcgcgttatcatccaattgatttgggtagtcacaactgaacttacacttgctttcttgatcattgaagttccactgctgtccttgttcgtaaatttaaatcttttcaagacaacactgttgtgtccttctgtgctactctctccaggatgtcaaaggtctgactggaaatgagatgctttacctttgattcacgattgaacaggaggcacctcggtcgacctatttttggagcagagaaaacccgtcgactccgtccgaacctgccaaaccggtggacgaggaatatagggatgctacccaagcctcgacgcataactcagtctggttggtagcaaacaaggcgtgcctcacgaaccgagaaagtcgagagcataacaggttgggatcccgtttttctctctcttttcggaagtctaggatgaagacgatttagacgaagtcctttcgcatttattgacttgcttgattcgtcactgggtgagatagaattcagcagaccaaagtagcggagaaggcctgggccaaaaaatctgtttccaagcttccatcgaacaggtacaaatcttccatgtccttgtgtcttcttttctcttccgtttcattcattgatccacagcgctgactttgcttgcgactctttatcttctctctgtgactgttctgtaggacaagcgagaactatgatccagatctgttctatcaccaaacatcccacagtcttggtcaatggggatgtaccaaagtaggagttccacatcatccgttggctggttggggtatgggttcagagtgttaccctcacgatttcgttagtcccgatctttcccgcttgtctcctcttcttttcctcttgtgtattgactgtttgatatcttgggtcggatgacgtcacatcagcattggaaagagatgcagcgtgcgccctgtctgtgtggacgttcgaagtgctgtcttggcgagggatgtgagggtagcactgcgacgtcaagaaacgaccgcttcgcgcttgacttagtcagtggcggaatggtagggtttttaatcgtgtattgaatgttgagagcgagagaccggggccatgcgagggcaagcaatgatgagatggagatctgttgtagttttttatttgtcactttctataatgatatgttgtaatgaagtttgtccaaaactctaatgttcctcactggtccacctgccgccacgcctttttttccttgtagatacaaccgtctttctgtttgccagcattcactttccgtcctctccttctataccatctcttgtggacaacaaacatcgtcttgatcgtctttcacatacatcttttctcgaatcaacctcatgacgtccaggatcaacgttccttcggcctctcagcgactacacgcacagaacgctgttccccctccctcggcctaccagccctcgtatcaacctgccgggccatcgcaccatcttcgcaaacagtcgagcatcagtggtctcgcctcgaccgtcggtatcgatgactcaaagttggatactgtcagacaggtcaccgatagaatcgaggatgtcatcgagaggttcactcaacctgtcaaaccttatttgccagcagctgctaggtctgtcctcttgaccaatttttttcctctttctttctttagtcttttcttccttctgctttctttacgtacaacagaattgtagagaggatgaactcagttcgaattggggatgacttcctcctgaaagaggtcaacacgactcttgttttggttgtatcaacggaaaacgagaggaaactacggagatcattcagaacgatggaggggttgggtgtgagattgaaactctcatcagcttgtataggttgtgcatgcgtaccatgcttgattcgacatagtactttgatactggttgactgaatagatggccttcctctatcatcttggatcttttccattttctaatggtcgaaaccaagtcgagctttggcttctgattagaaacctgaatgattcgtgttgatatgttcctgatggctgatcctcttctctatcttctccacctatgcctgttttatgcgtcgcatcactactatagattcctcatcgtcgcgaccttccttgaagatgcgttgaggatcatcacccaattttcggatcagttgtggtatcttcaaacgtaggtcttccttagctctattgatcgatacctctattggacgtggcttgatcccgtcctggagcttgtcaattaacgctgcctctttcctcaatgtagccaacgaaaattctactggggattttctcatctgtttcttgcgaccaacgttgttgtcagtttgtcctcgcgccagacctctctttctgtgcccatgttctgacacgcgtcggccctcgcactgtgtgataaaactataggtcatgatctcttgctctgctcttgtcatcaagcgacttcatcctcactacgctgtcattggtctccttggagttgttatctctcaagctttcggttacggtctcatcttcgatctctcattcttccttcgaaacttgagtgtcatgggtggtctcttaatggtacttagcgagggcttggcaagcaagaaaggactttacattgctgggttgcccaacattagtgaaacggaccgaaagaagtagtacgtcatgttttcttcctcaaatccaattgatttgagcgcgtgaagagcttacttgatgcggttatacttggttttacaaaactgaaccaccttacttcttgtatctctacagcttccaactggctggtcgggtgctccttatcttcctcttcctcggtttcgtcttcaagggcaactggtctttggctcgagtacttgtttcactcctcggtctgggagcatgcgtcatggtggttgttgggttcaaagccaagtggtcggccacattccttgtgctcatcctctcgatcttcaacatcctgatcaacaactggtggagcgtgcacccgaaccatcctcagaaggactacctccgatttgactttttccaaacattgagcatcgtcggtggtctgctcttgttggtcaacatggggcctggaggcatttcgatggatgagaagaagaaggactatg

SEQ ID NO: 2635 - DNA, 10449 bp, Xanthophyllomyces dendrorhous
gttcagaaatcttgggattggtatatgaaaaaagaaaaacaaaaaaaaatcaagagacaggaaggtccggttgagtttaatccctccacccctttcagcgtatcatgtttctatcaataaagacagcggacctcgacatctctctcaacgaagttttctacatccatccccagccggatgactgtctcgattggatgacccattcgaaaagattcgtagtgggtctctgctccttgagtttgatcgatctggtaacaggggcatgaatgattcagaaagtgttgggcctaaatttgtagagaaagagagggagggaggttgatcatcttgctttaccagttcggttggacatactctgatcggattgacgtcatcctcgagcggcatatcggtgctcgtctcttccatttggagcttgattggtatatgttcagtctcttgatgagtttcatatgggtgtatctcatcagatatatcaggcccagcaaggcttccttctctttcgattatggtgctgtctgcttgaatcagtgtgatgggaccagcaacttatcacgtcaaatgtcttctctgtgtgacgctatgctcggatgttaaaacgcatgagaaggacgtactggatccagaagacgatgtgatatctgattgagaggttcgagaatcgtacactggatcgtatacatcatcaataatcaggtgaagactgccgtcaaatcgatcaacaacgtccaacgattgctccgttttggacatggacataagcggatgagaatcatcaatcgttatctgagactagaaggagggcaaggaagaaacaacaaaactatgtcagccgattagatcgaccgttcatacgaacaggtacttgtatcggttagagcttctgctatgaattagtaaagagcctaaccctcgtgcgttcgtgggaaccggtcgcgttcaacaatgcagtcctgttgtcattggtgaccttctgagagtcgcctgcaacctgttattgggaacggcaccttgtcagtcagaagtttgcgttgatgcaccctcatgtatgagggtaatcagtttgaagagggcacacccctgtatcctgacatagttggacgaatgcgatggtcggaatcaagacagccacgaaaggaacgagagccaggctctctacgtatccgaggatgcctacgaaaggatgaatggtcgaacgagccatagaggcaggattcagatgagatatagtatacatctgagcatccaaaaaagagtagtggacgttgctggcttgatcagacctttggaggcataaagaagaatgtcttctcatatggtgcctgcatggccgaggacatatctgatgcctgatgcacacaggatcagttcccttcctcggcagatcatagttgagcgcaattgttccttcttgttctttgggtctttccatacgatatgatatgtacgatattccttctctagctagttcttattctctgactcttttctctctgatcagttcgtcagttcagctctgacgattaggatgctgtccggcgcagagcgcagagaaagacatgaggtgagatgtaacgatcgaatgtcacgtgattcttctttacagtcgcctgctcagtttcaaatggaatcttcataggagacaacgagaatctgaaccatcagcataactcatcagacgatgtcctcaaacaccacatcttatcctctctttggaggagctctctctattgacctgccagctggtctgctagacgcaaggtcagtcgtacgtccactcttctcaactgtttggctggacctgagcctgtttccagaagtttaatctagctgtttgatctctattaatcttcgacccctttcccttgatgacgcacgtttgggtctgttcatatagtgatatccgtcaagtacctgatactcaggaagtctttctcgcgcatgattcagagctatcttatatcattgagattctggaagcagtcgagtcggacgagtgcgcaggagccataaagtgagtttggtgagaaagtgatggtgaaaggaggggaaacgtgttcttatgtagaacgctgacgttcgttttcttcctgcctgattgtcatctgttggcctacgtaggtttcactttgattcactcgcacatgacaacactgcgctctcatcgacaatcacctctatcgacagcccatcatccctatcgactgaatcagctgtcaagttttcagatttcccaccttcgccgccgaatcagcctacagtggtgacactttgtgggaatcaggtggttcagaagttcggaaagaaagaacttgagggcgaggttgtaatctttatggctgtctggcgaatacaaggttcgctgtctttcctctatcactctttcgtcgtgttactatctttgatactaacaaggacgaaatgaaactctgaacatcgaaccaccacatattttcttaccacttctccatctccatccttatctttcaaatcgacgttaggaaaaaacaccgatatcgtgttcactatcaactgccctgagccctcgttccgacaagcggcagaacaagcttttagagctgccgttcctatgttcaaagtcaatgattggaatctgttcgctggttagacgattgatgtaaggattcaatgagttaacccgtgaataccgtcgatcgatagagtttaaagatgataccgcttagacgagtttcaaacattcagccgtttccaaacaagtatagggtagttgataaaatggaacaagaaaagggggtatcgtatgatgacaaaaagccgagtgatatctgaaagacaagaacgataagaatagaacaagaagtttcaaactttcttcgctctcttcttcttttccctctaaaggaagagatggatgagactcaatcacaaccagaagaaagagtatagctacaaaacgagacggtacaagacaagataagactttcaacaaatgaaacgaaagacagaaacagatagaaaactctacaagatagcagaagcgaaagaggaaagaggaaagaggaaagaggaaagaggaaagaggactaatcactcagtgtactggaagatagatacaagagaaccaagctctcgccctcactctcaagcgaagatcttgctggattcgtcaagttggaattctcactactcgaccttcccaactgataaagtctcctctctcctgccatcgtattttcctctcgaggaggggaacgaggtggtagtgaagggagaggacggctcatcttcgagtaaacttctggtatgatggtgggcgttggggagttaggaacgggcgtaagttcaagtatcgacggacacagaaccgagttcgtaaagtcgtgtgttcgatcgggtgatttttgagatgaaattttgtgcggagaaggggatggcaaacatgagggagaaacaggaagatgaggtaagagaagctcaaacgggtttataaacgcaggttggttatcggaggatgggtcacgatctgttttgataggtagagaataggatcgaccaagccctgctggtgttgacgcggctggggttgctgctgttgaaaacagaggctcggatgcgttcgaaccgcagggtgatggacgaagaggacgaaaagcgacagggggtggttcaaggacaacggacgtgcgaggaggaagggtgaagaggggtaacaacttggccgtctggcaagaaaagagaaagaaaaagcagacgtaagagaatgtggttgaatgaggcgataactacaaacgataggacgtacgacggcttctatatcactctcgtaactccgtctgagctcgttatcaccttcatcccggtcaagaagcaaaccctctctctttttgtccattccgttcttgccttcgtcttctttctccttctcaaatttccgctctatatacattgtacgcttctttcgaaagaacgatcccttaggtgaatctgtatgatgatgacccggaccaccacctccttctagcgggctcggaagagttcgttttgccatatttcgtcgttctttacactctcccttgtcagctatggacgacgtccgtcctaccatctcaggcaccggctcagccttcgagctgctgaaaaagagggtggtgagaatcttcgaggatattcttctaccaattttaggggccggggttggtaagatcagatgttctagagtattcggagaaggtagaggtgaaggtgaaggcggaatgacaggcggctgagagtaatgatgatcgtcgtagggttgaaagacgggtgactgaggggagtgacgagggtatggtaaagggtatttagggtctatgcatgaagagttcgacactgtggatgatgcaactaggtatgaatctgatggatctcgcgcggaaagactatgtgatcttataggtcctatcggatgttcttccctgtatgccgatgaagatgatgttgctgatggagagggagtgagaggaaatctgggaaaggtgggttgggtggtatgtacagccgtttgagaaagagagagagatcggagtcgagggggaggggatgggtgcttagacgtactctgtccgattgaaggagggaccaaggttgattcccactcgtccatcgagtagtcatcatccaaagcgaatcttgagctttgggaatccactcggctaggtcgagaatcgaggtcgatcgaggataaagtacgagagccatcaagtgtagtggcccaggaggctgtcgaatttgttcgagcgcgataagacgaggtgagagtcgaatttgagtgatcaagcgaaagatgtatctctgggacaggagggaccggagggacaattgtaggcccattcttccttcgttcggaaatgaactttgattttcccttcttttcctgccgagctcgaggaggcgacggtgattcatggccaagctatttggaatagacttgcaagtcagcaaccggtatcctgaaagaaagaacaaaaatccagagtcactcttacgagaccgtccaatatgaccaatgccggtttacttccaaacggcttcaacgatcctcctgtcaatgtgctctgtaatctggatggtttctttcctcgtttggaactcttatatagagatgatgatttcgacgatgagccattatcagactcagctccaaaatcttgatcgcttttggactgatcgttacgagacaggaagtaatgtgaagaaagagcgtcgtcttcattgtctttgtcatcgtctatgctggcaaaagtttcaagagtgtttatgctgaatgaactcaagttgtgggcgagaccggtctggtaatcgctcagttggtcgtttggtcgctagagacgcgccaacaaggaatgataccccatgatgatgtccaagacgatggtgatgaatatgaggacaaggatcaacattcagacgatacagtgaacgaaaacagatcaacttaccctggagattgttcgataaccttcgcatccatcatcgaaagagatttgggactaggacgaggaacaggaacgaaaacagggaacaaggaacacggaacatgaaataaggaacaaggaacaaggaacaaggaacaaggaacaaggaacaagggccccatcgcgactcagtaagcacagaagatattagagcggaggacacgaccggtccatcttacctctctgttgatagaattcgaccgagctctcgatcttgaagactttgacattgcctattcaatccaattccaaaacagaatcagttctcggtctgtgaactctcttgtttctgttgtagacactgttggtcttaaagtcgttgttgacggtttagaagtatctcgagtgatttgccaaagcttaccaagagggactaaacgtccaaacgaagcaaaagacaccaagacgacatcatcaatgtcaccacaagaacgcgcagacaggacaagacaggacaggacaagatttatcagcagacatgcgaagttgagagggagtgagaaaaacgttatgtaccgacgaccaccatgtatggagaggcatgccggtatgacccttcagcgactactcgttcgaagcgggcaggaaggtgaaggaagagaagagaatgtatgtcttgtataggacaggtgcgagaaacaaccaagctgttgattggagaggaaggacagaaagaaattcgacaagcgcgtttccatccctatgggtctgagcaagaagacctaggaggatgtgaacggtatgatgcacaacccttatgggtcatttaactaaagcaatcaaaaggagaagaaaagaaggagagagatcgaatgagtgaaaacttgactaaagaatgtaggaagtcaaaaacagagaaaaaggcgggaggcaaagcgtgctataaggtttatattgcatccggacgtacttagatctaaatacctcagatgacagatcaaaaacttcgggttggcaccggaacgagatcaaagagagaacgataagtagagagcaagaagataccaagtgatgatgatgaaggagtgaaatcaagaaaacatcagcgcaagatcacatcaaaaccgagcttacttttggttgaaggagaaatgaatgataactactgaacgcctacttttgattcatgaagggatcgatagcgcgtctagctaaaatgaccgtcacagtgaggatcaaccgtatggatcgcctaaatatataaacggagaggatgaaagcagcgatacaacaataccggacctttaaatcctcactggcgctccgccaagttgaaagtcgaagggatcaattgaacatgacctgcaagtaggataacaagcagaaggaataaggactcgactctaaacagatactcgagtgttgttcgtctcagtgccgagcggtaatctcgaagactttcgtctctctagatgcctcttgaatacgcagccaaacaatcgaggccggacgaaaccagcgcagtcaccacataagtttgaactgataagctcggaatattctatcaacttcacgcgccttacaaggcagtgcttgtgggtcgcgttagctcatgacgtatgatttgctggctgagattttgtttttgaaactataattcaaatatatgcttcgaccctgacaacacgtcttccccacactctctgttacgttatccttctcgttctgttagtgatcataaattccgccctacttaaaccttccccaacatcattctcagttatatcctaccatctcccccttgttagagaaagataaataaaacgttctctatttcacccatcttaacttaactcatctcgtttcatcctaataaatcagtcgtatggctcctcgaaaaggaaacgaaaacgggtcatgggagcttgacccggatttaacaccaagcaagggcgaaaccaagactcgtcgaagctactgtgtgaaggatctagtaacccgttcgtcccagctgcttggagacttctcttctcgcccttgtctgaatagatatgttattatcgatgtccagcaagctaaacctttctgtatgatgttttaatttcctgctcgttcacctcctctgttcgttcctgaacatggtccctcctgccctggacatctctttcatacacatactctttcacctccaaaaccagaaccccttcccggaataaacacaacactcgatgtggtcaattacgccgctcaaaagtcacccaacgcaagaggctttggcatccggcccgtcctggataccatcaccgaaactaaacagatcaccaagatggttgatgggcagccccacgttgagagcaaggactggaagtttttcagactgggcgagtatcagtggattacttatctcgagttcaaacagcgcatcaacaagatcggtactggtctctatgaacttggtcttggaaagagagagaacggggagagtgggttcgtcaatatatatagcatgacctggtaagcatctcatctttcgactcttgtgttccctcttttgccaagagttactaagatcgacgccgatactcttcattctttaatcatgcggccagtttgcattggcagatgatggctcaaggtaagtctttccaagtggagtaggaaaaaacgtcttcatgctggcatcacacagtttgactaagatcacacacattttgcatagcttgcgcatcaatctctgcgccgatatgtaccgcttatgataccctcggacccgacgggctctcccatgctttgagcgagacatctagtcaagcagtcttcaccaacgccgacctacttccgactctgctcaaagtgatcaagaactgtcctgatcttcgtaccgttatctatgacggagagccatcgaatcaggtcctaacttctttccaagaattgaagaacgtccgattgattagcttagaagaggtcgaagagttgggctctaagagggaaacggtagagatccctccgaaaagagatgacatttgctgtgttatgtatacttccgtccgtatctcttcttccttatctcgatcttcaataagaatcaatgctcaagcaataatcttgcgggttcgtccggttctttgatacagggttcaaccggaacacccaaaggtgtggttctttcccatggtaacatcatctcgtccgtcggcgcggtctacaccttactatacgagatcttgagcattggggatgtttatcttggtaattactctcatattcaggatagctttcaattcgcctcttgaacagctcacttacctaggtaaaatttctgctttattttacagcctacctgtaaggatcatgtttgcttgtgtcgaagtcagacgccagaaactcatctattcactcaatatctccccgtttatcagaccattggctcacattcttgagcttgtcgtcgagatctcctgggtaagttttgtaacttacatcttgcagcatattgaatttcaaacgttctaaatcatatggcttccagattttcgtcggtatgcctatcggttacggccgtgtcaagactcttaccgacgcctccgtccgacagtgtaggggtgatattgcagagctcaagcctacaatcgttagttgaactcttcgcttttgtacttcacgtttcgtctcatactgatgatcgggctgccccaatcgctgttttctgtccagatgactggagttcctgccgtcgttcgtccctctaccactcgacttttaaaagccttattttcaacgtatcggtagatactcaccatgttatgtttggtattcgatcagtgggagaccatcaggaaaggtgtgaacgcaaaggtggccgcaggctcaactcttacccagtatgctttcaacttcgcatacaacctcaagttctttgcccagaagtatggtatcccaatactccctcagcttgctgacacagtcgtcttcgtgagttccttcgattcgattcttgcgaccaaactctagttcggtagctttcatcagccgggggaagatctctgtgaactgacctctgaagaaatgtttttcatttcgtgttgtacagaacaaagtcaaatctcagacaggaggaaggcttcggttcgtcttgtcgggaggcgcggccatttctagatctactcaggaattcttgacgaccactttggtgacgaccctccaagggtaagcctctgcatttattttgcattgtgttttcccggtatcttgtgattctaaataatattgttattcatctaggtacggtctgactgaaacggtaggcatgtgttgtgttcttcctcctgatttcttccgttatggggtagccggagtcccagtacccagtatggagctcaaggttcgtttccactgtcttttgcccctttgtatatctctggttaagattaatcggccctccattgccccgttttgcatttgctttgtgaacaaagcttgtggacgtacccgaagctggctatcttgctaccaactctccgccacagggggaaatttactgtcggggcccatctctcttccaaggttactttaaacgaccagatcttgaccaggaagcattcagtgatggaccagacggcagatggttcaagaccggagatgttggacagttcaactcggatggaacagttagcattgttgatcgagtcaaggtatctttcttgttctctattttctgacattggggtttcatatagaccgatgagtatacggcgcctaattcgttgtcggaatgttgatttgatatatagaatcttgtcaagcttgctgggggagaatacattgcgttggagaagcttggtttgttccggtgttgttcttctagtccatcacaactggcaactgattaaacatggttgaactgcttcagagtcgatatacaagtccaatcagctggtgggcaatatgtgcgtgtttgctagtaccgaagcaagacagccgatcgctgtcgtccttgttgttcgtataattt

SEQ ID NO: 2636 - DNA, 90504 bp, Xanthophyllomyces dendrorhous
gacctcacgcaaactcttcttgatttcacatacatccagcacgaagccaacttgaaaccgttccttgcctcgaagaacctcgcaacgccggacgctcccctggcacaagtcattgaggattccaaggttcagaaggcggtgctcgctgatattaacagtaccggtaagaaggccggactgaactcgatggaaaccctgcaggcagttgtgttgacgctagacgagtggactgtaagtttcgacctattggttcactggaacatcataaggtccgatcagttgatccttgaagctaattctgaactgtctcttgcgttcatacggtccaacccaaattggatgggttacagcctgagtctggactcctcaccgccgcccagaagatccagcgaaagccaatcgagaagaagtacgagtcggacatcaaggtccgttttgctttctcatatctaatttgttttaatcttgtggccagccgttgttctcaaagactgacgttcttttccatgtggttgtgcacatgtacagaaagcttacgcagtctaatcatgatcctaatctagtgatcgctccaaagcaccgatatataccttcttgtgaaacctttttatccttaatctaccacactcttgttgcacaagcttgttcctctgtttttctctcttacctaatcttgcgcgatcgctttagctattccagttctcatcgattctccctactatcaccatcccgcttcattgtctccgcccgagtatcttcctgattctactaatacgatctgtacaaccagcttgatcgctcaatgctcagctctcaaaaggtatctagaagactggttatcaatcgtgccgaccctttttcacccgtcatctatataatgcagtccagatctcgacctatgagaacaagaggaacaagtgatagatcgcatttcaatcaaagctttctggaagataccatgtatttcagtcaaccaagttccccttttttttttctttagtcaactcttgtttcctagtggccaactgcgcccccactgataaatccagggttcccacctcgaggcctaagctgactaagacatgatgtacaaaaaggggttcaacgttcgagtgacggatggtccggtggaaaagtcgagtttgtcgatcttccgatttcggattgacttgattcaatgttagattcaaactcagattcagatataagtttgatcgtcggttcgggtaaatgctcggtctcgagtgtatcttcagctctatgtttggattcatactcagtgttggattcgagtacatcgagatgtgcatgtacaggggcagatgaaggtgtaggttcgattgcgacctgagagctgggaacaggaaggaacgaccatagttggacagaaggatctctgggtcgggcggttcggtggatgggcgatattttatcgactcgttttcgtttttgttccgtttccggatctaactccgattcagaatcagaatcagaagaggacgagtcggtgtccgatgaagaaagtgcagaacaagaagacgaaggagaaggtagagaaggagggagatgtcttgagcctgagacgatgctaaggatgggcaagtacgggtgaagtgataccgatgggatgacatctgtacaattaaggagaatagataaataaatatcgagatgaaaataccgatagataggatgagttgagtacgagctcttgaagataaaaagagaagaaaagcagacaagagcagagaaagaggggaagagggaaagagaagaagtagagggaaaacaagaggaaactcaccttgggcgattgaaggtaggataaatcctggtgagagcgacccggtgagtgccgtagaagaagaagcgtcaaagaacgagacattcccattctatcctcgaccggaaaaaagaatggaagagcgaaacaacaatcgatatgaggtgaaagacagtaagacatggcgggatctctcgggtctgtgttaatacaagaagtcatactacgaaatgaatgacggacctgatcacctgtgacgaggtacctgccccagagatccaagtcgaacagcattctctggtttgagctcttcccatcggtttcatcaattgaaccgactacagatgaactgaaagtagaatctgatgggagcgaagaaggtgatgcggatccaagaggctgtttgggctgccttatgtcccatgcttggaaaagctgggttgaccgacgagaggaagcgaggacgatcgacgggtcgtacggatgaaatttgacctgcgcgtaagattcaatgcatcgagggaagatcagtttgggtttgatagataaaaccaatcaattggtgtcttttcgtcgacacaaaggatgtaaaattctctcgacagaccttggtgacacctgcgccttcgaccccttttagagcgcacacccgacggtgagtggcagcctcgtcatataaatgaattgaccgactgaacgagccagcagcatataaaccggacccatcaggcgagaagtcaagagaggaaatgatacctttctgaccggattttgtctttttggaaggtgacgtatggagccgctcgcctgcatctccaggacgcgacaagtcaaagacttcgatagcgttctgaaagccacagtacagtctattggcaagggcggacgaacgatggttagacggctgatcagatttaacttcgagatgtgcgtatactagagacgtaggcgtgtctttgcttacttggttgcggacgtattgaaggccatacagtgaggagctacaaaacgctcctgatggtctatcagggggtacgatccccgggtcttgtttgagcgcatgaaaagacaataaagattccatcagtatcctgtggtgcatagatggggcagaagtaagacacacacaccttcccagttaatccatcgataagtttgatgggtgatccgtccacggctagtaggaaacagaatgaaccttcgatagctttcgaagcggaaggataccacagggaggagtagatagcggcctgctgaggaagcaccagggatggtttgaacggcaacagatcaaggcttgaagacacaatgtctgacggcctactcaaagcaaagagaagagctttttagaccggaagagctgcatgttaaacacaacttgccaggcaacacgagagctcatagagaacgacgaacaagtcaaacagccgaacagttcgatcttcaccaacggtcaataatgatgatccatccggcgcccaggcggccgacctaataaagttggatggaccgagttcggattctgaagtcggatcccagcttgctatctttctgggcgaagcaaagtcatatgttgcgaatgagtgatccatcgagcggacgactatcggggtgtcagttgtggatgtgcaactctggcggagaatgatttggaaaaatctctggcgttttcgagtttcccttcgacttctctccacctccacccacagtagtcgacgacgacgacgacgacgacgaacacaatcaacccctcccactttcctatctcaacatgatcaccattctcaagagaaacagggaagaactagaactttctcagaagaaatatttcaaaaagacagctaagggcaaagttcaaaagagtatgttatatggtagtctttcgaattatctcgatcgtattcccgtcgagctgaacagtttctccctttggttctcgcttccacagtcttgaaggaacgatatctgagagacgatatcccttgtggttcaaagttctgcagtgtatgctcctatgaagaagaggctcagccgagtctccctgaacagggtttcacaggctccaaccttatccctagaggccactatgtcattcctgacacgaacgcctttcttcatcaggtttgtctttcaagctcgctctatttaccaagcctgctagttctgcttcgcaaaagcgttgatacaactgccaattcttgaacttgaaaccagatggatctccttacgtcgcccttactggcctcgctgcctataattgtgctgcaaaccgtcttggacgaagttcgtcatcggtccctccctctgttcaaccggctcaagcagctgattgcagacgaagacagctcggtctgggtctactggaacgaagccgcaaagtgagcctttcttctttgacagagaccattgctcacaaagagtcatctaacaatcgatcatgatcaacaaattgatagggatacggctaccgttcgagttggtcttgaaacccctaacgacaagaacgatcgagccattcggtcggccctcaaatggtacaatcatcacctttccccttcatccagcaaatcaagcaagaacacagttcccacgccgtttgtaatcatgatttctgacgatgcggacaacctgaggaagacgaggcaggatggtttaacggcgtatactgtaaggcagtatgtagaagggctgaaagaatcaccggcagcattgttggacctgttggctgtcactggatcaggagtcgcggaggattcaggggagaagagagaaggacgaaaagcgctctatgaagacgtaagttcaatctcgttgataccctctcacttcaaacaatatctccgattcgcttacaaatcgggcgtcccatgaatgtgactagtacatcccctcggcgactttgctctcaggaatcaaatctggcaagctgcacaagggctatttcaatgccaatcagtacaattaccttgaagttagtctcgccttgaatcgtgttgtttagtttgattattgaccaaataaaactcgatacgcaatttattattcatagggttccgtgaatactccttctttcgccaaacctatcttgctcatcggaagacaagatatgaacagatcagtgaacggagacgaggtggtggtcgaggtgttccctgagagtgaatggaaagcgcctggtgagagtgttgttgatcaagacggtgagttcttcccataagtttttctatgtattggtaccataatttgattgacaacttttgaattataaagatgcactaaggaacgatgacgcagatgactccgagggtgaagatcttgtttctgaagaggtggagagacaacgaaaggaccagtcggacgccgctcaagttggaaaggccaacccgctcgagaagcagcccaccggccgggttgttggaatcttcaagcgaaactggagagcgtacgtctcgttttattcgactctcgctctttggctttccaaaggatgttgatctttgaacaaactcgacatataatagttacgtttgtcacctagactctacctcactctcaactcataacccaacgtcgcttgccgcccaaacggtctttgccactcctctctctgcacttcttcctcgaattcgaatcagaacgcgtcaagctccggtgttgctcaaccagaaaatccttgtttcaattgatcggtgggacatctcctcccgatatcccgaaggtcactttgtccgatctctaggcgcggtcgaatccaaagaagctgagcaagagagtctgctgttggagtatgacgtgccttacaggccgttcggaaaggctattctgaactgcttgccgaaagaaggcgagagttgggtcgtcccccctaaggatgacgatccccgaggtgactggcgaggaagagaggatctgagagatatggtgatttgcagcatcgatccccctggttgtcaagatatcgacgacgctcttcatgcccggcctctacccaatggaaacattgaggctggagtacatatcgcggatgtctctcatttcgttcatccgtcaaacccaatggatgaggaggctgcatcgagaggaaccactgtttatttggtagataagcgaatcgatatgttgcccagtctgttgggaacgaacctgtgctcgctccgaccgtttgtcgagcgactagctttcacgtgtatttgggtgagtgcgcttttgcagtatccttcgacgatatcagcataattcatgagtccccccactctttttgaatcgacaggaaatgactccggaagccgagattgtcaacgtccgatttactaagtctgtcatcgcttctaaagcggcgttcacctacgccgacgctcaggcaagaatggatgactcgtccaaaaacgacccaatcactcttgggattagactgttgaaccagctagccatcaaactcagagcggcgagaatgaaagcaggagcattgaacttggcttcgcctgaggtgaagagtaagtattcctatactgctctgcaagcatgcagtataatcattcttccgttcgaagttcacgcccccactcacataaaaaaatcattttttaatttcaaaatctgaatcagtcaatcttcaatctcctgagtcttctgacccaatcgatgtggagcagaaagaattgcttgcgacaaactcgctcgttgaagaattcatgttacttgccaactgcagtgtggccgctaaaatcgaggagacgttcccccagacagctgttcttcgacggcatgggtatgtcaaatttccttctttaccacttccgtagcttgatcgtttcgagcgagaacaatgttgactttttcatgatgatataaaagggctcctcccaagacgaattttgagaacctcgatgatctgctcaacaaaacgaggggtatgcaccttgatgcgtctagttcagccgctcttgctaagtctcttgatcactgcgttgttcgtcccttcttttcttccctcaccgcttctcgtgagtccaaaaagcttacagtttgtctcattgggttgacaggtcgagtcagagccggctttcaacacgcttgtgagaatcttggcaacaagatgcatgctttcggccgagtacatctgttccggcagtttctccaaggattcatacatgcattacgggttggcagcacccatctatacccgttcgctctgttctgttctcataatcttcctctcgaacctgatctctcataaagccttgaacttcccctactgtttgtcgttcagatttcacgtctcccattcgacgatacgccgatgtgctagcccatcgacaactctctgctgccatcggttacacccaactacacgcctcactttcttctcagcaatatgtcgagcgtatcatgcacaacatcaacaagcgacatcggatggcccaacaggcaggcagagccagtgtagagttttacgtgggactcgctttgaaggcaagagggatgagagaaggtaaacctgttgaggtcagagaggaggcattcgtgattagggtgttcaggaacggagtagccgtttacgttcacaagtaagcgtcctcttccttcagctctgatttccttgcttctctggtctcgatcgtccattaaagaacgaatgctgatctctgattttcgttcattgcttgatatctcatcgactgaaggttgggtcttgaaggtctcgtcactttcaagaaggaaacccacacgttcgaatctgaagaatacagcatcacccttcctgcgtcatccaaatctacccagacagtcgacggcgcgcccatcaagaagtctttggtgaagaaggaagacgtgaagcttagagtgttcgataaggtagctgtgaacatcacggtcgagaaagacaagaacacacaaagaggaaaggtccagatgtcattggtctggcctgtggattctaaggatctttgagacgcggattcctttccttcctttttcccactcgttagatggaatggtgatctattgtaaatttatattttaaaaaagaaatatcgatgcgagatttggacgctattccgggcaaaatttagattcatatgggaagcaatcatgatgacttgtttcttatttttctattgtacatcaaattttggattcagtccttgggcggaggccgaggaggaagagacgaggtggatgacgaggcggcataagtagaaggtgtggacgaagcggagatcgttttgatcatctctccacctactttcgtggcctcatcgaatcttggcgcaaagaattctgaagtttcccgtgtttcgagagagaaagaaaggagggaaggaagaagtcagtcataaatagcaaggtgaacacagtgggtttttagaaagcaagggaaagaatgaaagaaaacaagaaaaaacccacctcgggttctttcaaatctccttctataagactcccagcttccaaagtcaacacactgactccaccctcttgccgcgatgacaaactcggtatcatcactcctatgggctgtatcgttcaaagccgagttcaacgcgtcgtccaacctgttctggtctctgaaaaggtactcagctacaccaatccacatccggaagacgggtgtagctgccaagtccagatgttgaaatggcctgatccctaacacatgccagcagtcaaccatggccaggagagatagatgagaattccgaggagatgatccagcggctggttggggacctagggaaaattggtcgaggatcttatcggacaacagaatgggcgctcgttcgagcgtggaggatgccgattcagggaaaacggtttgttttgcggccaagattcttcttcgtagttcaggttcgttcccttcgatcatcaacttgaaaagctcagtcgtagaagtagcatattggtttatctggaggcgagccgacgggtttaggatagccagaccggcatagacatgccatttgttggcgtagattcggagagcgatgttgattttgacgatctcaatcccaccgacgtaacgaccagattcccaagggtaggaagcggccgaatgccaagctgtacccatcctgttttgaagcaagccaatcatagatttccagtgagaaactattataccatatgaaaattatcaaaagagatatggtagaaacgaacgaaaggaaagcggcatgtgtcacagcttgggtgttggcagtgacgagatcgtgctcttcgtacgtcatgtagacgtaagaactcttgaagcaagcaaagatttcctcgactagacggagtttggagtctggagctcggtgttgaatgagaatctagaagaaaaaacgagagtacgaaaaaatagagaggaagaggaggtctgatgggaatcagtagcagcctctagaaaagtataaaccgtactggcaagatgactgaccatcggttgaccttccggactgacggttggtccatggagagaatgcatcgagatgatgtggacatcctgaggcaagtgcttctcgaaagcttctttctcaggtgctttgacggatgtctgaccggagacgattgcgcccagcttggttgctgttttaaataaccaagatgaagtcggtgtattccgtttcggtctgttagcgcagaggacatgcgttgagatacacaaagagtgggcgaacagggtccaaactcggcaacaaccttgtccatgaaggcggcttcaacggagtagagcacaaagtcgcatagtctggagacgagatgaccagaggaaaggatggtgagagaagtatctagtcaggagtgaaatcgtgagagacgaggaagaggattagcgcgagagaggaccgagaacgaaagcgaaagaaatcttacctttgaattcctcagtaaggacttcaaacttctctggcagatcgcatgcatagatactgagagagacgtgtcggttgtgttttcatcgaagacgaagcaaccgttgaagagaatatcagatcctgaatggattcacatgagaaagagaacgacgaaagtaagagtttctggaaagaacataccttgtccagccaccggcgagcaacctcctggcatacatcttccccatatcacccatcccgatgattccaatcttaggctgctgtccgtctgcgtgttcctccatggctagagcgacgatactgtgtatgttcttgatgatggtgggtgagcaggcctctagaacgggttgccgaccgggggggggagcatgactctaaggcgtaaccatcaagtgtgagaccctacgcgtaaccacacgcatataccacggttagtcaccgagcactaacccactcaccttcctctctctgcccatctcatctctctggtcaaccacactcacagacatggcatcttcgacttccgtgctcgatcagtaccactcccagaacccaaacgatacgtctaccgtctatccgggagacccaggtgtcgaagacttctctaccaccgggccgggattcgcaggggacaaagcaaacgactttgccggagcaaccggaggtacagaccagttcagcgagacaccaaactcaaagtcgatcgatcagtttgaaaaggaaaatggaggtggagatcagaaaggttggttcaaattttcttgtcctgcatatgtgtgtgtgtgtgtgctatagtgatgatgtcaaagaaagacgaacagaggtgctgaccatgatgtcatcattaggtgctctcaaaaagatcaaggatgctttgcatataaagtagaaaagcaggaggaggaggaatagacagatggaatgatcaacagacacataaattttgtatgaagagtcagcacgtctcagagttcatcagagagaaagaattacatgctgtgaagagcagtcatgtacagcatctcttggtgtatgtgggtgtgctctcaatgtatcggatgatgtatgagtagtatcgactcgagagtacgatgtccgaactccttccatcgtcctccagacaaccaacgaacagatggatcttagatacacagttgagacgatgacccgagagaaaaaccattctagacagatggacatgcaggtgctaaacgagataaacagattgaatcccatcagaagcgagacaaacacctttctttccaacatccacctcattcctcatccagaacatcagagcatcagcggtcgaaactgatctcattcttctctcttgttgtcatcggctctttcctctgctcatgttctatctttctagagtaccgccccggacgacctataccgtgctctctctcttgctcattcctccgatcgttctctctccgctgattgctttgatctctgcgttttctatcttttgcaagtcctctttctctttcagcccctcttctttccgtagctaagaaagcaggaacgtgagaatagacgctctcagagttctagatggtctgatcaactagctgaccgatcgtcgaatgtgttgatatcttcttgaataccctctagtacctctaatcggattcgcgttcgtaccctcgctggtaggatcgctcacaggtcagttcagcgattggcagtttgttcgtttggttgcactttaaagaacattttattctcctgtatctctctctcacaaggaaacgaacatgttcaactgacgctgattcgatttgataatatacatcgtctcggactatgaattacgtatacagtcctggccttcaccctaccagctttcgggtatctccaatttgcacaatcagatcctcctccgagagagagacttcctttcgtctctctccatcctagtgagtcttgaaattcctctgtattttgttctccctcttgaagtgtagccaagatctcgacgcatggtgtttgacgaaattggttttgttatgcgcgcgcattcacttcctgttcctggagcacagaacgcaatgtgatgttaacgttacaggcatttcgatggggttggtacgtattgagtacggcttggacagtattacgacagtggtgcttgcagcaggttatctctatttggaagaggtcgcaaagagtcatttcgtttgtctttgttccttcttcgttcttatcaacgagggcagacatgtactgacgactaggctttcctcagaacccacatccctttcggaaaaggcgagttcttgactgtgtatcatccaaaagacctggcccaatctgcttcttcgagcgccgaagattccacttcagccatcactaccatcactaccaaccctaacctccgccccatcttgctcctccttcccactccgacatccccatttccttcatctgtctatctccctcttctcgcgcttcaccttcgggcgcacctccccttttcaactttaatcatccatccttctaattctggaaaagattcgtatccgcgcacccgtcttcctcaatctgctcgatcaactagacgtattctcagatggataaacgagaatgccgccacatacggaggtgatatcaccaaagtgtatgtgtgtggacagtcgagcggagcggtcgttgctctctgggctggtggttggagagaacagatcatcaaaggcagagaagattgggtctgggagaaatggaaagagggacagatcgggctggatggagatggcgacggggatgaaggattaggaaatggtttgaagagggtcgatctatgggaggaagaggaaaagatggaagaaggcgacactgatgatgagaaaggggccgtcgtaaaagggatgatactgtcagttctgttcaaccgctttgccaaaccaatcatcccctctccgactcacacacatatcgttgcaataggttatcgcccatgacagatattcctcttcaaataagacacgaagccaacttatatgcagaacatgtctcagctaccagacgattctttggaccatcgcaaacggaatcaatgttggcttcacctgctcacattctttttgcagctagaaatgttttgaacgtgggggaaaccggtctgaacacaaggttcttgatcatccatgggtttgtacatcaccttttcgctgtctgctctactccagtttgtatctacaatactgaaaagatcgcgcactcttcatttacaacttgatccttcttttgggaaaaagaggtaaagatgaatgggtacccgttagacagtcagttcttttacgagagctcctcgtaggtttaggcgtgcaagaagtctctttcagagcatataaagctatgggccatcttgatcctcttctaggtccgtcccctttctgtctatagcgtcgcttgcctatctgaagtcttgcgcgttctcgtctcgaagagacgcggctgaacctccatccgttcttggtcgtcatgccgggtttggaaatcgaaaaaagcgctgatgatcggaatcaagaacgattactcaaccactctacttcgagacagttcgctctcctctttgtgttcctattctcatattgtcaatcacaagtcactgatcgtggatcgtttctctgccttggcttccctagtctcgaactttatcgcacctgacggaatcccgtgactttcctttttctttgattatctgtacactcaacatatcgtatatattccctccttttcgtgagcacgcttagagatcatctatctactgaaagatggccgccgttttttgtttcctctctacatccgataatcatattattcccatctctttgacataccaatagattgatgaaaagtttgaaatcaaggaatgcgaagtgtgaaagtaaacataaaagatagatataaggttgtttaacctgattcctcttcatcatcctcttttccctctcttgcccaataatcctcatcgtcttcctcctcctcttcttgttcttcctcttcttgttcttcttcttcaccttcttcctggtcagtctcatcttcctcttccctgtcatcgtgatcaacagtctgaggcttggttagagattgagttttgctcaaattcgtaaacccgaaacgacccgatgcagcacttgttactggtttgggcggttgaagtccttcaaacgtgttcgagaagctccctgcggtgtctaacaacaccggtggagggccgaacgagaatccagacggactagctaacttcgccgaccctgcatgagctccaagttttggcgcactctgatgcgtgctcatccgacccgtccgtcttctcggttcatattctcgtccgggttgtaatggctgaaaatctgtcgaggcaaaggtgccaatgtcctgacccgatggaagcgctgagaaagaggaagtcaacccaagaccaccaatcggaccggctgtcgtcaccggaggcgtgccgacaggggtggaggacagcccaaaagcgggccgaggaggcttgctgggggtttctaggaacgaggacgacgattgaaaagtcgtgtcgggcgagaacgaagagattgatggggatgcactaggggtctcttttggaagagcttcacttggcacctcatgtgacatcgtcccaacaagagatgtctgggttgtcggggctgcgcggcggggcgaaggtagagcttcaaactttacaggcgatcgtacaacgaaaccatcagggataacactggagtttccaacagatgcaatcggaccccctgttcggtcaggaacggaggtaataataggtcctttgttgatagtcaccagtcgtttcttgagttgcagcgctttgctctcggagttcaaggctcgggcagccatagctcctaccttgggagtcggttgggccaccgtggatcgtagaggtgaagatgttaaagaaatattttcgttcaacggggttgattctcggcggcttcgctccgaagcgttcaaacctttgaaagacgagtttttgttggagccagaaagctgcaggacgtgaagtctaagagagagatcttcaatctcgaacgccttctctcgtacggcagcggtgatgttgcgaatagtacgggagatggagtctagcgtaggtgctctaccagatgagagaagagaagaagaaaatcatgagtaaatatgttccttgtagttatgtctaaagcgagaggcaagaaagaccactcacttcatagaagctctgccatttttttcccggattacttcctttcttaagatgtctagatgattctccagttgtccaatccggtctcgcacagtctgtaagtgggaggagaacatcttacatcagcccatagcattaccatatatacctcagaaattgcatcaattacctgggttgtcttccttagcctctgctgattctctagatgttcgggtcccagctgacgaatccggaccatctatagtatatgtacacattcagcaaccagaaacacaacagagaacactggatgaagcgttaaggcatatgagactcgagaactcactttagcaaaatcaggatcatctcgggcgcgaaggaatcgcgcgacttcctcaagcttggtgtcagctacaagatcaacgagatcgaatcaaagtttcgatcaagttacacgtcagtatcaacatgaagacgagtcaaaagatataggttgagattctttcacctttcaaaaggtagctctgaagttcaccgatcgttcgcttcatctcctcactctcatctttcaaagacgacgtgtctttttccttttctttgataagcttgctgaacgacctgatatctcctaacgtccaggttgtttgagattgaagatcaccagctaccggggtgggtgtaccagcttccctctggaaggtggcgtacgcctccgatgtagctttcatctaggatttaaggcaatatcagattcagaaacactattttaactagatctcaagattctagcttagagcttgacactttcaaattaatcacatacctttgcgaaatcagcttccatactctgatacgctctaataaactctccagcaagcccagtctctcgagacaagttcgtatccgaaaccctaggagtaggcgcagaagaccgctgcgggaatgcaggcttaacgatgtccgtctttggtgtagtcgatccattgttaaaggcgttaggcgaaagagtctttgaagtttccgatgctgtcaataaggataccgaggacggcttgggggcttcaatccctctgaaactgagtgtggacccggaaccgaatggtgattcagaagtgcttgatggttttgaggtttcgaatccagcaaacgcgttggaagaagtggaggtagcaggagcggccggtgctttaatcaattcagagccggtgaagggaacaagcgcgccaggtttcgaggaggcagcgctatttgacttgggtactccagattccgcgaacgcattcgaagcagtggtagtcattgaagaagatttagcaccggatccagcaaacatgttcgtagaagttaaaggagcaagggcaggttcggaggtaggcgttgttgacttgaaagaaccgaatccattgaaagccggttcagatggaggagttgtagtagcagatgatctcggggcgccaaagctagcaaacacattagcaggggaagtagaatcagacagtggctttgaaggcccgaatgctgcagatcctcctgcagaggtctcgggattggatgctccgaaaccagcaaaagagaaggaagactgggaattagcaggtttcgtcgatccaagatcagaagccttgctttgcgctacctcccctgcaggcttcgtaccgaaagaaacccctcccgaaggcgctggagtcgtcgtcgtcgtcgtcgtcgtctccgctgatgatactgggttggaaccaaatcctgcaaatttcttagtaccagctggttcagatgcggggccagagccaccaaacttgagagccgatccaaattgtttcgttgtatccttggtcggaacgggtaactgagactgaccaaaaccagcgaacggggaagcaacaggcttagcagactccgatgaagatgggtcttttgtcgcctccgctaccttctccagttcagcttttgcggttgtcgtgtttggctctgatgaagagaatccgagaggagaactgggcttcgaaggggcagacgccactggcttagttccaaacgaaaacggactagcagatgatccctgctcaaccttcggtttgacaggaacaggaatcatactggccggtcttgtaggactatcgggtggggttgtagtcgatgaatctaaagagattggcgggctagcgagaggagaacttttgattggagccgaagtttggaagcctttacctgatgtaaagatggactttgagccgaatggagagggcttctcgaaggaagaggttgacggtgtggagaccgccactggagcaccagaggcggattgagacttctgttcaaaagaagaagtattctcttgggcaggcaaaggaaacattgaaggaacctgttcggtctcctttatctctacatcaggcttctctgaaggttcgaatgttactgtcgaagatgcttttccctctataggtgatgaggcggatgtttccgacgcagacaacgattccttggctccaacatctgcacctgtcttcccttcttctctatcttcagcaacttcctcaatcttgacaacggttgcagtcacctgatgtgcttcgggagcagggggtgatgcagaggaggtgacaggttcaggatcaattggtgtgatgttcgaaacgggttccaaagattcgggtttaaaaaccttcacaactgattctgttgcttgatctccgtcctctatctcgaccctcacaatatcttgtccttcttcctcctcctgcgctctatgttccgtttcgtcctcctcttcctcttcgcctgtatcctgatcctcggcttcgtcttcgtcttcgtccccgtcctcgtcctcctcgtcctcctcctcttcttcttctcctccgtcgtattcttcttcttcttcgtcttcttcaccgtcttctgcaccgtctccattatcctcaagaatgtcttctttgtcatccttcttgactgtcaaccctccaaacatttctgatgtcctgtccttttcccttcctgagttctgtccacccagtcctccaaacgagaatgcggttgatccgaacaagttgtccgatttgcccgctcgaggagccttcttgacgttcaccacttcttcacttccatcttcgtccgagatctcatccagccgagctcctccgtcgtcgtcatcatcttcttctgcttcgtacttacctcttccgaagctcgacccagctccagatccagttccagctctagcaaatgctcctccaaatgcggatgcaacagggcttgatccgcttgacgccggattcttagagccaaaccctgcgaagccacttgtcgttgtggatgaagacgaaccaaatgcgctgggcatagctgaagtctttccaaactttgattccgtaggttcggacgtgatgggcgtaccaaaggctgatgtttgaggttttccaaagactgacgtcgtcgaagatgacgtggccgaagtcggaggagcagtgttggtggatgcaaagacggaaggcttgtttgcagacgatccaaagcctacgaaaccgacacctgctttggggccggagaaactggcgaatgcactccccgaagaaggcgaagaggatgaggtcgagggaagtgtaggcgacccaaaggcagatgtactagctttagaggtcggaggagttccgaatgtagaagatccaaaggagggaggggcgccaaaggtagatactccaaacgctggcttcgacggttgtccgaatgcggagacgacaggactgggagaggcaggagccgcagtagatgtagcggtagcactgggtgtgggactagattacatgtcatcaaatgaactatgcgtcagtcacttgagatcttctttttaaaagcagtaaaatcttagaaagataaaagaaggaaacaaattatctcacgtcgtagaactagtggtgtttatatttgaaaacgcgctaaatccacccgagaatggactagccggtttcttgtcgtccgctgcagcctccttcttgtcgtcttcgtttggcttgacagcgtttccaaaggaagacggcgttccagctccgaaagtagatgtctgtccggaagttctaccagcggagccaaatgtgaaagatgtagaggattcactcgtcgctgtcgtcgtcaatgaaggagaggcggcggctccaaatccgaatccagaggctctcccacttgatccaccaaacgcaccaaatgcagacgaaggcggggctgtgttggaagtagaagaaggggaagcagccgaagatgatccaaatgtggatggctttccaaaggcagactgctgaccgaatgcggacgaaacaggaggagcagaagcggttgtggatccaaacgcaaagggcgtcgttgatgcaccgaacgcagagggcgttgttgatgaaccaaatggagagggcgttgttccaccgaacgctccgaatccagtaggtttaagatcgttagtttgggtcgacgacccagtcgacgaagtagctccattggagccaaagattgaaggagggtttgatgcggaagaagggttggagccaaaggccggtaccggtggctgcgcgcctgatccgaaggcagaggcttgcccgaaggcggacgtactcaacgtcgaaggcgctccaaatggagatggggaagatgacgagccaaaagcagatgacccaaaggccgagccagatgatactgatttcacaggcgcaggcgaagatcccgagaaggcagaggatccaaaagcagagggagtcgacgatgaaccaagaccaaagccggcaaaggcagaggccgcgccggctgtagcggtacttgtggaaggtggggaagctgtaggtgtacctgccattgagacttcacctgtcaccttgcctatagccttggcggcggcagtagtagctgaagagttcagcattccctcataagaacccatttgttgatctacgttccaaagatcccaactggcgagaacaccatcactagtgaaaaccatcagctttggtgccggttcgagatctttcagctcttctcccccctccattcctcgtttgatttttttgtcggaccgaagatcgagagccattcctagaatggctgtatcttcggctgtgttctccgtcatgggaacacctggcctggtcgcctcgtccagattgaggattttccattctccagtggacgtcccttggatgacgcccaactgaggactaggcgaagtgcccaaaaatccgagccagtttccttttcctccccagccagaaaggaaagcagagtacctcataccgggacggtcgatcatgccataagccggagtcggatctgagaatctagtatacttgacctctggcgaagggaatttgatgcgttgaatgatgaatgtctcgtacgaatgttctggttcttccgctgggttcgccgagggaagattgtacacgacaaggaagacgtcgttctcaagccagttgacggaatgtacgtagtagccttcaccctctgccaatccagccggacgttcgattggcgtccccttttcctgaccgtctggcgagaagaaccggagtctagcttgagcgtcgccaaggacaaactgcttgcctttggcactccagcaggcggccgtgtaagcgccctcgagccgagtagactcctgctgagtatcaatgtcaaccaaggaaagaaattctggcagaaggattagtagcaaggacggaaaggctgaagggttggggagaagtgagttgatgggtgatggtagagagggaaatgtctgagtcggctgaggggaggaagcagactgggagcgaatgtcttgaagagaatacaagagaatctgagagctagcggttccgacgaccaagacagtttcctctttagccagtttgagccactaggttgaaacaggtttggaaccattagcagaggaggctactttatcatcgcgatcgagtgagagattggaaggacttacgatcagcctttgaccgaccgtcacgcttttgaatggtgacgcagctaccgttgtagatttgggtgagctgccgagaagggtctccaggtcagatagcaagtacacattgaagcctaggaagagacagaaataagagtatataccaggcgttggatagacgatcagcattcgatgtctatgataatcttgcactcaaagtgagaaggataggaaaccgaactaaccgttggctcctccggctatagccaaattgtatctactgctcgcttcaaacaagttcaggtgaccaggaagggaagtcagatcgattgatggctgaagccttgcatgagtgtcgacgtttggtttccggagagtgagccacttttcagcgagaacgattgaagacagacgagtagagtttgtcagaatgtacgtgtgcacaggaggatgtacgaggttgggaccgcttacggtgatgtcctcctcctccccttcaacctcggaggtgttagaaccctgcatggagagcaaaagagcgagatcttcctgttttgtgtgaaaggtgcccggtagcaagatgcagcgagttaagtcaggtaacagacgctcgcgagagagaaaaggcaaaagacagaaatcttgaacagacagagtctggcagaggttgttttcttctttctttgagacgaggtttgagtcacttacctcctgtgtgaatctgacgaggtcgagggcgacgacgatgacggtgtcgatggaagtaaggatagagaatgaaagaggaaggaaagttgttgaaagatggaggagatggcgtggggcgtcaggcgtcaggaacgtagtaggccaggaacaggaacagatttaggaacgggaataggtacaggcacaaacaaaatattccgtagtcgacctcgcacttctgtagtctcttgggaacgatcgctacaaaaaagaagactaccgacagactttgcgaaggactatgcagaggactatgcggaggactacaagacgactacaaaaaaaacatgatagatttaaatacgacacatcactacagatagactaacaaacgaattacaaaaactatatagcactgactacaaagaaagcactacgatagaaactcgatacaaaggtcgatcttgccgcttgaaagaagccaatatttctgggtcgatcctgatcaagcagctagtggtcacacagaaagcactcccatagaaagattgttctcttcagatctttacatgtataaccacatgtgccaactggtgataaacagcagtcgttcaggctctatacagaccgtggctcctcggccagttgcgctgaaagattgagaacaaccagacgctcatgtatcattcgccatacatcaaccgatatcgtccatgccctctgcatgatctccaccgtgcggctgcccgtatcctctccgagcaagaccaggatcaactagaacataaggactgttacctaaatgctatagacaatcgatatatgaatatgtacccgcctgaataagggtttcatctaagtatggtaaccacttcctgtaaccatcttacacaacccggggcagctcgctctcactcttttacttcctaccgaggccatctttctttacgatcccactcaagacgtatcccaacaccgacaactctatctcccttcatctcgtcgccaccttggtatcctctatagatcactcctttgacttgttcccctggctttactgtaaggccttagtcaacgtgttcatctaggtacgttcggattaggtcctctttcgtccggttgaagtgccgatttttcttttcttttttttttcctttctctcttttttcttttgcttggacctcctgttctattctttccgtcaatgggatctctatattgggttcaccaggtcagaagagacaagtagtgtccaccggatctggtttattttgtggtggagcagcatggagtagatcgagacagaaagcaaacttctctcggctttccggaataagggggacgagcagtagagctcgaccggtccttactcttgccattcattcgtgtcgtccttcggctctgtctatcttgttttcgtcttgatatcctcattggtttactggccggacattccttcgcttcgtctagtcttacaaagtcagctaacgacacctttgtcttttccatcggggtttttctcgtgatacatctagttcaaacgctcctcctctccctcgtttgaacgtccctctttcacgagccttcgtctacagcacacccccctatggccgtcaagagctcacagtcgacgactcagaccccgacgacaggtcatccttcccacccaacgcttttaccgccggcttcgaacgtgccagctgtatcgagcagcacaaagaagaagaagaagaaggctgcaaagaaagctgctcaagcggctgccgccgcctctactcagcaacctctgcatcccaacgctcatcttcaaatctatccggatggacgtctgtctccgcctggagtcgaccatttggacgagtacagcgacgaagaatacgatcatcaccatcatcacccggaagactacgaggacgaagacgagtttgctccattagatcctcaccatcctgggtcagcaggctttccctatcctccggccactggattcacaaagaccgccaatggagccatcgccgctatgggagctgcatttggaggtatgatgagcggcttggactacccggcaagtggacttagttcatcagctcatgctgatcttgtcaatacggccaccgagctttgtaagtattgatcatccattagtactttccttcgatctctgcctttgtgtttcattcctttatggtgctcttctgatcgtgacatatttcgcttgtgtcttacatacttggatgtgtatgttcggtgaacgtgctgaattctgtgcgaatggatgggtttgtgatgcttgtatgattctttggctggaaaatcactatacaaaacggtttgggacgtctatcgaaaaacatgaacagatcgtcgaatggaagatccttcttttggcgaaaccgaggaatactggacgagcctaccctcccatctccgtaatttcattcgaaatgcccttccgatctccccctcctccactggaacattccccccgttcgctcgcccaaacgcttccccaccgaccaacagtctgtcagtcgctgccaatagcaataacactggtactgttggtggtggttctggtcttcccggtcaaccatccacaacctttgcaggagaatcaaggacaaataccaataatgccatgctcgctatggctcaacaaattgtttctgccgcccatgccaatgctcgcaacaacggatccaaccaagtcgctttcgattcgaccagtttggactttgcgctacagcctcagttggatcacgcgttgatgatggaaggtagagcaagagcaggagtgggaatgggtatcccaaattacgctgtcgaaggcgtcatgatgctcaacgacaggggtccagacgattacgacgatgagtaaatatgttctctacccttttttttctctccttgctcctctgttttctcttctgattctcatcattgctcttgtcacaaactgaacaagtagggtggacgagtttgaggaggacgtgtgcacagatgaggatgacgaagatgagcactacagccaacctccgcagcctaatggtgagaccgtatcgacaaagaagaagaacaagaaaaagaagaaaaaagcaggagcgaatagcaataataatggcgaacttggtcaatcactccccggtccaccaacatcagctctccctccgacacctcaatctgcacctgttccgattcatccttcactcgctcgaggtcaagctcaaggtcgaccgcttcatcttcaacaaccttctactctccctcaatctaattctcctctgcctccaacgtcgttgataaaccctcaaccgaactctcaccctcactctcacccccaacaccctcatccacttgctcaacctcttccgcacccactcccatccgccagggcaaaagggaagaaaccaatggcatactcacccgtatcaacccatcagtcgacaggtttgaacggaactgggtcccctgccttctctacaccattgtcagcaacaaatccaggagcagcagcagtcacagcatctggaaactcgccgatgattgctcccgcaagatctgccaaggcagcgggaaaagcaccgtcgaacggtcctccgtcaaatcagatgcacccacatgtccattcaccaagtacgcatggtcaacaacatcattttcaacctcagtttgattctcatagcgcttactcacatgcttattctatccctataggtcctataggctcgacgggtggttctgctctaaacggatccggtggaaaaggagggtcggccggaaaagcaaattcgataggaggcggacaaggaggcggtcagtccaaatcattaccaccggccaaaatatggaatacgaatacaaacgaagagagggaacgtatcaaggatttctggttggctcttggagaagatgagaggagaggattggtcaaggttgagaaagaggcagttttaaggaagatgaaggagcagcagaaacacagttgtggttgtgcagtttgtggtcgaaaacggtgtgtactttctctcatattccttactgcaagacgcgtgaaaaggagttttcccaagaggagagggtaaattcaacagaaactcatcaactttgcacatattgattgccttcagaacggccatcgaggaagaactcgaagtgctgtacgacgcctactacgatgaactcgagcactatgcaaattatcaacagcagtatgccgcttcaggcggtacgcttcctccacctgctggacctggtcctttccctggctctgtcgagctcgacagagatggcgctttgatcagaccggatcatcttgctcctacatcaaaaccgcatcatcaacaacaacagcaacaacaccatcttcatcaacaacagcagcatcagttacagctacaacagcagcaacagcaacaattgcaacagcatcatcatcaacgtaaacaagaatatgaacatcatcatgatgaggatgacgatgaagaagaagacgaggaggaagatgagtatagtgatgagggagtgaatgatgacgaagaagtccgtcatttctgctttctggtcctctttgcacctccccgtattgacctttctctatcgttttcaccgtactttcactttgcaggacgaagatgatgtggatgaagaaaatgaagacgatggtcgacctcacaaactgaaccgtcaggcttcatcgaatcagaaccaacagatccctctacacgaacaggccgattcaggagactttttccggttcggaggccctttgacaaccgttaaaggttagcgcctatttcttccatcttctctctttcgacatacctgtcgtaaaggcggctcacgctgagcttattcgatctttgtctttgtctctgtcttttcttattcaatttgcataccttcctgccctgccttcctttcacgttcgcctcgatctctcccatatatcactacgaacccctcttcttcgcatggttctcgttcttcatttcatgcccaggaggtatccttaccgtcgcggacgacctgcttaagaacgacggccaaaagttcttggagatgatggaacagcttgctgagagacggttgcagcgagaagaagaggccgctctgagtgtagaggaggacgatagtgatctagatgaagatgatgaggacgaagatgaggatgaagaaggcgatgatgatgaggatgaggacgaggatgaagaggttcgttcttgttcttcatcttcgaaactaaaaacctaaggttttttttccttttttttacaaaactgacgcgtttttcaaatatacaaataataattaaggatgatgacgaggtaagctcaatgttctctcattcccctcattggaatctgaattctaactttttatgcttctccttgtgactctcgtcctacagccactatctgacgaacaaaagatggaagaaggtcgtcggatgttccagatctttgctgctcggatgttcgaacaacgtgttcttcaggcatacagagaaaaggtagcacaggaacgtcagcttcaacttcttcgagaacttgaggatgaagaaggcgctgccaaggcaaaggaggagaagaaggcaatggagaaccagaaaaagaaagagaaacgaaggtttgtgtttctttatcttagtttatttgtcttgaaacctcaaatttatttggactaaacaacatggcgacacttgttctctgagtaaatgtagactccagaagctagcgaaagacgaagaaaaagctcgcaaggaagctgcgttaaaagccgaggctgaggctctcaaagcaaagcaagctgctcatgaacgtgaagtcgccaaacgtcgagaagatgaaagagctcgtcgggaggcggaacgaaaagccaaggctgaagaagctgctagaaaagaggaggagaaaaagaaacgacaggccgaagagagggagagagagtttgagcagcagagaaagaagaaggaaaagtacgatttttttctccttactgtgagatttctcactttatgggctgtacttatctgaattgtgatttctctttctctacagagaggagaaggctcggcttgaacgagaggttcgggagaaagagcgaaaggagaaggaagagaaggaacgagccgaggctgcgaagaaagctgctgaggaacgtgcccgtaaagccagagaggaagaagcccgaaaggaggttcttcgaaaagaaaaggaagaacgggaagccaaggaggaggcagaaaggatgttggcgctgaagaaccaagaggctcaacgagcagcgaatgctgccaaaactgctcagttgaaagcccagaaggcttctgccgcccctaccgccgctgcaactggcattgctacttccaccactttagtgcctcccccctcgtcctcttcgagacagacagctccttcacctcgcaaaggaccttcagccaaaccccctcctgtctctacgactcgacagggatcgacgcctggtcctagccgagcttctcctgcccctcagcaggcttcccagcaactgcctcaacaagtcctctcccctcaactccaaccctcggctcaacagcagcaacagcaatccagtatggctcttcctcccagtatgattccccctccagtgcagttctctcggcagatgactatccatcttcaacagcagcaaacgacctatggcggtgtaccgttctcgcttccgcctcaacagcagcagtctgcccagttgaacggtcgatcgataaacggaagcttctctggagtttatggcattcctggttaccctgggtaccctcagtcgactggatctcccatgcaacaccggccttcaggcgtgactgcttctcggccatccccaccaccgtcgtccatggcatcagggggaggtgcaggatcaggcggagcaggaagtgctggctcggcttcgttgaccggcatgttctcagctcaaactcttctgccatcttcgcttaactctgatcctttcgccatttcacctgatcctatcggcggtcgaagaccgtcggtacctcatactcccataggtgtcggattgggatctcacgaccacgtcgcctcgccaggcccttcgcctggcttgcttcgaggaagtgtatcttcgccgatgcctagcttgcacgacttccgagcgattcaaagaccgacgcccatcagtcgaccaaactttgttaatggagatcctctggattcagtggatgaaagcggtccattacattcggggtcgacgtcgaggcgatcaccctcgcctgaagagggtatctttggttcttccgctttgagtccagatgatgagatcgttcctcgacgaccatcgaacgtagctgctgtatggggtgctcccggttcgtccttgacgtcccctcttgggccttcaccatggggttctgcaggtggtcaacaagctggatctgcaaattcgtttgcttctccttctagcgcctccgcttctccaggaatttggtcgtcctcaataggagctgttcgagcgggaagcgtagggaacggagctggtttgagtggttggggcgcagtccctgctggtggtagcccattcggaaccgtaggtggagctaggcagggaacatcttttgcttatggttcatcttcggctgatataaagggactgaattctgttggagggggaggacctcataatcctttctcgcatccttcttcaatcggagcaggcccaggtattggaccaatgggcagagtcgtcaacggctttcctccttttagtccacctcctcagccttcccgataattgagaacctcttttctttctcgtgatcctcaatctttcgactcttaggtgtcttaaatctttcctcttctgtttttctcgccaactctgttgctcttctttctcaaactctgtctatctaatggggcatcctcttctcaaatatcttcgtacttatcgacagactcattcgttctctctgcccaatctcaattcacctatttgtcctttctctacattcatattttttctttttcccttctgcttaggtctttcctcgtttgctctttctctccttgcatgtctacagaggatctcttgtctttccctcatgatattcattttctttttccaccttttcccaaccaaatctgagtatgtttggacaacgattaagcgaaaacacatcatgtcatatttctagaacttgttagagaaacctcatcctctatcgactctaatagaaggaatttgactaaggcagaaaatgaataaagaaagggagaacgccagatttaggcatcctcatcatcttcccagtcttcagaaggagcgaacccaaggtctttacaagcagaagccatgaaaagtaatctatgagctgaatcgaaaaccgataacgtttttgtaagttggtcaattgcctgagtctcttctctctcgagctagtttttttttccgatgaggagagtaaatcagttgccttgacccattagaaggaagaagggagagataaaactaacagagtaagcagcctctttctcttcctcatcccactcggcgcttctctacaaacatgttcacatcctgatgagtctgtcgttctcttgtttccgagaagtcaatgtgatatcaacgtacctccgctctaagttttcttcgatcagagagatcagtcaattggctctcggcggctttctcgaaagacgctttggcttctgagctgacattctcgactcctgccactcggacgcctgcagtgatcaagaatgattatcgagagatagatcagcaatggagttaagatgtgttcaagttcagtatgccacttacagtccgcgaaggatttgctataagatcattagaaaatataacaaaggaaaaatttgagcgccaagtctcaaagagaaataatatcaccaaactcaagaatcagatgcaacatacaagaaaatctgtgtcgaaccgagcgcgcaaacaagtttttatcaacattgatcaaattcacgtaggtacatgaagctcagaacgagaacgggaaaagaactaacggcgagcataggagcatctgactcggtcgagaggcaagttgtcaatttctcaaacacagtctggaggagttgaggcgtgatcgcattcccgatcttggcggttgacatcaggatcgggatgattctataacagccagccccgcaaatttgtatgagccatgaatcttaacgaggaacacaaccggttgaaagtaagacatacgtagcagcgttctctcggacgctctcctcgaagaagaaagtcaaattctttaacgacagacccatcgtctcctccatgtaaggcacaaaatggacacccattcctgatatttgttatccaaaggaataagcaaaagagtagcaacgaggtccaaggtagagcacgagccgaagaagtgaactcacgagaagcgtaaatgaccagaagctcgaaagcctcggctgtctgttcaattgacgatgtcttgattccgatggactgtgacagggtaaaccaaaccggccaagagcctcttcaatctctatccttcttttcttgtcctttgaaacaatttacacgatcagaagtgacgaaaagtcaagtcaaacgaacctgaccgccgatatcaacaacgtcccagttatcccccatctcttcctggttgtcctcctctagagaagaccgtaccgaatgatcttatcatcagttaagaacggacgtaacttgattgatttgaatcaagatgtagatccaacgaaccattgacaacagacagctccgggctaagcgcagccgacttgagaagactaggcatgacgactggtaggtaaggtgcaaagtcctccttaagcgcctcacaaatctttccccaagctatcaattcaaatcataacatgatgggaaaatacatgagtatcgtatttgattccgaaccaacgtgctcagatcagagggaaggaggttccacttactcataattacgtagctgaacgtatcaaatggatcaatgcaccgaggtcttagcagcaatactttaaacggacatctactgagaggtacaaaaaagacacatacgtctgaagaggatcatcatcgtccgtaacaccagctataccaaggagacagaatatcaaatgcaggtgatcagctcgagttccatattgtctgcgagaccagaatattgaaagactaaccttgaatctgcttcaaggcttctgccaactgcagagcatccggtctgaagatctctggtccaacggcgagacctactcaataaaacatcggcatcaatcactgcactgataagataaacggatcggaacgataggagaccaagggaagctctactaaccgataaggccacagcattcaagcactttgcccttgagcatctttccctggagatcgtcagcttccggtgtgggtgctgtaaggaagttgagtaagataggcatgatgttggtatagtactattcacaaaggaacccaggaaaaaagggatgttcagtccttgatcatgtctgcaaacgagaagaaaccctcaccttagcgaaacccatctcagcggcgttggcaacggtggccaaagtagtgaccgcctgctcctgaactcccttggaaccggtctctagcaagcccaacagacccttgacgatatcatcgaggtacgggctgatgacctctgggtcatcaattccgtcgcagaagttgatgagagcagcagcagcgtgagagtagactttaggaagaggatggtggaaggtggatagaaggattcgaaggatatcaaccgggtggagagcttggagatagccctgagtgtacatcgagtatttatcgtaagttcttttggactttgattgagtgattgtcagcgatgtatcgatatcaacgcacctcgaaatcggtacagagctggccgagacagtgcacaagcgcgaaccggactcggggatgagggtcctcaaccattgggcagatcaactccataattttggacaactgaggctgcattactttagccgttccctctgcaatagaagcgatggacctgtcgaaaaatggcgcgcacattattacacaatcgactacagtatgtttctcaaaaacgactttctcaaattgaacaggcgactcacatcagaccggcgtatcgacctttccactcagctcctttgcacaggccttcgacgagatcccaagttccaggcaagaatgtctttcctcccaagccttctgctaacctatccatgcattcctctccccaaacgctccagcttccctctccttcatcagcatcatcatcttcgtcgtccaactgagtaccccactcggcgtcatcacctaatcgggcaagacactgaatggcgactctagctgcgtcgttagcaaagttggggactcgtctgaacacagccggtttgacctcgacgagagagaggagaagctcgaaagctggctgggccgggtggtccgagggaatctcaagtgctggctcatccgcggtgggctgtggtgggtgagagagttgaaggaggaacggaacaagaacgggaagatgaggggtaaataggctgggatacatcgaggcaatcgggatgagagtctgaatggcatcagtttgttgatcctccggaagcgaatggaggagctgagaaagaaaagatcatccaaaggaaagtatggacggtcagactcgagagtgaggaatgaaggcaaacgttcgaaacttggatgcgcacgttgaagactgcaagcataagatctccggaagcctctctgacactgttcgaagtgttttggaggaatgaagacgtccctctgagagcagcaagccgaacttcaagcgactgagggtcgttcaatgcgttttgaaatacacctaggtgaggtatatacgcacgagcgcaaaaatgggacgcaatatacgaaatcaatcaggtcaaatctcgatgaaatcagatcataatgatagccagaccaacctcgaacggccgctggatcctctttctcaatcaaccctggtgcgtcctcccagatcttcagaacgctttccctgacggccgggttttcatttctgatcaagccgccgagtgtggctccgagagttgcccatggttcgtgatccttctcaagcgagaccctggccaagccggcgatggtatctgacagcctgtttcgagtgctcgtctcaggctcaagaggaagcgaggcaaggagagtctcgtacacctgcgcccgaggttccggtccaatcgattggatcagcggtttagacggcgatgggttagtagggctcgctgccggagctttgagtgagagcgttcgaaggagaagcagagtgagtgatcgaagctgaagaaatgtcggaattggaattgaacagggtcaacagacggtatgaagatacgtgatgataaagagtaggctataggaacagacctcggggttgaaggtctggctagttcccatgtgactgagagcgaggagaacgccggacgcgttagcctccatctgagcattcaaggcggtctccgccctatttgagtaacggacagggatggatgatagaggaaagtcaagtgaatggcgacagagcaaggagagtgtatagacatgataccaaacgacagaagcgatgtcagtcctgactcacaacactccgcataatcaagaaaaccaaggaaagcgagaaggaaaaaaaagaaaggcactatacatgtttcgggtgttgttgtcatccacgaaaagatgttcgaggatctgctgaagagcagaaatctgtgcgtccatgttgttgtctatcctacgagctgatcaagagaaaaggaaccaatcgaagagggagagggagaaagaacaactcgttgcgagcagaagatgagttggaggattgggaggtgacgaaaaaattcgagccgagaagtttgactacaaacgctttgtagtggatactacagatggtgtgtagttcagggggtcaatacactttcattaggatacttgagttcagcttcctagtaagctgtagtagaggtgtgtagtttggggggttcatacaaaacactacaacccttccgtaatgggacactacgacgagttgtagtccagtagtcggccggatactaacagaacttttgtaatagaacactacaaagctttctaatacgacagagtaaagccgtgttctctgccgtttcatcttccttccttcaacagacatcatcatcatcgacgacgacgacgtctcattgaacatctcatagatcatctcttaacaactatggcttcttcaagtgcaaatcctgtaggctcctttaatttcacatgtcgtttgatgttgtgtacacatcttacatgtactcattctccggaaactttcgcttttccctcgacaaatcaactcgcctctcattcccgattgtagatccgtaggaagctaggtgagagatgcttctcttcgagtcatcccaatcacatcttgagtgttgatgactgacaagttctctctttacccttcttcattatgattgtccgtgcattctgatgggactctgacatatgcaacctctctaaaccacagtgatcgtcggtaagacttggcttcactttcaacggttctctccatctgttacttagacagatagtatcctagcagagataatgcatgtggatcatactgacaagcttctgtttctctgtttcttttcgaacctgtttcctcgtattgatcccgctcgtggtctgactataggcgacggagcttgcggaaagacatcatgtgcgtcatatcactcttccttttccggtccatgaaagatatcagttcaggctagaatcttgaagactgatactttctttgccctcttcttttctttcctcattttttcgatactcctcaactctttctctctctcttctcaatcctgctgggtttcgtcttctttgtccgtttaccgtcgcgcaaaatatatctgggttgtgcagtgctttgtgtgttctcgctgggagagtttcccaaagaatatgcgagtcctctttcactcaggcttcgttccttccttcctttgtttctctctgctcctctcctcacgaggggcagataacactaacgcatacgcacacataccatgtagctttagaccgaagtagcttgctaacttgagcgcttcttttttccgtttcattcctgcccattctccattcttcccgataggagccgacaatttttgaaaattatgtggcagagattcaacttgatggaaagcctgttcagctcgcactttgggacacagccggtcaggaagaatatgaggttggtcttgggtactttctgctgtcggcctcttcccctctttcatcttttgcaagccaaaaatagagcgcgcgcgcagaagcaaaaagggggaagatactaaagctgacattgctgtggatgacttgtctgtttcacctatccaaagagactccgtccattgagttactcgaaagcacacgttatccttatcgcctttgccatcgacacacccgatagtctggagaacgtgtctgtcaaagttcgtgtctatctgtgtctttgtccatttcaaatgcgtgagtcggtgactcacgttcatctattatccgttctcttcaaccatccaatgggcatgtcagtggattgaagaagtaagaaatatttgtgggttccatataccggtcctgttggtcggatgcagtatgtccctttattttcctcctcacatgaaccagtcactaaaatcgactcatcgactcggttgaccatccctgcttctttataaacatgacttgcctcctgatgtagagagcgacttgagagacaatgctccagaaccagaacgtagtgacccaaaccgatttgttcagacagctgatgttcgttctctttctctctttgtgttctgtccacttgcctcctttcatttgctgatgtcttattcgcgtctttctcttttgttctttttacttgcttctcgcaggctctccggacgcttcaagcgctatctattcgatcgtaccatgaatgttcctctctcgcaaacataggagtggatgacgtattcgaagcagctaccagggtatccatgctcgtcagagacgatccttccggtcctggggcaggcgcaggcgcaggttcaggatcgggttcggccggaggaacagacaggaggagacatgatgataggagggagaaggatggcggatgttgtgtgatcctctagttcttctcttcacttcctgttccctttcctctcaaggtaagaaggaagaactgataaagggagagggaaagattcgataacctcgatatccttaccttcacctttctcgactcatcagatcactactgtaaccgcttgtgtggcctccacccaaaagaaaggaaacctcctaaaatatgtgcctactatacttcacgcatacattaccacatcacgctcggtacatcacaaatgtcttcttcaatacgttaatcacaccattctattccatctcatcgatcctgttttacgacatacgtgaatccttattcacttttacttttccccttctgtcttgatatatttggtcttaatttttcttccttcgtttcaagatatcttttttttttcatttttattctatatcaatcacctttttgtaccagttgaactcacaacttcttttattcttctacattcttcacatccgccgcagtttccatccattgacaaatttctccctctctcttggtcggtggtttccttcggaattctccgaacacgtaccatccctatgcctcctgttgtttttctcgatgtctactcttcagttttgttttatttttcaaagaaaaagacaacatgatgacactgacgaaaaagagatcagatagatatttgagttcaacatttttttaaaaaaaaatacaaaggatgatattttggaaaaattccatacagtgacaagtcaactcggatgtaagaaaagggaaagaggaagaagaggaagaagaggaagaagagaaagacaaaaggcatctacgacgtaggtctggcaacttcttccccgatgacgactccgtcttctcctttctcgatcccctctccggcctgctcagcttctttaatctcatcagccactgcgtcctcgatgatcgcggcctgctgagcttccttaggaggttccacatccgggttggcctgggtgactgctttcctaaccgaagaaaggacgagctctttcaaactggaagcggtggcgatgacaccgtcgttctctttcaacgttctgccgactccaaagtcaaggtctcgtccccagatgtcaccaacccagccgccggcttctttgaccaacagccaaccgcttgcgtggtcccatactttttccacgtattttttcccgccgctgtacgcggtcggcactctcaggtagacctgtccatctcctctagcgagcgctccgtactttgcctgcgagtccattcggacatgctcacctagcccaacgaggtcggcaattgattcgttgatcgaatgtgaagagtgaccggcctcgacggattcgaggatcttcggctttgactcctcggaggctccagggatgggagcggagagagagatcggctggaacgcttgctccgcggcagaaggtgagggggcgagaggaagggtgagggatcgttggaaggacccgtgggaagcagtggcaaggaagagggatcctttagaagtgggtgatgcgatggacgggtacgggaggtttgggcatccaatcaagcctaggataggcttggactcggagacaagtgttagacacacggcgtactgctctcctcgcaagaaacctgtgaaagggaagaacagaacgatacgaagaagagaaagaaagaaaaggaaaggattagaagcaacttgaaagaaaaggcagcgcagaatcagagtaaaggagagatgccctcgactgaccaagagttccgtcaataggatcacaagtccaccacctgccctgtttaccaccttccgagtttcctcggtcgattgcctcaagcaccttatcctcagagagagcatcgagcttctgaccgacctggtcactctcgagtgctagggcctcgttgacgaggttggtgatgctctctcgcatcgaggcagactgggcagaatccgacctgagagaggtggtgtcttcctcgccgattagtggatcggaaggaaagtgaatggaaagcaggtgggcgagaagagcctgagatgcataatcggcgactagtggataagatcagaagggcgaaaccaaccagagagatgaaattatcgtcagggatcgagaattcaagcgccatcgccatccgatagattttcagcctagccaggtttgattttgtatggaaaccatcttgcgatatgccttcgcatgaatcgttccacaaacgatcaaactcaccagtcactggactcttgtcgaccttggtttcggtgtcgtccttcttgattgcgctctgtaccttatgggtgatatggcaggctctgaggacggcctgaacggcgagctgagcctccttctggagatcgttggacgtaggaacaataacggacatttgagacctggagagagaaatcgtacgagctgtcaggaatggctgtcgaacctgacggacagcaagaggcaggaaggatcgaagcatacgatatagatgggtttgatgagatcgagacagtgaagaagagagaaagaggaaaggctggagaaagaaaaaaatggaattcaagatggagaggttgatcgaggaaatccgaatgaagggaccgtgcgagtgacgccatctcttacgtaagcgagtttggtagggttacgggtgaggggcgtgtgtaggggtgtgacctgcttgttacacagccgtcagctatggcttgagatcgttgcgcttgctcaactcatcatccccttccaacgcatcgacttgccaacatgcagtcgtccagcgcatgtatgttcagtatgttgtacgatctatcctttagcgtattgtatcttctcgccattctgccttcgtgcagtgcgtttgacgtctgaagatcatatataagaccggcttcctttgcgtttcaaagctcaaccccctagcctgaatcctttgttattcttttctcttttttcttgtaccctgttccatatcgccctttactcttccatcttggttggtttcctacctcgattctttgttcacaagcgatccagcaagagttctaaacacccctcttgcccggtcacatcccacacctggttactcccaatgtaaccttcctgagacattctagctttgaatgctgacagaacacacgcccaagcacagcttctgacacgcgcccccacgcacgccaacaagtatgacgcgttcggccggcgaacgttaccactggccgtgtaagaaacacgaagcgctcggttctttctggctggtcgatcgatcttgcccccactggaagttgtgtttccttcctaaacccatccatcatctctttcctctgtcaagtatacatccttgtctgatccctacaacactcttgcttgttcatcctcacacaccttatctcgatcaaatatgcctcatctatcttcttcctcggcatcaaagacggcagaagagcccagtgttgtgcccgctggccaacgttcgtcttcatctcttttgccttctgtgtttccttttctctccttccgtctctctctccttcccttccactcttcttcgacgtcttcccactatcgtggattcatctcaatttgtgtctcactaacaccgagatttacttgaactgatttactttatttctgtttttatttcattcaaacattcgacactctactttcctcttctgacccttcgtagaggctggatggtcatcattcatcaagcagtacgtctctccttcactggctcttcctttgttttcttttcttctcttcttttttgtacctgtcagaatagcctcagccatccattatccggactgaacaaagactgatctaatctcgctctccatccttatcattcattcaaaaccaccatcttgtcagactggccaatgtgtccggagatctctcctcgatgactgcaccgcctttcatcctctcccctgtggttcgttcttcaaacacagtagtcatcctgcttaccctatctctagacacatcctaaccgtcttaactcaactttttctttcagtctctcactgagtttcctgcttactggtgtgagcgacctgatctctttgccgctatcgccgacgggcgaactgctgaagatcgatcaaagctcgtgctcaagtggttcatcgtaagtcgtctttgtctcaccccttatcgttcatcgcaatccacttagcgaactgtcttttcgtcacaacaaatgcttcgtttcgctccgagctctcagtgcacgctcaagggtcagtacatgagtcgaaatgaaaaaatgggatctgaaaagaagtaagtgcatgtttagtgataaacgtgctgttttggacggttttatccctgtacataacatcaaaaacaggtactgaacatatggtctactggaatccttctatttggatgtatgcttgcaggcctctcaacccggtgcttggagagtgagttttttctttgtctctttaaagacctggccgagaaagagttcttacctgtttcaactttaccataaatctaggctgtttttcggatcttggcccaacttgaacaaccgaggtgacactcaccttgctgtcgagcaggtctctcaccatcctcctatcaccgcttagtgagtggactctgccttctctgagttgcgacacttcctgttgataccattcaaaccgattccacgcacttcttcagctacattgagaacccccagaagggtgtcagcttggtcggtgcatccggccagaagaccagcttttcgttcccctcgatcgtcgttaagcagaacggacatgccactttgagcgtcaagttgcccgatggtcaggtcgaaaagtacttgattgggctccgttagtcttcattcttcattcgtgctcaccgggttggtattgattagatctctcatccgccttgttgtgtatgtctctcacttatcgcaaaaacctgccagccaagctccgaatcgatggtctgatcaccggatcgccatacattgaaatcactgactcatcctttatccagtcatcatccggatactcgtcccttgtacgttctcttttgactcagtttgatgtcatcttctcctgtttgaccgatgaactcattgagttgctatcagattcactattctggaaagggctacatcactggaaaggctcacacgttcaaggctacgatgtcggaccctaaaggtcatgtccttctgaccgccgagggacagtgggacagtgagctctttcctcatctttcagtcttgctgtttggctcgatcctaagacttttcgatggttgacatcaccccctttgactaccagaaacctccaagctcgcgaagagctccgaagtgttcaccgacgccacggttcccaaggaggaggtctctgttgttgatctcacttatcagggagagtacgagagccgaaagttgtggtctgaggtggctgatggaattcgaacgggtgactttgatcgagccagtcgggccaagactcaaatcgaggtttctcaacgagaactccgaaagactgagcaggctcagggaacagagtgggcgttgagatacttcaaacatacggcttctgatcctgactgtgagtttgtgctctcgtcttgttgggcgactgggcagtggtagaatgcggacgccgagaatcacaactaatcctctgaactgtctttgtttctcattccatcagactctcacctcgctacgctcggaaaggtccagcctagtacggaggagggttgggaattcactggccctttgcctacggccaccggaaagactctctagagtttagaaacctctctttctctctttcgtgtgtgtgtgtgtgtgtacgttctaagctactagtagatttcgatcctctagaaatgggttaaattcgctctctctgctggaaaatttgtgtgctcctgcgctcgtctttcggaacaatacaccatactctcttgactatctacctttactctacctgtgtctactgtctttttcgctctacctattgatcggccgttggatgttgaagctctgtacaacaagtaaatgatgattctcttcaaatcccccatagttttcgatgacgtcagtccataggagccccgggggaagctccttccggcgtttcgaatccccctgactgcgggattcgatttctgggccgattggcgatccggccggcggttcgaaagatttgcttaatcttttttttttcttcttttgctgctccttcgctattctggcatttgtttcagccacaacagaaccgcacgaacggcgagggatcagcgacgtctaggctctaggttcgcgctcaagccagtgcttgagccaggaaggaaggcgagagagcgatgctgttccacatgaactccggctggaatagcgaggtcggggaggaaaacgaggtgggagctggatggatgacgatcgtctaacctcgctcggagcgttttttgaagatagtttttttttcttctcttttttcaatcatataggatgtctgtgcaatcattcttcccaaccactcatcccaaccacccactcacccactccgactcttggtttctcttctttccctctcttctttccctttctctctgtccttttttcttttggtctggatcggtacgtcgctaagttggaatgacgaatagcacaacacatatcggtggtagtagtagtagtagtagtagcagcattagtagaggtagtactcgtccaacagagacgaacaatccatccgccactgacatcgacgataatgataacaacaaagacagcgatggcaacaacaacaacaatgctcggaccaatgacgagaacaactcccatgatcaaaacctcaacgacggcaatgaggaacaagaagaaggaggcagtagaccgagcttaatgaaattcaatatgcattctatacttcagtctcacaattctttacgccgattgccgatacgacgacgaacaaactctaccgctcggtccagagaggaccgaggagccgagggcgatatagatggtgagcatggtagtgcggatgatacgtattccgaaggctacagcgaggaggatgatgataatgatggtggagcagaagcgagaggacgagaaacgaatgcctctttgagttcattggtcagatcactccatgaggagtccggtggagactacttatccgacgatctcgttcgatccgaccgacccgataggaagagatcgaaaaaggcaacaaagaagaggcagagtttgaggaggaatcagagctcgacaaggtctgtcactgtcattccagaagaaatgatgctccctccgagtgacaaggtggaggataacggattaccggtcgttcaagaacgaccgtcctttgctgacaaccgacaagaacagcgccgttccagcgcctcatcagctcgactcgaaactccggctgcttcgagacaggcctcggtcagatcaaacgtgtcaaacacttatcgtccgtctcccccttctgcttctgcctcttcatcaaatcatccccgccgtagcctccacgacagacgtccagaatctgaaaacgacgaacccatcaccaccgctcctccaccgactcatgccgacaccggtcgttcgtggtttcaaacatcttcccatgccaaacattatccccatcataaacatccccatctcgaccgacagaagcttcaacaatccttaccgacaaccatccaagatatcgcccatcatacttttggaacaaccgtccgtcagcccgaagatgaacatttacccaaactccaacaagatctcaaccagccattcatcccttcatcaagctctcaccaccatccaagtcctcttggccgactatggatgaagatcacctctttcgacgcttcagccacctcgggtcatcttccaggtgggaacgctgctagtaaatctccgctcgcggccacgtccggaacggacaacggagcgatgcacagtatagccgctctgatagccacaacaggaaatctcgtaggtatctctagtccaacggtagctaccatcggtccggcgtggtcctacgaggacggagcggagaccgtgcctgggacgggtgggaaacgaagagttgccaggtatggaaggagggaagcggtggcggacgaagcgatgagagcgaatgtgcaggacgatcaaaatcaggtggacgaaagaaggagacgaagaacggaacgagagagaagaaggcaggctcatcatgcacaggaggaaggaaagaagaacccggttgttccactcaagaaaatcgaccctcagtcaagccgaagaaggtctcaggaaagaacctccgagacaaaggacgagaagaattctggaggtcctaccacgagcagagcgcaagatccggagaagaagagccaggctggagattcgaatgataacaaaaagctggacgacctagcagataaaggcactcataacctgctccacaccgaaggggccggtgttcaagcctaccctgccgagtacaatatcggagatgaagatactgtggttccttcaggagatatctcttccgtctcggaaaactcaaactcggatgacaatcgaggagtcaccatcaatagagatgagagagaccttgaaaagggagcgaggaggaggaatacgaagaagaaaaaggggaactacgcaggttggattggaagtaaacgtggagagcgtcttcagcaagagatctttatgtgcgtcttctgttgtgcttctttctgtgctttccgtctcttgatgggaatgtgttgtctagatactgatcctttacttgtcgattagtacggacaaccggagtacagaaacccaatgtagagatttcctcgtcagactagcaaacgccatgatgatctgtaagttatcctcacactacccctctatcgtctcgcatgatctcatcacctttctcttattggtcccatttttcacctacagatggcgctcctagccatcgacttgaaggccatctcgaatcaaccgcaagagtcctcgaaatcgacgcccacttcttctatctgccttcgaacctgatcatgtctttctccaaaccggactcgggctcagataccgctttcttgagagcagccggagctctggacacggagaaactcaagcaagtgcacgcagtcgttagtcccactccctttctattcttctttgttcttccctcctcttttttgacgatcaggggtaaagatgaatccgagcgcatgctgaatatgtctttttggggggcggtcgaacatagtctagaaaagtcttgcatgatgtcatttctgcggcggagggttcgagacaacttaaacagatcactgcctcccgtccacttcatacgacttggatgaggatcttcatcactggggttcgctctctctgttctgtgggagatagactaatacgcggcataggtggctgactttcttatcttgattctttgctcggttatctttttttttttgggaactatagatgtgctcgttctttgcttgctctgctgtttttagcgggtctcttgtgcgtctgttctttctgttcttttaatagactatggttcttgacatacgcttactctaaatcttatctggataacatggtgataggtcgacatgttcgcttccttcatcctaggcagcctcatgggaacatgtcagcttactctagcaagctcgaaccctttgtttttgaattgtttcgaggtgggtccttcattcgcttccttcacatgtggttctagatacatcgttgatagacgttagattctgccttttttttcgcgatgaccaatacaggttgccatggctttcatattgagcttcttcgcaaaagcactctcgtcgacaggatacttctgttataacagcataacatcagcttcgatcgtcatgatcttgccaggtacacatctcttcgtcgtctctgtttttgccatcaagttgtttactgtgctgatgttcgaaattcggttctgggttctattcaggttatgtaatcctcacaggctgtttagaaattgctgtgagtgaatccgcatctctttttgtcttattttagacaagtctgacatgtacgttgaggtgtgttcctcatttagtcccggcttattgttgctggttccattcgcctggtatacggctgtgtattgagtttgttcttgggagtgggaatctcactgggatcgaagttatggaatggtacaactttccgctttccctctcctcttctgtatattcctaactcatctgatttatctatctgctctcgacagtctttcttccttcgcctacggacggcgactcttcgatttcgatcgacggttcattcttttcctcgaacacatctatctccagcccgttcaccaacggcacgttcacgttcacgaactccacctcatcggctagttctggcacagtcacctgttctcgagcagacgatgcaccctggtatttgcagtctattcacccatactattgtaagtcatttttcttgctcttcgacctcctctccctttggatgtttgacctttcccggctgatcggatatgagcgtctgttttctttgtttcggttctggtgtatagtattcatccttcttccatgttttgcgttctccctcgagttgtggacgaaggcgaagatcaggaccagagaggtaagtgtcttgttgcgcgcgctttttctcggcgctttccattgcataaatcttacctcgaactatttgattttatatatatatatatatctctgttctatagactttggtttcatttgtgcttggtgtgtattcgtccactttttcgtgtttttactttataacgatcacgctgttgaaccgccccacatcttgatacatgtttcgtatagcctgcgcttcgttcgccgcttactatttcgctaagcaagggatctcaagtcttcccgaagcatcttcggctattggaggtgccatcgtcggtctaggaggcatcctgtggagtagactcgccagaggaacggcttatacaactcagtcggtcgctatcttgttgctggttcctaatggtctagcagcggctggtgtgagtttgatctatctgtgttgttccgaaagtatgatctctcgtatcgcaaaataaaagaggtctgatcatttttggtcgttcgtttatgaatctagggtttggcgatgtcgagtgtgagtgacggaacaactagtttcgagttgggaactcaggttgcgttgaggcagatagagacctctatcggagcgactatgggactcttccttggttcgttcctttgatctcggtcatttattaaatcattttctcctacttctcctagctgatgattgactttgatttgggattgttccgatttagcttcgctcgtgtcttacgccggcagtagacgaaagcgaggaaacttcttcacctattagcaaaatactacctttttttcttcgtctgcccttttctttctgtattacctcttgtggtgataacttgttacaaccttcacaatcggtttcctgatgatctatcacccttccagagatattcctctttcatctatatatcttgtctcatacctaggattctaacctacttactctcatcctactttcgtcttgccattcttgttgttcatctctttcctctttctaattctaagccacccccgaattagactatacacgaacgatagataccagatttctcctcttagactttatacacatgacttttgtattaccaagctctgacagttatgaaccattcatgtgttgcgctcgactctattggatctaatgtccaaagcagcgaaccaagggactaagataaaacgattaccaccattcaagacgtaaagatagctaggtataatgtgtgaacaagaagatgagatcagatgaagaggacgggtattatatatttgagcaggtctcgtcaccggcagaagactgatgtgagaggttctagataaagatagacactattgaacagaatcgatgagaataatgaatagacagatgatgaaagcaaacgagcggaagatgtttgagagagtacagccagatgcaagagcctttcgccttgaacttatttcgtcttccgcttgatatctccaacatcgagtgtctttgattgaagatctcggatctcttcttcagtcaagattttcttcccgccgagcttcctataaggcatcacatcacgcaaaaacatgttaagaagatcacaacacctaaccaggatgagaaaaagaaatgaggcaagatactaaccgttttttcttctttataggctcaatgtattcgggagatcctggtaatctatccaacgaggtgatacaaacgtaggcaacagttaaggtcatcatgtttaggaagcttcttatcgtaggataagcaaatcagctagactcactctgatggcaggccaagatgctgctgctgctgctttggactaggcaactgaacgtcatccgcagatagtaccgtctcttcccctccctcttcctccccttcatcttcagagaaaataattttcttcgatcgtttaaggggacttgagcgcacagcagggctggttgaagaagcgcgcgggtttccacgagttgatttgagaggagtcgtatctggtgatgaaattgctggaacatcggcttcggcgaacgaagagtcatactcctcttcttcctcttcttcctcttcttcctcctctagctcagaaagatcgctctcttcggatggctgactggtggttttggaatcatcaagcttgatagatgcgagtgaaatctagaacaaatctgatatcagtttccatatacacgtttcctctgatatggatacgcacgtacttcgcctacatctgccgatctgtttttcgaatcaacctcatcatcatcatcatcgttgtcatcatccagagtcccaaaattcggtgcagaagggatcttcttgcctagtataatccctccggagagggcaggtgtaggcgagtcagggtcagatagagcatcctcaaggaaactcgaaccatcgtgagcctatgatatgaagaagactagttagggtgcagaacttcgtggcgtgagacaaagagttacaagtatgaagcgctgaccattgagtcttctagttcagagtcttcagactcttggtcgtcttctgtctccggggtagcaaatcgttgaactcgaggtttcatcactgatcgctgaacgatatcaatctgcttgttcttgagaatctcgttgttcgtggtctgtttgatcgagatcagcgcccacattcataccaaccagaggaacaagacggcgccaggtgaacacttacaccctgcattaatcgttgggcaaacattcgctccatatccgatattcgcttctgcatatccttagcaagctcgtcccgcgtttctgtctcaatcgaggcgcatcggagctccagctcaaacacctgtttcaccgccagacacgcatagaaatgcccagataggatcaaagacagaatcatctagacaagagagacaaagacttaccttgacacggaggtccttgatgacatcgaaaagatgctccaccaacgcatctggttcgtcttcatcatcggtctcttcctcctgctcctcgtcttcctcctctatctgttcttcctcgatcattgcaatcggctcaatgagctcttcctctgcgagacatccaagccatccgacaaatcagcatctgtccacacgcgaggctacgaggctcaccgctatcggctaaaagaggaccagctagccacagcctgtctatagacataccttctgcaacatccatcaagccctgctcgacttctttctcctccggtggtatctctgtgatcaactcctccaccgcctcctcttcggttttgaccctcactctttcgctcgatttttctctttctctctccttctccttttctctcatctctgccactctagctgcgcccattgggccagagataggtactgccaatacccgtccggaaacagtagacggtttctgtgtttgtcccacactagatatccgtgttgtcgatgatctcactgaccctcgtccagtcgattcggctgtgtttgaagatgaaagcgtcgaagaaagtgttggttgagtgaagcttgggatggccggtctcaatcggttcggggctggactggacaacgaagaagatgggaatccgtcaagtttcttcaaggtgaaacgatgaccggccgagtgggtgatcgttcctacgtcccgggcgacggcagaaaacttcatgacgttgatgttttcttcgaatccagtgtcgaaaggattgacgtggatcatcatgacctggataaagtcaatgaagacaactaatcagtatctctgcacgatcgagagagaagagcagaagtcggttgccaggtggacggagaagacaaaccgctcgaccgtctccagcaaagtagttctgaaacatctcagtcaactttgaatgtctaaaaggaaccattgccggtttccgacccgaagcaatcctttgttggttagaatgcaagacctccatacattgtcccaagacctatataatcaacggcatggtctatatcagcttgtattcaatcctttgttggtgatgaaagcattctgatgaacaagaacaaagatgcgcgataagaaaaggaagacttaccatgagagacttgttgatgtttccagcctctttcagccggtcacctgagaagaacaaatttcgcaaaaccatcgtatcagactctgctcgaatgatttgcccttgctggacggcaaaggacagaaaacgaataggtacctacccgtattccctgtgtttttagttcgttcactaccggcaagatcgacaatcgataatcgagcggtctgcatactgctcgtatcctatatggttgcaaaaagcgaatacattttgaacagcccgatctcagatccgaatgagtggcttggatgatatgaggtgataaaaaggacatactaggggcgcgccgttgtggattcgaatcagcttgatggtgaacacgccgtgtgatcgggaagaaacagagttggctagggtgccaaacacctgtcggttaatctgtccttgggtgatgatctcttgggcttcctgatggtcaagattctcccggtcagagatgttagcattcattgaatagagccagcttgccaaaggattaaaagcagcggctgagagaaagacaacgaagccgtacctctcgacttcggactctgatctctcgcatccccgatacgtactttcctcccccttcggagtcgctctttagacccagcgccttccgttttactccggctaggtacatcgagctgtgagattcggcaattcctggatgtgttcgtggaatggttgatgtgctgggttgagggtcttctagaagatcgtatatctgtacgactcggtcgatgtacgtcagagcgctcggtagaagctcagtctaaccgatttcaccagagcagcttgaatgaagtggaaagacagaccttttcgttatagatctcacagtaggagatgaatacggcatatgtgaagtttctgtcgatctttaatgctacagatcatctgacgtgagtctcggatacacaaaaggaaagcaagtgatgaagagtttcgaggccacctacttgtatcatcaccctcctctgcgttcgaacccgctcgatcatcctttaataaatcttctacttggccttcttccagttctaccccacctagcatactcggtctgagcttggtcttgctctgcgcgccatctatagagttgaacacaacgtctaatgtgcgtgggacgacacctctggccgagggagtgccttgaatagtatatctatgtcgagattgattaacggacgaggacatcagcatccgtacatgtaccatgtttctactgttgacttccctcggaatgaccaagatctacgaacgatttgccagaattagtcactccgtatgcgaacaccaagccattctctccgttcagtaaattctagaatggttcacacataaaccgatagtataggcaggatgagcaaactagaattctgaccaaggctctgataaggagactcacctgaaccagaggcagcgcagtcgctttaaagtactcttgttggccaacctcgggttggaagacccgggtgaacgtatacgcctgagcgggcttaggcatgatatgcatcctggagagatcctgtgaatgaagaaaggaaagaaggagagtattttaagaattgggtattggtttttttgttctttctctttaatcaaagaagaatgaagaattttgacgagtggatacaaacttgaggagcagtcatgatgacctcgttatcactcgttgtcgacagatagggaactgcggtatcgatcgctccatctggagcaggtcggatcctcagaaatgactgtttaatggatggacgtcaagcgcattcagtgactctgtcatctccaggaggcagatgaggttggaaacacaccttgatcttctcgagatctccatccttcagagaggccgtgccagcactggatgaatgaactccaagcctactaagagcgggcgccatctttcggactgacgcattggctgcggtgagaaacttggaagccatagaaggtttcgaaggagtagacgacatagtgaaggtggaggatgaggatacctggcgaggtaggtggccgaacgagggctggagcaagagattgcagcaaggtgagttgagagacgagccagggcacgcatgcacatgatacacagaccgaaagcacccgggtgcttacctctacttttttctctgaaccaacggtcgtcgcctgcctgctaccccaaggagctctgcctctgatcgatgctgtcggcgtaggaggaggtttcccggccgacgaaggaacgaccgatgccttcctagaggaagcaccaccggcggtagcagttgttttcatggtcgaaccggacggtgcggcagttgtcctcgaaccggccaagggcggttgctgtctaagcctggacgaggacctagtctggacgggtgtctgtcctgtgggtgccatctgtgtgtgagtgtgtgtgtctgtgtgtgaacaagcgacgaggaagaagaaagacggtatggatgatgggagtcccaagggaagaagaagaacgcgtgaaatcaaacgcgtccggggggaaacaaaataaaataaaataaaaatcctcattaaactcggccgtcaccttccatcgtcgtcttgatcgtccatccccatcgtgttgctctccatcatccactcgcttgcttagacacacacaagatggccaccaagcaggcgcagaaacaggcgatctctcttaaggggtcaacgaagattgtcaccgagttctttgattattccgtcgtttgttccccccggtttccttcgcagttcatctctcggtctgcctcggtttacactgacgcacatcgatcttagaataacattctctatcagcgagggatatatccatcagatgactttaagatggttaaaaagtcagtggtcccttgatctatagggtccctattcttgttcactcacaccatggctctcaggtatggactccctatgttgatgacgacggacgacaatgtcaaagcgtatctcgcttcgataacagaacaagttcatggtcagccgggtgttctttctttctttctttcttcctttcttcctctctctcttacgcaactcctcttgctgacaaagaagtcttgttctgaatttgctgtcctcttgataaacatcagcctggctgatgtctggtcagatcactagactcgttctggccatcatatctaaagacacccgggagactctggaacggtggcagttcgatgtcaagatggatgcctcctcgaccgaaccgaaccctagcgattcattcatgttggtctttcccgtctggttttcgctttcgtcttcgttttcttttccccttgtgaccgcgtcctcgtagctaaacatatgctgatgttgatgatatcatttctctcgtctggctcgtgtcgaacagaccagccggttcaggacagggatcgaaaccgaaaacggagaaacaggtccaggcagagatcagagagatcatgaaacaaatcacctcctccgtcacgttcttgcccatgctggacgagccctgtatgtcgccgtcgctccgtctgctcctccactttctctctttatgtgtgtgtgtgtgtgtgggcttatgatggactaacgtcctgtcccacacccatgcgtgcgtatccaaaaggcacattcaacattctagcatacacttctctcgacacggacggttccaccccgctaccgacacccgagaaatgggtcgagtcggacgcacacctaatcgacgctgcaaaggtcgaacaagtcagactgaggagtttctcgacaaacgttcacaagttggaagctatggttgcctataagctggattgatcacaaagcttcatctatctttcctcgtctgttctcgtttgctcgatgttataccctcccaattctctctgtcgggatctcggaatgtgtcattgggaaagacttccccattggttctcgagttttcttttcttttcttgcggtaaaaggaaaaggaaacaatccattagggaaattcaagagaaagaataataggaagaaaattgccaacagactactgaattgactaactaagagctacctagctaacgaaaagagagaaagaagagaactatacacatgcgcgcatgatgcacacacacacatatacgggagaagaggagtatacagtcgacaacggcccgaaggccacagagagagagagagatgaactggaagaactaccgaatgaagaaagagggagaaaaacagaacacgaaagatagagggggggaaagaaggagatggtataagaagtttcaactcttgacgaaacttcgacagtgaggaagaaacctgccgaggacagagatagaggagcagagaaaagaaagagaagggagaaacaggtccggcaccggggctacccgcacgtacacgagacgaaaagaagagaagaccaaaagaaggatcaacgtctaatcactagcctcctcgtcgctgtcctcctcgtcgtcatcttcctcctcggaagcaggctcaggggccttggcggccttcttcggggcggcaactgccttcttggaggcggacttctttgatgaacccgctttggctccaccgccgttcgactcgtactcggccttggcggattcgtatcgagccttgtcagcctcggccttcttgacgtacggctgaggaaggaaaggttggaacacagtcgcgctgtcagaagacttgcataggtttcaaggagaacataaaggcagaagagaagggtgtaccgaccttcttgtcctcctcagagagggtcttccactgagcacccaaaatctttccgagctcacctagagcgatagaaaaacatgtagacaagatcagaaacaatcgtctttgagatggaagagaaggaaaagatgactcaccaaaggtggcttcggggttagcagccttgatggcctctcggttggactgggagaagatcatgtatgacgaaagtcctctgtagggagggagagacaaaggacaaagaatgcaaaaagtccgatcagccgacgtgagcttcatgtgcgtcaacagaggtatatgggatgtgtttaaagatgaacactaaccgcttgggtgcgtccttgtccttcttggctcgagccttcttctccttgggctcaggcgcggacttggcggctgatgagaaagaaacggaaacggtaaaggaaaaggaaaaggaaaaggaaaaggaagacgggttgaggacatgggtatatgcgcgagaaacagggatagaaaacagacgaacccttgggcttggactctttggcgatcttctctttgacgtctttgggcatctggagggttgggtggtggggagagggagaaggagaggacgaaaggagagaaggaagggaagaagaaaaacggtggttgagaaaagcagaaagaaagagtcagtcaacaatatctcggatcgtgtttgttgagcgagacgcgaaagagaaggaaggacgcgtttccctgggaaccagacatgctaaaaggaagaaagaaggaaaggagaagagaagaaagaaaaagaaatcgtcggacagacgcaaagatgacggccggtcatccaacatggaaattcggacgacacgacgcgtcgaaagagatgacagggaaaaaaagaaagacgcgtcgagaaggaaagaccgaagggtcggacgaatcgcgtggaaaaaaagaggcaggaaaagcatgtgtgtgactgaacggaagggatcccaggtcttttctctctctcttctccctcccagaaggaaaagaaacgagaaggacacgtatgaaccacagaaacgccgctcgacgcgtcggagggacacagcctaagagaagacagcacgaaccgaccatcaaaccggctcgagagatgggacgacggacgaggcaggttttttctattctttttttatttcaagacagaacgatgaagagaaagagaagaaagaaaaagaagcaagagaaagaacagacgagagtgacgaatggatggatggttggacggatgaaaggatggatggatggtactcactatgaaacgcgtgtgtgtatgtggtgagcgtaggtgtgcggtgtgtgtatgtgggtgtgagtgtgtggggtgtgtgtgatgggtagtcttttagaagcaggggggaaaagggaagaaaaagacaaggcgaagaaaagcctggctggcttatttgcccttgtctgagggaatttgcctagggaaaagagcaaatccggtcacgcccgttccgccggttacctaagcgatcgtgtgggaggcgcgtgtggcgcgtgtcaagggcgcgtcactcaacatccacgcgcccaacacactctctatctgtccatctatctatctatccagctatctagctatcttctttccctcctctttctttgttctgatcttcttcttcttctatttttcctttcctcttcttttcttttcctctttccctaggcctttcccctcctctccttctaccccataaatacaaaccacagttctactccatccaaccgccaccgccttcctcgtcatccgtcaagtcctcttctaccatccccggtcgatatcccggcttgcggtcccacgtctttccgtcagagtccggtaacgtcctcaacggaagtgcaagcacataccacgggctgaacccccatttcgtcacgtcagctgagataccttgcacgcgcgcgcacacacacacacacacgcaaggaagaaggataccacaaagtgtgatctgtactcactactctccctcaccaacccggaaaaatcgttcgagattccttctcgatccaaggtcatacttgttttcccatctgacccctcgctctctggcccgattggcatagtacgcgttatcgtgcccttccaccgtggtttcgccatgaacgatctgaaggacatgccagccagccatcacgccaacggccaacccaagcgctaaagccaaagcccagaccaaggtgaatgcgatccgaggcgacacgtacggccactgtaaagggtgtgttcgatgggaaaggcgggagaaagggaaaggaaatcgaatcggtcagtctacgatcagaaacatacacacctgagatcccattctcaattcacgcaccggaaaggaaaggttcatcgacggaaggaatagatgccagcccgtgatggtgaacatggccgagcccaacacgaggtaaaccctttttttttcgaaaggtgtcacgacaagagctttctatgtaagtctccaaattaatcacagcatacgctcagagtagaacgcacatgaacaagataaaatgggtctcatttcgcaagccaatacattggttgacccctgagtgaacggagaaagagaggataccatgtcaatcagatgtcagtttagttgattgccaatccaaagtcatacacaactcacatgggcacttgggtgatacaaaccaaaccaaaccaaaccaaaccaaaccaaaccaaaccaaagcccacacacacacacacacacacacacacatatatgtaacggatcaaacatggttcaagctactgcaaacaagacgagaaggcaagaagaagcgtacgtgatggtcgaactttagaatacaagttttgcatatcgagcagtggtgtgtccgcttggagatcgatttgattacgaaagaccgctggtcagtctcttctgtttcctatcttgtttcgcttcatttatcgagcaggcttacctctggcttggctcctccacactttcggcattttcggaaccttggtgtaggctctcgtgagcggtctgctccggtaggaactcggacctcgccttctgtctggccatctccttcttctctcagacatgcctcgacctgttcggcctcgtctgtcggttggcttgcggatctaatcgttcctgtaggcctggtcctatctaccttccgagtagcccagggccatttcccggctcgttcggtccctctccacagtccatcctgaggtgttccaggcggaacagtacagattagatagtagtgaccgtacatgttgatcgctatcagaccggagagaacggaggaaacgtagtagattgctggatggacggatgaatgtatcgatggtagaacaacctcgactatttatttatttttggcccaaaagtaagtaaagatgtttcgggaaagatatagaggagaggagaggagaggagaggaagaaaagaagattcggtcgtcaagaactcagatgagtgtctatgtacggtaagaattcgaagaaggagaaggagaaaaagtagtctgatggaaagttccaaagtaaacagataagggctcacagaacatgaaacctccagaccccatcataaggatggcaagagcgatgaagacagggccggccgctccagtcagccagtttgcgaacctaaggaagagaagcaagcgtacacgacggacagtcagcacatcacccactctgatatcgagtaaaaccagatcacacagaccactcgagacatttaaagcatctgaacactcgaggtgcacatccagcgcatggtctagccataagtcgattggtacgagagagaatgaatgtatatggccaacacagcaagcgagctagcctactgatctcttccttggccaagatccagaagactggataggttaattgattgaacgggagagtgcaagacattaaccctaacaaggggtgagtacctgaactaaccagcgtgctgccaagacacgtgatatatggctgtacgaaaaagtccgagaacctgaaagaacatccgagaacgtcggaggatgccgatgcggatgccgcgcacggacattgggaaacacgagcggagcgaccgaggggcgaccagggggggggacggaggagtgtgtgaggaggagtaggactgaggagtgtgtgtgcgaacggggcctggtgtgtaagccccagggacggctcaggcgcttcccaggcactttcaggggcacccaggcacggagatatgaaatcaacgatcgacccaactgataaggaaatttgcaaatcgccctgatctcgttcctgactgcgcagtttttctttcccgtcccttttttcccatattttatgtttgccctgccatcttttttcctcttcctccctttttctctttctccaccatcttcatccttcccatcccatctcatctatctcccatctcaccttctcctccacatcttccatcaaccatgtccaacatcgcccgagagcccgagttcgagcaggtgagatcgtcgtcttgatatgccctttctcggatgatttggtttccagaaaggagttggaatccatacacgccaaggggttttttcaaaagaaaagagagaaggaaaaccctacaacagatgctgataggctttttttcttgtgtatcttcttccatctatataggcccttaacgagcttacctccaccctcgctcctgtaagtctcccttgcatttctcctctcaacacgcccgtcttgtcccgacactgatcaatcacaattctcccttcccagttcctcgcccagaaccccgagtacaagaaggccctcgaggttgtccaggtaagatcgcgcgccgtcatgtatcggtccgctgtcgagggtgcaagggactcatccggctgaatcctccgtacagatccctgagcgaatcatccagttccgagtcctctgggaggatgacgagggaaacgttcacgccaaccgaggtttccgagttcaggtaaagtcgcatctctttgctccttatcagtacggagaattgaaatctcatcaaacatacaaatcctattttctgcccatctcattcagttcaactccgctttgggaccttacaagggaggtctccgacttcacccttccgttaacctttccatcctcaagttgtaagtcctttgcatcatgctgtgccactcctcaactctttatccagaaagcgatcgtcttatctaacgttttcctttcgtctcgcttctctcgtagcttggggttcgagcagatcttcaagaacgctcttaccggtctcatgatgggaggaggaaagggaggatctgacttcgatcccaagggacgatccgactctgagatccgacgattctgccagagcttcatggccgagctttctcgacacatcggacccttgaccgatgttcccgctggagatatcggagttggaggacgagaggttggtttccttttcggagcctacaagaagcaccgaaacgagttctccggtatccttaccggtaagggactcgacttcggaggatcccacatccgacccgaggccaccggttacggtcttgtctactacgtcagctggatgatcaagcacgctgagggatcctctgccggctggactggtaagaaggttcttatctctggatctggaaacgtcgcccagtacgccgccctcaaggtcatcgagctcggaggtgttgtcctcaccctttccgactccaagggagcccttctctccacctccgccgagggtttcacccctgatgacatcgccgccatcggtgctctcaagctcaagcacaagaccctcaaggacttccttgattcttccaacggaaagttcacctaccacgccggtgcccgaccctggaccttggtcgagaaggccgatgtcgccttgcccagtgcgacccagaacgaggtttccgaggaggaggccaaggctttgctcaaggccggtgtcaagtacattgccgagggatccaacatgggttgcacccaggaggctatcgacgtcttcgaggccagccgagccgccgccaaggtcgcttctgaagcctgttggttgggacctgccaaggccgccaacgctggtggtgtcgccgtgtctggattggagatgtcccagaactctgcccgaatccagtggacccgggaggaggtcgatgagaagttgtcgaccatcatggagaactgctacaacgactgcttcaacaccgccaggaagtacgccgaggacaagaacgctcttcttccgtctcttgtcgctggtgccaacactgccggtttcatcaaggttgccgacgccatgaaggcccagggtgactggtggtaaattaccccgcctctctcacattcttccccctccccttccgcccttctctgccttctttgatcatctcaatcctactgtaatctttttcctttaaaattcgagatttgtatccccatcgctcgtgtggtttgccctgctatcttttcctctccccccttatattcagtgctctccctcttggcctcttttgtttctcatatgtcttgggttctccttcctctgctggcttatcttatatcgtctacgacatgatgatcttctttcgccattttctttcccccttgaacaacggctcttgcgcgagcttgcccacatgcaaatgcaaacatatatcatttgatcatgatcataaacataaagagaaacacgatacagcaagcaggggcatgggcatacacaacaagcgttatcaaccagaaagaaacaagtatatcctatccgcgctcttcaaatagtcacattctccgtgaagaatttctcccattcggccttcccgaaggaggaagaaacagagttgtcgatcagaccatcaaacaacgccgtcggctagatattttaaggttacagagttcacaaagatagataagcaatcagaccgagtacaaaggaaaaaaaggagataggacaggtaaaacggagaaaggagaaaacgaactgtgacgtggattccgttttgtctaccgattttgactgttcgagtccaagcaagaaaaggggggagagacggatgccagattcagtacttgaaacaaacaggacataattcgtgaccttattcttggaagaaagacgatcttgatatggtaggattccagcacagaggaagattgagccagaggaaagtaagaacaaactgttatatttcagatcatcagtcacgctgactcctccgttaggagtcgtcttgggggtgatcagctcgagtatctgggacttctgagacgggttcgacaagactttgccagcgactttttaccatcggttcatatgccatagaccagaagaagaagaaaaagaagaagaagaagaagaagaagaagaagaacatcaacaccatagatgatgaggttgcgagagaaacaaaaagagggaaggaagaagacgaacgatcctgaagtttctctctgatctggacaacagtcaatccgctactcggtatatcaaagaacgccgtttggttctcgaacaaaaacgtcgtgtactcccaaaacttcgtcggctcaactttaccaaacgccagagctgactcatgcaagtacgtagatgaaccatgcctataggttgtgcgcgggttagtatctgatcaagtgcgatgaagaggagggaagaacgaaccagggttgaggttgaagtcttatgatcagttgaactttcgattcatacttccctccttggttgatcactaagtatagcctcgcccaatcaaatccagtcggtagatcgatgagcctttcatatcgtctgatcgttgcatcgagaatggagaatagagatagaaattgaactagacgtacagggcaaaacgttctcatctagggatttgacgatctttgccgagaacggacagagataatcaatccagacctcaagcgtatgaggagatgatggcgagccgattcggaggaaagaaagggaaggtttaagagacatgttggagcgttatcgatactgttgcttgacggaaaggatgatggttattataagagattgaaaaaaactaagagaaggtgagtatataatcaaaatgatgacagaacgcgcaacgcaaacgtcatctgataagacaagctgagaaaccctcggggatatcattcttgacaaagaacacacgataggacagaggtggttcatcaagaattcttctctcgcagagaagattggaaaagacatacaagaagcgaaacacagatataggaagggaataccatgaggaagagtcaaaggatgactacgggcataggcgagcaaggaaaaagaacaggagagcgaattcaagattatgtacaggactacagcgcagagcggaaaagcatggggttgttgggcgaggccatctagtgagagcttcctggatatcgagatgtgtagagcgtcgaggctaatggcgaagtaaagaggagagaaagaggaagaaagagaagataatggttggatctgagtgcacacagtgtacaatcattctattagataaaagatgaaaaaaaaggggaaatatacatggttattggacaggttaaacagttttgggctgaaggttaagggtaaagtcagatgtagcgatgatagcgctgtttgtatccttaggaatctccgggtctcgagcgatcgcactaagttcgacaacatcatcagttcaaactgtcacagtatttctataaaacaagaggaaaagaaagaagaaaaaaaaaactgacagatctcggatccgatcaatcaaacgcaatctgtttctccaactggtagtattctcgaatccctggatgaccattttgtagttcttgcagatcatatccgccatctgcgcgagcaaccgaatgaacgaaggcaacgccgtagccgagacgatcttgaactgaccgactgggccaaactctgggagaccttcgacccgttgtatggtcaccttaaagaagttgtgctcatctgggttgtcgtgcgttctggatgttccagccgagtgaggagagatgacgatattgcaaaactggaaatccgttttgagagtatcaaacgcatagtcctggccggaatcattgaataccactcggacatggtcgtttccgatcggagccgacttgttcaggtacggtcggtcgccctcgttcaatggcaagtttggcatcaacgtcgctacatggaaggcgaggatcgcaaggtcatcccaccaggcgtaagtgtatgttccgtggatagcttcatccgaggtatccaaccctgttggaatatccttctgatctcggagcttgacaactcggccgagccgatggaggaacctagtgtagttctcggaaccatcaacattactcagtatctcctcttgtttcgtttgaccagcgccaacgtagaggacggcgacctgttgaatatccaccggtggattgtttacatccatatttttaattgttcggagagacccagcgtccgtaacgagtcgagcagaattcgacatgtttgtgggctcaagagggtaaacacagaattgggaagctacaaagctagggtccacccagacttctttccttctctgcgaaggcaccactcctgaccacacgaagtccggatcagccgatttcgggttcgaaggcgccactggtgtagtaagtacagcttgagagatctcttcacggcatgcggtctaaaccataagtaaggaagaagtttgaatatggttagcagcacatcgagagcaatgacgagagcagcaagagaatatggtctcacggtctcttcgccctgatcatcactctccgaccttgggttttggtcaccaaccaatacagccgccaacgatactagatctgctccatcgttccctagtccgatgaacggcacattctccaacttggccactatagaagtcgatcctgaaggacggatcgtgtcaatcttgcaccatcctgacaacttgtcagtcgtgaccttaatgatcgatgtcccaattacccaactcttctcatcgtaatgacttgggtccttatccaaatcaggcaggacaagatcgcccaagaacgacggggccggcttaggatcggcattggcgtacgcataacgatgaaggaaatctacgcagacctcagaccgtttgtccgtgtcttggggcgatcgtttcgcctgcatgagcttttttgtaatgaatggaatgaaccggggtcgctgtgatgccggaaggaagaggaaccaagagtaaatgatcaaatatgccagctgcagcatgtgctgagacaaaaccgctgccgtccgttgagcggctgtcgcatccgcccctggaggcacagtaaccgactcgtgatgggtggtgatgatgttcagaataacagcaaacacaagctcgtactgctgaggcgtaaagtttgagtataactttggtttgtagctcacacaatagagaaactcgagaatgtggatactgagggatacattcgacgttagagcagacaaggtggagagaatgcttgggagctcctttgccaggggaaggacaagctcatcgattgccatggtgagcgcgtggatgcaagcttttccggtcgattcagtcgacccagtggcagataccccggtatggaacgcccggatcaaggctgaatgctgctgagagccaaactgtcgatgataactaataagaacatcgagagactgataggctactgcccgtaggtccgccttcctaacgccaatcggtaggtttttgctgattggcagactcccaccaggacctaaccatccacaaagaccatcgagaagcctgccgagctgctcctttgctctaggaccacagaaaaagtgttggttcgatagctgtgccgggaagtaacaaagcaggtaggacaccaactcccactctcgttcatcattcaggatctctatcaataccttcaaatattctgaaacgggcaaccagattcccctagggattaaagattgattccctgtaccgaccacgaatgctcgttgtggatcgaatgtgttgagcccgaagcttccaattgacatgttggacaactcgaacgccaatgattccccaaagaaccaaagtggattttggataatatctctggatgatcccatttctggcaatctagaccgactcctacttgcattgcccggtcggctacgatctcgatctcgcgtagggttccttccgcgttccattcggtcgttcgatgaggacgactcggcctgagccgcatatctcccacctcgacctcgacgggcttcagctggatctggagcaggcgttttgtcgctcatttgaggatttcttcctagaagcgaggcagtatgactagcatcaatgttactcgtcacgagaagtctgtgacgagtgtccgctcgaagatgaagtaaccattgaagaagaagcaaccgagcccttggacaactcgcatgcatgtttggtcgtgaaaagtcggaatttcgacgagcgggcgaacccgttcgggaggccgaagatatggatgagcccatatgaggtctgagaagatcgagtatgctttcaaatagagtgatagatctgatcgatctgatcgttttgtccgccaagggtactcgttgaaccgcggcgatctgaggacggaaagtgattttgataaagatagtaaccagcgcaagacatgcattaaatgattttgaagctggaggaggcgtaggtggggtctgggcaagcgggctgtgcgtaaacttcgtaggctgtgggatatctgaggcagacaccggagtagacgatccggagggcgaagaggccggcaaaagagagaatgaagggagactcgacatatcggcgattgagccttcaggcgagagcagaggagaaatcatccctatggcatcgtagagacgagatggaggcggaaacgctcccaccgcccgattgtttctgacgatcggataaagagtaagaagagagaaaaaaaccgtgatatcaaatcaacatacttcaatcctacgaaaaaaaataactataggactcacaaggaagagaacgaagaggatgcggaagccaggcaggcaatcccaacaatcagctgtctgatcctttcaaacaataattttggtaaatccgaagaaacgtccaccgtcagacctccttccgctgttccggcaagaggagagccctctacagcctggacgtcttcatcaccgaacgacccatcatcctggtctaatgtctctacaacagccccatcgatcaagacctcccaagcagccttttcaacatcctcgtccttttctttctccaacgtgacttccaacaatggaagaacgactcgttccaagaatgcctgtctatcttcagcaacatccttgattctactataaacttgttggaagagtaactttgccatatcttttctcgcttctgggtagtcgcgaccggaagaaggctgagcaatgaaaaccacgtgtgaaagccgatcgaggttatcgagccagcctatacaagtgggtatacacagatcttccgtccgataatgttcaatcaacaatatcgtcgctggctgagagatatttgcaggaagatcaagtaagagcaaggcgagtcctcgaggtagacgaagcgaaggtacggccgatgtcgctcgaccgtgattgacataggtgaccaatcgtcgagggagaattctgcataatcgtccgaataggttcaatatatccggacagtcgagacttttcgacgcatcgtggagttccatctctcgaacaactgtgaatcttttcccgtctggatacctgacgaacgaagagaattgttttcccagaaaccccagagggagacaattactgtgagcactctgacataacctgactattcgaactagacatcaagaagatgaacgccatacctaaatctttcaacccatcctttagcgtgtcccaaaagcttgacaaccagatcaccctcccctagatcccggtccatccctttatcagccgctgactctagcacatcatccaacacgagtaagacttccagatcaatcggcatccatcgctctctctcctcatccgacgcgttcttgcatcggttcagggccatgccggagatgagcctggttgaaaaagtggatagatcgaacgtagaaaggaacgatgaagataaagtgacgatcggggcggacgcatagagagaggaggcagattcaggcatgtcggatgggccggtcgggttcgactgagcttttcggtaagagtaagcttcactaagcgcacttcggatgcatctatatgattgataaccaagaaaggaggtttcttagcgagcatgcaaaacacttgaacacataaacataacgagaagagcagagagacactcacttaacagctcctctgaccacaccaatctcccagtcatccggttcatcccaggtttccactttttttccaactatcaccgaaccagccagcacttgctccagtacggtaccaaacctacccgagaaacctttcccaaagagctctctgagagctttccaagcctccttctcgctctccccaccgagggtcatcattgcaaacatgatcctactcgccggaagaagaatttcgtctgatagcatgtgtggcagcttttttgtcagtgtggagagcaaccggagtagtgtccgagccaatggatggaccggcgaggtagacagaccaccctgatgggcagtcgaagctgtcgacgagggcgcatatgttcctgggccaccaccaccagcgccgcctgtgtttgacgcggaagaagagatcgcagaggagagcgcagcagccgaagtgagtgatggaagaggaagactggccgccgggggagaaaacgcggtggtcagcccggtttgagcgggagtaacattcgaggtcgaccgaccgggtccgccgctgttgttggtgtagcttttggcaaacgagttagaggttgacgttgtcgaaggcgctttcccccctccgctgcccccgccagagactgaaggcgacctagagtgtcttgtttgggtggtctgctgttgttgcttggacggagagcttgatcgagggtgattgctgttcgcggatgtcgacgacggcatggcttctctgtaggtcgccgagttcgagaatccggctctgcctctaggtggaaacaaattgatcggactggacgatgttgtttttggactgctcccgtaaccgtgataagacgagctcgagcctgtctcatccttttcctcacctgtggagagcgcgacggtacgttcgtattcggatgcccgccgtcgttttggtcggccggcaacagcggagccagagagaccgggtcgaagaccagcggtgacatccaagccttgccaggccaaccgaccgaatagcgccatcaatatttgaagggaattcggtgtgagaagagagccttttttatgaatgatgaaagagagaagatcgagggtatctagcaggacgctctcgagtgatggtggttctgtctcgttttgtcgggcaagccgtgtggattgagaagaattggcctacaaatgcgtattaaatggtcgcagaggtcagtacgccttttgataaaagagagaaaatcctgcatgcagaatgaatggaaaaagacacatactttgactgaatccttcatcacaaccggcatgttcttcgaagctgaaccagattggatcaagcccaaagtggcaaacgttgtatattcacctggtgatgaaccgacagcgacgctcatactccaagcgaccgccaactcttctgcccacgctttaaggccactgacgatctcgctccagtcccaaccatccctagcgagaaattccctctctgtcggtttcggttcatcaagtccatctggttgcttgccggttgcggcatgggtttttcctccgagcagcagggcgcgcatacaggccaccttgagttgaatctcttccacgctaaatgagagaccagccgggtctaaaatacccgactgacctatcgctttcgatttgaccgggcgacaaagaatgatacggagaaaggcagcgagtacgagcggggatagatatgatggcggggactttgagaggagggcgtacagaaggttgaaaccggcgagtctaagagcgagcggatgagaaccgtcacaaaaggtgttgatgaccttgagcaggttatcgatcacgatgtttgacggcatgttcgcagagggtagagaagataaggcgacggccgggctgtctgccgagatgaacaacggaaagagatcggtgatgacatttgcgtcgaggatccggtccgtcaacgcctttgcctgtaattccatcgacctgccgtcttcgatctgaacagtcacaccaggtgcatccttgtcatcgttggttggaagggcgcaaccggagccaaaaattcgttcggaacctaaccaaaggctctggaggatatcctgagcggtctttccttcaaacagttcgccacggttggcggacgcgatgtcgtcggcagaaagaaacgtgcgttttggccgatggacagtctggagctttgaccttgagggtgagtttgcagccgtagccggagtcgacgatgcaggagagggagtggtaggggggatctggatgggaatcgatcgatgttgtctgacggatgatgtcctagagactgtcgagccagaggccgaggcaggaatcgaatggtccggaggtcttctggaaggcgaggtattgctctttctgaataaagaaaaaaagccggctggatgaaagaaaagcggggaaagaaacacgaaagagagataagcgaacgtcttcctcctttgggcactacatgctcaagctagagggacagagagcaagagcaagaaagaacgaagagaacagactcttggtgacagtagcaggctcagagtgttcgacaggtctcgtcgagctggagccagtaccgagggaggcagcggcagcagaggcagctgcagatccagagatcaagccaggtgtagcagtcgtagacttgtcggtcacaatgtttccagaactggaggaggctggaagcggatgatgatgggctcccccggaagatgtcgaggaagacccaaccctgtctcgatgggtcggcgagggcggtgggggcatagcttgtgggtagatgaacagaggcagatcccaggaagctgcttgtaagacgaaacagaaggtgaaaagagccagatgggacgatggcctctgactagaatcgatgtgtacgagccgagacgaacgaagacggcgacgacaatgccgggctgatgatggatggcgggtgaggaatatttaggaacaggattgccgatgagatgccctgattaggatttttctgtagttcccattagaagatctgattggaaattgtaatgattgcctgttcgatttccaacatagatcatgtctattcccatcagaccaggtttgtagtgcccagcaactttgtacagatacgatggctcttctacacgtacatatgggtcgatatcatctgctatgaggagagaacagggtgtgcaagtacgagttgtgtgtatagcaagtgtgaccgctgctttctatgggttgagccgtagccagagattctgcctgtcgatatgtataccgcttgcgcgttgtatgacgattcgacaacaacgagagtttgaacaccatacactctaagttcttgccatcaccgctagtcagtcagcagaagaagatcacttggatagaacagagaacgaagagatcgatagagaggaaaacaccatccagacagactttgcactcgttcatgttcaggcctgatacgtcaaccaggcaaggctgaattcgtcatccattcgtcgagcaattctcctttggacaaaccatcgtatacaaacatcgacaacatgcaacatacacccacacatccatgatcatacccgatccactgccggccgtatggccaacagctgtcaggtacattcttccctgggctcttatcctcgtccttaccaggctgtctcagcaagcaaacactcggccagtcaggctcgtcgtcggtgcgctcaccctcgcgtccgctaggtgttggctcgggggtgtccagttcaaggatccgttctggtactggttcaatcatttgctttccctcggcttggcagcagtgagcctctgcagcttgttctcgacattctatctcttgtctggctcatttgtttcctttgatctggtcatagatcctgttggttgtcccacggctctgtctactctcggatccatacctgccaagtagaaagatggatcacccggttctatgcttcctctttcacccacttggccaagactttcagccgatccctccgttctttcagcctgcccgaccaaaaccgacgagatcgggcaaaccatttaccaacagggaacacctcttccgctctctcagagggtttgcccttatggcgctcatcctcggttacgtccgctcgtatgtgccaactctatggacgacggatgagtcggttcgattctcaattttcgagaaactatctcgaccgagtccgttgctaccggccggaacaccagcctgggtcgaaggttggctgggtgggattgccctgggtggtttcgtcatctgcttcctagacgcaggttatcacacctatgcattcatgcgaggcgcacaaggagagcccggttggggacggatcactcgatccgcttgggctgctaccagcatccattctttctggacgactcactggcatccactcttgtctacgttcacccagttttataccgcccttctcatcccctctcgtttgccttcttccataaagaacgtggcgagatcgttgattgcgtttgccatcaccgcgctcacacatgatccttcgattcttccgtccgctacggtgaacccccatccgtcgatccttggtggaggggtcacaaagttcatgcttcttcaatcactaggactcggcctggaatatatgttcagagcaatcacaggaaaacgagtcggcggatttcttggttggatatgggcgatgggcttcttgggttggacagccagatgggcggtacagggttttgtggattatggtctggtcagaggtatggctcttttgggtcagaaatggtcaggctatctttcttgagctcgattttctttgttttctatcctctttcttctttttctgtttctgtatctctccgtattctgaggttgagttcgcgtttagattgaccacatgtgtagacgtaaggctgaggtttcaaatccatctgtagcgtttttcgtctttcaatcctctctcaactatcttctgcataacgttccgtcgagtttcttatcagaagggcaggttcccttcagttgatcagacgggtacatcaccacctgtatgaacgatgcacgccacatgttgcaaggcttgattaaatgaaagagaagaacaaagaccttcttttccatatgacccatgtataccgatcgattagcttaatgattaaagagggtggtatcagaacaggtagagaaagacgaagagcaaaagaaagacagaaaatacaacagcgatttgacgtccacagtagtcctttcgcacgagtggcaattaacgaaaagagaacaacacgaagaggtgaaaaagtaggaggcggattactgatgaatgtgagcaacgaaaagaacactgtgcgataacgaaaagagaacaagctagccttaatatgagacaaaagaaagaaagaaagaaagaagaaaaagaagaagagaaataagttaattagatccagaagaagccaagaacccccgaaccaaggaggagaacggtccatcggtccagtccagtgatggttctaacaccgaacgaagtcccactggtggacttggatgaagcctgagcgaccactccactcgtcgtcgtcgctgttgtggtagtagtcggtgcgtagtagctctggaagggaattccggtataggacgacacatcactactcgcaccgcttgtcgacttcgttctcgtagcagtagtggttgaagaggcggaagaaacagcagtagcaccggcggcagcggtggtcaatgccgtcgtcaacgagcacgtattctcggccgttttccagagagcctcaatctgagtgatctgagtagtaccaaagtagccttcttcattgagttccacacatgattcacaggtctgaccgtcgttgatgatcgcttgtgtacacgcgcaagtatcggttgtgcaggcctttacaagaaagggaaagagatacacagtgaagaaaatatcagacgaaagagcgataaaaaacggccagttccagagataagcgagcttacagcgacgtctgatcggatggctgcgcagtcggatacacaagctgatgtaccaacgctagcgagccaggtgttaatcgcggtgagtccggttgcgccagcagcagtggtcgccgccgctcgggcagaggtcgaggaagaaaccacggcggacgacttttttttcaagttagaacaagtgtaagtcgacagagtttcataattgaccagaacatgttattaggaaagaatgggacccacagatgatcgcacagatgacgcagacgatgatgaagagaccgaagccgaagacgaagatgtggcagcagtagcagtggtcaacgtaggaacagtggtcaggtatccttcggacacacacgtgtttgcataagctggatcagatgagcagacgagaacgagagagcaggcggatgttagcgcgattagaagagaggtggctagggacaatgattgcatggacgtaccgttgaaccctgcgaggatggtcgctcgggctgatccggcagtgatctcacagttcatgcaagtcaccgtcaccgccgaggccgcacacgcacattcatcctctgtacagctctgtagtgaagccattcatcacagttagtgagaaagaagaagaaaaaggttcaggtttaagcataaccgatggaaaagaaaaagaatggtatgagaaaaacaagaaggaaacgataggcagagtaaagagagacgaatatatcagacggacgttagattgtgcgaccatcgaagcacataaggtcgtgcaaccggtggtcacataagacaccggaccatcgatcaaatcggtcaaggctgcggtagtggtcgtttgtctcttgctgaggaagtgcgagttatcaacggacggatgggctatagccgtttggaaagctgagagcgtgaggacaaggagggctaagaagtcgaaagaggccatgcgtcagtctgatatctgcatgagttctcaaaaccacacatgcaaacactcacctggaagcattgctgttaggacacaacaggtctggcacacaagagaaaaatcgataggatggttgagcgagaccggtgaggatggatagagagaaagaaggatgggaaagagaacgaagagcgataaacccaaacaaccttacgtaaaccgaatcacgtgatttatcgcgcgagaagtgataaaggcgcacccacgctcacgatttattgttctcttacctcaaacactcagctttcacaggcgggtcagtccagttgtcgatagggattttacattgtatctctctctatgggtgtggtttgatctatagaagcataaaggtacatatacatgcatcgcatcgcgtcgtgtcacacctcaatactacataaggagaatccaaaagctactcatcctctggttcttcctgatgaattgtcggtagattcacagcttaccagagtatgaccaaatcaatgatgaaccttacgatgatacctacaccgagaggatctgtcgcatggaatttaccgaatatagaatggaaaattgtcggcgtccataagactaggagtagaaagaggaccagagagaagaaccagatcaataacgatcgagaccggagtagtgatgcagatgaaaataagaagaacaaagagcaacatacgagcggtgccgataacttgagtccaagaaaaagccggaatcgaccctgcgaaagtttttgacctccaattcagcagtatctgcgacaacatggccatcatcgatagtgatgtcctgagagaagctccatattccggcaacctaagccttcttgaccaagtcaagattgtcttcaaagaagagtgagatacacgagaggagtagaatttatcgggggctcggaggtatgttgggctgatgagatggggaagttcaggtaagtgtgttaggatgatcgttaggatgagaacaaactgaattggaagatcggatcagtgacatcccttccatgtaccacccttgacgttaagccgatggtcatgtagaaagaggcaaggggacataccaagcctctctgcgtccacgtgaatttttgatctgatctcctgcttgtcctctccgagtgtgttcttccaaatattgcaagtcccacagggatcaggccactccagccgttccatatgaagccgatgccccaccaaagacaggtccaccgccaaatagaaacaacgttgatcacctgaactgcgcccgctaaccatgcagagttgttacggtcatagcgatgtatccaataagagagtgcttcgtacagactgctgaagattagatagagaatggtcggtggaagactgagccccgtgctcgaggatcgggaaaggagataatatatttgaagtatggacccgagaggatatcggatcaagccgccgatgacaaagaagacggagcgaaggacaggtcgtttggtgtatgtgtggctatttccaaagatagcatctgggagtcaaaagacagacgaacgatatgttaacagacggccgatcaggaaatgtggaagatcagacagccgagaacgatttgtcaggaaaagatgatttactcaagaaatccattgtttccaacgtattgaattcgctataggcactaatatcgtatgggtcatatattccattgccaaaaatccgttcacggctattttcattaaccgtatcgacagtcattatctctggaattgatagcagatcaaaggtgatgtgccagggaaagataaatggatctgcttaaatgttcgaggagcagagaaaggagaagattcgatgagcgcgcaggagatagggagagcaaacccttctgtctcggcttttggtccctgcttaccagattcggtgttagaagactcgttgatacgaggcaggatgacccagtcctcagaccccgctgcatggtcgcctatgagaagtatatacctccagagaaggagacaaaagcgtttagggtgaaagatcgccgtaatagtatcggccagagggttgtcttggaaagaagaaaaataccgagaagattacatacgtagtgtcatatagggtccatagaaagaaatgtcatcgggcacagtaacccaatctccttcggtataatcatcgggaaggaccatatcaaagtactgggtgatctgagaccggtaatgacctatatcactgaaaggagcgcggatgagctcgacccatgggtttagaaaatcccatgtgattgttaacttgataagggaaccgtagcccaaatcgacaagaggtttccgaaccggagacggtaagcgcccacataacctgcgccttgatttcctatgtaacaaactacaacgagagatggccaacctgctcaatccccacatcatgccgctttctattatacctttcataatcatactttggtgtctctttaaccgtagagagccagctcctggacttgatcttgatgttcacatcccgtttgaaagataaccaccttcttggatctggagcatctttgctctcttcggtttgattaagctgacgttcgtcttcgtagacccatcttggcgtaccccagctggcccattcatcgatgacaggccgtaaggcaaactctttgacagctccagaatcataaaatgcgttgagcgattgcgaagcgttctccagacgtgaaccaccatgggtatagttgaaaagaggatctgtaggacgagcgagctgtcgaagataatgcttggtccataggtcgggatttgggaaaggatccatagggcgccatggctcaaactccgccatctctactcgaggtggatcaagagagctcagtacaggatcgggatcggatggaacgattacgaaggtgttgacgatctcgggaaagaaggtcagaggctcataaaactgggatctactttttgcaagaggacggagaagaagaggtcaaagaactgtacttgggatgacgaaagataacgatcaagagatgcccaaactgacagaatatcaagaggaatagtcagattaaccgtctttccgaaagacttttcggtagagttgaggctgattcgagagaaaacgatctggctataaagcgactgccaatctccgaaggcccattcctctggaaggaaattacctaaccatcgaaactcgtcgccatttggcatcctttttccaaatctgataaacacgctggctacgacgtcaaactgaggaacttgtccgccatagtagctagttacggcgctgaaaggataggacgttgtggttttccaatgaggatcaaggaccatgcgccagaaatacctagccgctgagatgacaaggtagacagctccaccacagatgccgagggcagccaggagggtgatcaagacgggtaaacgacgacgagtcagaacgggtttcctacgggttcggagggacaagcggtcatcggctaaatccaagatggaatctgtaggtacgttctctcgagtgagaggagtgagtgtgtattcctccatgatggaggattcaagtagatactctcatcttatctgacatgtcgtttactttcactctaccctggcaagatgatcagacgaacaaggtttggaggtaacgaatccaacccggaacacatcatcgggatctcatcggggccacaccggctcccgctgcgccttctcccgtatcggcgcccgaagctcactcggcctggtcttccgtaccaacatcaagctcagaccagacgtgtaggtgggtatgtcgcagatgattgtctgttgaacaaggagcagcaagggttggtccgaaagcgagatcagtatgccattgaagagtccagttggtctggatgccaaacgtcaatcaaccgcagcgcacacttgctctttgtacacgctcggtttccgacacaagcacccatagcgtacaacgtacacacatgcacactcgaaacacctgacacggcgacgtttgcctcagaaggaactatcacatgtagtccaccggacgtagaacttagaaccgtaggcgttcaccagaccggacagggtgagagaggatcggagacgggaggaaagccaatggcgatcagaaacagaagtataagagtgacaacaaggaaagaaagcttgacataagaacagtgcccataaacccaagtctatagaaaccccggaaccgacccaatgaagatagactgtctctaccgatggttggatcggttgtctcgctggatcagaccatctgctaagcacgatgacggactatagcaaccggcagcggatgccgatacagatcaatgcgcagctatctttcgggccgaaagttcggcatcttcctcaatcgcgacatgccgcaatgtcttcggctgtaatgcgcagcaaatccgccaaatagccggtgttcggatttggccggcctctcttcgtcacccccggttaatgaggcctcaacgccaaccgacaaacagaccagaaagaacaagagaccaaagaaaagcttcaatggtttctctctcttgaccatcaacaacatagattggataccttcgtttactctctttccttgctattcagatcgtcactcttaaactcaacggccatggattctgtgtcagcaacttcaaccctgaccgagttacctaccgaacatcggataggatctgctgacgcacagctaggggagaaagaaccaaaaatgtttggaaacggtacacctggtgacccgttcgtcgtggagttcacaacaaacgatcgggataacccaagagaatggtctaaaccgtataggtggtttctctctattcagggttccgtccagatgctcgccatcacctttggaagtacgtctttcttgttgttcatgtacacacatatagtagatcggatcggcgctctgccagagcgtacactgggctgagattgtgtttttttacgtgactctcctcgtatggcttgttatctactcagcttctggttatactggtggttaccctaccatgacggctgaatttggctccagcaacgagctcaacacagttggcctcacgttcgtccttgtagcctttcctcttttggcctgtcggttttatagaatccgtctaatgcctaaacctctgttcataccgtttacagaacattcgtcataggtctcgcagttggagccctcgtctgggcacctttgttcgtccgatttagactgtgctctaagctccttattgtcttgtgtctgaccgccttgttccaatcataatcagatccgagattcttggacggaggcgaattctactttcctccctgttctcctacagcctcattggaatgggagtcgcgctgagccaaaacatttggtcgatcatcatctgtcgattcttcatggcgatcgctggtagttccatcatgactaacagtcctggaatgctcaacgaccgtcagttccatatatctactcctggctcatcgactcttcgccttgtcctgcgttcatgtttttcctaatcttcgttctcatctctttcttcttattcagtctggagaccctccgagattggtcttccgatgacactgaattctgttgctccgtttatgggacccgttctcggacccgtcctctctggtttcatcagcgtttatgccggtgatcaatcatggcgatgggttaacggagtcatcgtcatgttctcggctggccttcttctcctcgctgtctttaccgtacgtcgaagtgaaaaatagcgcttttcaaatcactctcctgttgaccaaccaaccttgtcttctcctctcaggttcccgaaacatatcctgcgacagttcttcaacaaaaggcaaagaaactttcaaagtcgactggacttgtatacgaatccgagtttgaggtcggtcaaccaaaaaaaccattctcagaggtactttctactggtctcaagcggccatttatctttttattcctggagcctatcgtgtaggtgtctcttttttcctatcttccacaagcacatataaaaggagcctgctcaccgtgaaatgctatggcatcttaacacctgtgatcggtacagcatatgtctgagtttttacgctagcttgatcttcgggattctctatctcttcttcgaaggtctgttcttccgtttgtccgcatggcattattcgacgacaatcagctcattacttgatttgttcttttccttgtgcttacagcatacccaataatctacgtcgagcaaaaagggtggcgtcgtacgttctttgttttctttcgcttgctggggcttttatttaccggttacggattttctctcttttccagaggatttggggaatctcccattcttggaagtggccatcggcttgatttttggtgtcgttcgtccttctctatcctgtactctccatttgcctctctcctcaactaaacaatttcttctatgttcttcacaggcaatttcattctacacttcgtctttctacaagaaagcgcttcgagcgtgtaaattacctacagacaaagttcctccagaggaaaggttgtactttacgatgatctccgccatcttgttgccaatatcgttgttttggatggcttggaccagtgatgtcttctggatctggccaaccttggcgggtgggtcctcgaagcttttctccaatctttatatctcttttgtgacaaatctaaaaattctcatctattgcaacttaattctacctctctaggtatcccattcggtattggaattgtgtgtatctatcagcgggccgtatgactacactaagcacgttggctgatgttctctttctgtcctacacattcatctctatcgataaatctgacagttgggaatgatgaccaccgtgatggcatatctggtatgtgtttctcttttgatccactccttcttcttttacgattcaactgactttgttcctctcggagatttcttcaggctgatacatatacaatctattcggcctctgtcttcgctgccaattctttgttccgatacatctttgggttcgtccgttttctccatcaacatactttaacgaaacctgtgactgaccatacaactttcaaacatatgaacagaggagtcttcccactctttgcgtcagcaatgtttcacaaacttcacaccacctgggctctctctctgctcggcttcctagcacttgcctgtgcccctatgccttttttattctttgtaaggaaacttctctttcccctcatattttcgcagacagagatcagaagaaacaagaaactgatctttatctgtcattgtttttctcacgcgggtctgcctcttacatagaaatatggagcgagaattcgagcgctttcgaaacatgtcccagagcctcctcgcccttctaaacgcctcactccaccagcgtctctttcgtcgttacaagaacaagattcggatctccctagagctcctccaccagttttcttgacagctggtgatcaggctgtcagggtggaggaagcaatggatgggatcaatttcacaagacgtcaagatcaggacttggagcgcctgtagagagagctcaaagtaataaaaaaaggcttcgtgcttcttgcttatcattcctttgtgtaacgtaaccaatagatgtatgtattagtatagagaactgtgtttctgcatctagatagaaacttagagcgagcaatgtatcatcgtcattcttcttcgtcttcttcatcttcgtctatttcctcagccaatccgaactcatcctcgacacgggtgatctcttgttcaatccagatttgagcggcttgcagaatctctatttgacctgttgattccggatatatatacaaatataaaatgtcgtcaacccttggatttataagaagataacgaggccaaggaataacaggaactataccttctctgtaaatcctacaagtccttctaatagacttccttacattccccacccctgtctgtttcttccccttctcagcgtccacttccgtctgatcaccctccctatcactctgatcaacatcgagaagcacctgtagtttagattgaaccattgctcctaatgtatccaacgccatacattcattttctcctgagacgacatccaccacatccgtctttgttccatctacccgcgctcgagaacgaatcaggccttcttcttcgccatcagctactaataccctcaaaagcgctcgcaacccgtcttctacaacagcctctccgttcttgcctactgtcagattccatgtttttctgactgtttttcctaaccccaagtcctcgcacaaatcttgttttgatgagacaacacccgcaatcagaagtggaacagtttcgacatgttcaggttgactcgatagagggagagcgaaaccataggataggagaagggacgatgatggcttggcaccgtaattgttgaaaatctgactgtgagggttaggtaggtctggatggtggataaagtcgatcgttcccacaattggtttggcatcaggagaagatgatgataaggaggacgaagggttggacacccaggttactggatgagacgatcgatggtttaggagatctagtgcagggaccaagattgggtacgatgctgctgtcgtgggtgttaaatccaaaagctttgaaggaaatgaccgggaagaaatgtacgtcgaagcaagaaggtacctttccctgttgtccgttcatgaacgtcaatatgttagaacaagatcgatcgccgttaagtcgtttggctcatgggtaaacaacacaagagagagtgaggacgtaccaagtaaagccatcagcttcggtcagatccaatagcgtgcctacagatttccattcttcctcccattgacatcttaagtcggcagtcgccccaaaaacgctcgtccctctcaaaagttccatctcttcaggagtgaaccatagaggagtcgtcatctccgtcgctgtaggaagagcctcgatgtatggtgcatgtctgagaagctgaggtctagtaaagtcaaccagaaagaatggctctacacagtcaacccatatcgtctgacgagggaggaatcacatggaaggaaaagaaaccccgtaaagataacgtactgttgtctccaagcctcattgatctttgaagattcgtcgtctagctgtcgagcaatccaatggaggattacatacgagatcaccttctcctttggccctaactcatcccgcaccgacttcttccatgcctctggcttgttttgtcctagaaggccaatgatagcttcttcgcctgtggaggcagatatggccaaatcgaatgggacggaaaggattttattatttgagtctaagggggttgtgcttcttaaaaacaggccgtaaacgtcatctgttatccaaggagtgcgtaaaagatggcgaaatggaagctcgtcagaatctttatatgatcgagtccatacttggcttatggagaaacgttcgacagaccgtatttgacttcaacagatggactcaaatatgctcctccctctttgagccaatcgagaagatggtggacgtgtggtggaaggtcgacagaatccatgttgatggttgaaggttcattcgacctcttcctacttgtaatggaacctcagcccacacatcgttcttttttcggtgctctcatgatctttctcaatatgctcatgaatgactgggtatgattggtacgtataatgctgacagacgagttataagctagaaaggaatacagaactgtcccttgagattgatatgtctatctatttgatctagtgggctggcaatctaagcgtccgtccctccgaccaactttcctcgaacccagacgttggagatgcttcggtcatctcctgtaaagatctgtcggcccagaataagacaaagcgatttcagtacgctgacgccagaacgatgaagagatcatatcaactcacaaatcgttcgaatccactctccagccagctcgcatccccttcttcgccttcttctccggcagtccaccaaacccccggtcctctcttcccagtcagatcgactaacagcgcatcgaactgctttcccttcttgaagtttccaatgacgtcttgaagcccacagagcgccgctccaccaagcgtggccatatggaaggtattagatagggagaggtgggtctgttggctgatcgatcccggattagatgaagcaggcaagtacatcccaaccatttttgatgtgttcatggccgcacgaatttgaggaagaattcctgcttcgtttccacctccacaatcacttcctaagccgacctagtttatcgagtcacagaaaggctagatcagctggagtggaagcaatggcagagtgaatcgggaaggacgaaaagcgtactttgattcctcggtctaacgcctcggctatacgagcgcatcctgagcgcaggtgaaaattcgagatcgggcagtgagagattccagatttggtcgactgaagaagctgcagttctttttcttccagatgaacctgcacggatcggttccataacgttaggtcagtcccttgcttcctgtccagttgtgaggaacccgacgtacacaatgagccaagatcgttctctcccctagcagtccaaatcgatcgtatactccggcatacgttccgtcccatggcttttccgcctttgcatctttaaagagttgcttcgtgaaagcaatctctcctgcgttttcacccatatgggtttgaattgccatcttgtaacctcccactttcgtcgctcgggtgtcttcttctttggcgagctcccctaatcctcgaagaagctctggagagcacgagatagcaaaccgaggggttatgatcggccgaactagcgcgtcggctggggaaggagagagtgattgaatatgcgtgatgagcgatctcgtttcctcgatagaagcagaagccgagggttcgatgtattctggtggacagttagaatccatattacactgtaggtgcaaacgtatgtgtcattccgaaggttatcaatccccctcccgaaagtcagccatatgaaagaaagagagtggctgaatggtgaaaagttgtatcgaacctttcctacaaaagctctctggtgaagctctgcacaaatatcagccaatgccttagtagattctaagtatagtgttccctatgagaagagtgtagcgcctcgaatgacgacatacgatcagaccgatgatcttcgctatcgcatgagcgagacagagataggcatcaacgtacatagtagcaactcgttgtcgtctagccaaaggaggagaagaagaagaagaagaagggaagaaagggtgagaacgttttttcagtttacacatgctatgagttgattcaaccaaacagtggaagttagtctcacccccaggctcaaagtccgactaacgacctccttgtagatctttctagcataatcgacatctttgaactttgcttctcccggaaacgtgacgttgtccaaccagtcgagaagctagaccaatccactctcgggtgtaagtcagctagatataatggttcgactagtttcgttgatagaaagatcaaaggaaaagtccagacatgcctcgtattgacttcctatcccattgttaggatactgaggagcatctaaatccgacccgaagataagactccagaacggtcaaacgagctcgagcgagaagtatacaagtagaagtgcaacaaataaacaagacgagagacccacgagtatgggtatcgataaacccaggcgagaggaattgaccccttctaagtcttcgaagaacttccccgccccatccgtttgactggacgagtttctcgacatcagctggttcgaccggactctcgatgtgagtgatcctataacgtggttcaaaagatggaacccgaccacagagcatgtccatcaagaagaattcacatgattaggtgtctagggcaagataaacgaagtcaagagatggatagactgtgaagagaaactcacgttccgtcttcatcattaattcggagaagaccgcggtgaacgtattcgatctcggagagcgatacagaatgaacgaaaggcccgtagatgatcattatttcttattgatctagaggcgtactcgatactaggtgtttgaggtcgacgtcggtgtgttcaagatgagatggttgatgtaaggaatcaagctttatctgtctggatatcttttgtcagaaagccggggctatcggacacccggtatttttaacattcgtcttatctccggtcgatcggacgacaagatactcagtcggatttgggacagcgcaaagtctacaaccggattgttatataaataataataggaagacaagactgagcaagaagaggctatcgagagagagtgagaaacagaacatgtactgatcaagattttcggatatcaagaacatgaagcaagagcagatcggtagatagatagttagagaaagaacccagggacaagatacgtagtatgaataatatcagatacagtgagaggcagacagcaacgtctcctcagaattcaaagcagtgttcacatatttttataagaagaaactccatagaggaaaacagaaatcatggggtttggtgggtgaactcttttacgatagtaagttgtagagtcccatgcgactagctgagaacgacggcgtgatggccgaattggacggagccgaggaatcctcatcaggattctcactaggcggatgccgacggcagcaagattcaaccttttcttcttcttcactcgaagggttcaacatttccttcaaacccaacccagggaacgtctttctatccccagatgccagcggggttgagatcgaagtaggtgggattgaggtcgaaacggtcgaagcagcagcagcagaactgacttgctctggtccagtaatcaggttcatcggtccccgttctgagttttttctatccgccgcaggcggaggagaaacggtcgacagcctggtgacactcgggttgaactttgatttagacaaactatcaaatctggtggtttcaggaggggccattgatgagtccactgcccgggtgatcaccctggtatgtgatctcgacgggccggcagaataaccttcccttccttctggcatcgggctccctccgacatgaccaatggcggaaccgaaggcggacgagatattcgagccgtaggaagaagaccggtccaacgaagcggacaatgaaggattggagaatcttccgggaaacgaagagtctgtcgttcgtggggaccaacctatcgggctctgacaataaacatttgagggttgtctgtcatcagagatcgtctcgttggaagcgcttctttcgggtaacggtcggtgatacaacaaatatgaggtcgttgaagaagagttcgaggacggactcgaaggtctacgaataggaggaatgtttaatggaggcaaagtgatatttgagggttgttcatgaggatggtgatgggggtggtgatcacgatagaagagaggataggatagattaggaggcaagtgagcctgtgtcgtcaaagaactaggagtgtatcttccgaggggagtcgatccaaccgacttgaatgagcctgacgtcggatgaggagagtcttcttttggtcgtgctggtgctagatgatgagagatgatgagagggtaggatggtgactgacgatttagtaaatcatctgactgatgcggcgaacgggaacaatgtgcatgcgataaagaaggtgttgatgatgggaatgaaggagtccggatctgatgttgttgagccacgtcatgcgaaagtccatgagaattagtctcaatgtctgtcgagccacgtgcacaaaccacatggcttgcatcatcaacggccatcgagtatgctgtttgaggttctttttgataccttgccacctcggtctcggccactctgacgcgtttgccgacgccttgactattcggacttgcactccttcgacgatctttcgtcttgccggagtttatggacaagcgatctccatcgtgatcgtcacctccagtcaaagatttgccaatcgatgctcggctatttttatattgact

SEQ ID NO: 2637 - DNA, 1813 bp, Xanthophyllomyces dendrorhous
ggaaggtttagaaggcttgttggccgtcaggttgttgcttcgaacgcgtgacttggtacttaatccggctgggggaagcgctgattcgacacgttctgtagattttcatgcgagggtggacgcaaagtgaaataagatgatacaaacgaggagaaggagaaggaaatgaatgagaaatcagatgatcacaaaagaagagagagagagagagcaaaaaagaaatgcatggcagagaaatcgagtctcttacgatcagtgacgggaggctgttttggagaaaatgcttgaaatgcttccgaaaggatagaccgacagatatggatttccttcctgcaggtatttttttaaagatcaatttaacaatagagtttcacccactattcaacatcactagacacatgtatgaaggataagaaaagagggtttaaaacacaggcttacccaaggatctcgtacagatcgaatcgaactcgatattcgccctcctgacggacactgagatcagggaagacaaacaccccaacgtccttctgaagttgtatttggagttggtataacgatgacactgtcgaaccgatgaggaaccggttcttgccatctttggaggcatgtaagtctggatagacgccggtcttggcgtccggggtagcatttgttaacgtggcattcctgtggttgtacaccaatgaatggtaggtgatattggtagtgagtttaagatgaaagaggagcgggacaaacacaagagaacgcgcactgacatgaagtagtatgggtcttttattgtagaagtggacgttttcatattttgtgatgacggaaaagagtccggagatagccaagatgagtagaagcttcaagaccgagcgagcagaggaaataagaaagaacgtactttgcagaaaacttcgactctttgagcgaggtccgccctctttcttgatgttctcttttctcttttggtctaattcatgagctacagcgtcgcctaccatgaggtctggttggaaggagcctgattttttaaggtttgggctgccggaagggttgatcacattgagttgaatgaccggtgcagggttgattggggatctgtcgactgtagttgtatcattgatagacaacgatgacatgtgtaagaggaaatgtcgatagtatcactggttaagagacacacacactctctctctgatacgtactcttgtggccgaatccaacagttctagcacattttggctgttgaacgaacgagaggtcatacacgctatgtaaagaacggaaaacatgagtcgagaaaaagataatgtggtttaagcgatctgagcaagagaacacgatgcgtgtagaagtgatagttgtttctggctattttaagagactgtcagagcggccttattctgactcttgctcaagaccttccacatcggactgcaatatcgctcgacttggatctgtgctcttctgaacctccgtgcttcagtcaaagatgagtctttgtttcggaagggatgaaacaagtggttgtgtctcaccacaagatttgctccgttctgacgtttggattaggtcaagaccaagagacgcacagacaacaacattggatgttccgagtgtctggagtaaagatggaacgggacggatgtttcgaacgcccggagcgaaagaaaatagagagaaataacaaaaatacccacgtgttttgtcgactagaattcttgacctgacgggtttgacagaaacgatcctccattggcaaatcttcgactaagaaggtgtctataggtgttggaagaagaaccgggctggctcggcg

SEQ ID NO: 2638 - DNA, 5814 bp, Xanthophyllomyces dendrorhous
gtcctggcagacgttggatgaatatagtctaggttgatcaagagaagaagagtaaatgatgagaatttggatcacgatgcaagcttagattgcgaaacatacaagtgagaagaacagggatgatgttctggaaacagttgtggaataaagaacgtcattttttttttgaaaggacgttagctctgtgtgtatcttgtgctagtgtttggagttatcgaaagatacaaaacggggcaaagaacacgaacagaaagagacgagagattcacgaattgatgcggttgaaaagatggataggatggtcacctacagacggaaaccggctagatggagatgaagaaggtgaaggaacaaggaaccaaaaataaggaacaaaaaataaggaacaaaaaatacgggcgcggaagaactgtaaatcagggcagaggaacaagaaaatcgggacagggagatcgacagaggaaccggtgggtgaactataaacttaaaaaggcaagaggaaatcctttgaaaaaagaaagaagaaaagaacaggaaaaaagttcttccagtggccatgcccggtttcaccgctctgatcttcagcctgctctgcttgaacccacgttgatgacaacaatcttaaggtatgtaaagagaggcccgcgcgccagtctctatatcgtcaccttggagtgaagagcttgacgtcatacaacgatcgacatgcaacccaggcggccacgagctcgatcacagaccctcgtgcgaacgagcttattgaggacacaaccaatcaatctcaggagcacgcacccacacacgaccacgcaatctacatgacatttgtccgacaaggatctctagtgacatatatcttgtatttatatcttagtatgttgaacttatgcctgcacgattagactatcggatcgatcttcctgggtagcttaattagtccgaggctgctgtgcacaggtccagataatcaggtttgtttagtcttatatatctctttagctccacgtttcttctcttcggccttttcagcaaacgcctggtctaatcgagtacatgcagaaaatccttactcttgctagtttccaatgattccaactagtcctcgtgcttcttcacagtttgctttgcttttttaaactttccctatgctgatttcatgtagtttcgacttaatacatccgaaaaagaccggacatgtacaccgccatgccgtttattgttctacttatactcaatgcccgcgacggacccaaatatcgggccaaccctaacatgaatattgccacgtgtcggataaagacgcgcccggcattcgtgtatcttccatgggttaattgttttacgcgtctcgactttgtcaactcctcgtttgcatgaatcatccaagacactcttgaccaaatcctttctttggatgtctgactttttcgcctcgcttgacgcgctgaacgaggatccgttttatcaggatactaggatcgatcttgatatggatcttgctctctcgcggcttcaccgagttcatcactcgtccaaaaagagaacagtccgcggatgccatgatcttgagctcactgtcaacagggaacctaccagccgatccaaacagactctgctttcacctggctcgctgtctccttcagcaatctctcctttggacacatcaacgagttccaggtcgatcgacttgagaaaggttactcttcttcgatcgttagtctccggtccaggttcacgtccaaaacccgaacagcagcccccgatagcctctaatcagagtgtcaaccacgctcgtacttctatgaatcaggacgcccagggagagcattatttcgtgaatcaaacgttcagtcacccaccatcatcggatatggtctctccctcttcactttcctttggaagcggtctttcagagcaaccggatcatccaattcccttacatacaaacccacccattctccgatctgtcagtcctatctctactcagatggcattcgacctcctctcaaacgtcaccactcccaatacctctaaacttgagcctgacgagcggccccctgtgtcactctcacggccaccacatattgaaaacgcccttgtcgccgttgccagacgatcgaaacaacgctcgacggataaagccgttcacaaagagccgaggcatgtcaagcgtctccggttggctgcggctgctgctgatacagaaaaccagacaaccaagatgtcgagtgttcctgttggagtgtcggcgagaggggaagaagtttcgaaggcaagaggaaaaacaaagtccaaaacgggtccgacgctgaggtcattgtcggccgtagccttgagactgaacgaggctctcgaaagacagtccgagtccgagtcagtatttatagaagcaccagctgggacagatccaggaagaggttccaggttgcacgtgttggcaggcacgacagtgttgattttgtggaaaagtgttgagagtttggtgaacgagtaccaagcgaactggatcgagaaggtttgcactttattcttcccgtgtctgtagttcgatacattaactatacactcaatatttctagatctcgtcgttgggagcaaaaatagcgatcgaaatctcggacgatgtcacccacgttatcccagactcttcagactttcctagccatctgatcctcaaaaggttcaacgtcaggcacgcagatgatctgccaacaggtatcaagtttgtaagagatcactggatcgactactctcacaaagtgagttcttatctttgccaggtgccatgctatacttcgatctaagtaccttgtctttccgttctccaatcatccaaccttagaccatgagtagagcggacgaagaggcctttctcatgtttagctctcatcgaacgacctttgggatcggtccgtcctcgaggtcagtcaacatcatcctttcaggttcttcttggtcgttgcttgaattcggaactgattgctcgttcgaattgttctgaaatcgtctggtgcagatctccgtccaattcccaaccggccgctttgttctcttcgctttcagtcccgatagaatctaccaggactgtctttcatagtccgaccattcagcactagctcttttagacaggcagtctgattgaactcttcttgtcttgacatcatatatcaaccgcataaacataggctcgactttgtttgccaacactgtcgaagctaatgatgtccataaaagtaggttcatggacttggaacaatatatcgacaccttctttcatccgttcaactgccgaatcatacatcagagcaagtgtgtctacgcggtccgttcccttatgggccgatggttgacagcatgtgtgtataccgatatcgttccgttcgtaggcttggtcttctgtttctgcgtcgatcacgcctagtggacacacgggcgatccaggagataatccttctcaccagcgacgacaggagatccctcatccatgacgggagctatcctaacgagtgttgcagttcggatgtcttctaacagaacatgaaggatgtccttataagagcaagattagttggacgcttgacggagcgttctgattggatggattttcagccttcgggttcgcacgacgccgtcttttttttcttttggctctactatatttcaagcccacaaacagatacaacctgccgacgcataacatgtgatgtagagcaatagaacatggtcatccaaaacgagaactacatcaggatcacaggtcagacaaggaaacagtaaaagaaccaatagacataaaagaaaacaacacacaagaaagagaaaccgctatggaaaaagagtcaaaaaaggctgcagacgacgcggtggaaatttccttcgcttcttttttcgtcctcaacgcccacccaatcgaataaaatccttagtaaactttctgttcgtccttctcacgaaacagaataccagcgtttctttccttgacagaaacatcctgtaatgtcaggtaagagcatcgttgttattcctgacctatggatgcctcgaatgctcgcttggagaggaggccggtcgtgctttctcttctctcggaggttgccgtcaaattcaggtttactcaccggcttcgaccgacgacggtttcgacctcgtttgtgctcctttcttttcctctgtatgatctttgaaaacatcttctcccctgggatggatcacttgggctgatgcagatatcggaggaactcatacggtcgccagagctatctctgcatgcgccagatgtaggtccaggaaatcgaaggtttgttcgtttgcgagcttcaacttctatccatcctgtacggtttgaactgatgaggtcgttactgactgtgttgtttaccttgttcgaaatcatatcagtgcgacggaaagcttccagcttgtgtaagtcatccatccatacatccatccgcgtttgttcgtacgttctctgatccgttctatctgcgttcaacagggttcttgtgtgaaggtccgtctatttttttccccctcactaagagcctcagcttataactcgtctgagcttattgttgatggattcatctcttgatcgcctaactcttgtttgctcacatatcatgccatgccatatatatcatgtaggcaaaagtcgagtgtatcggattcgatgcggtctctaagaagaatgtttccagaagatatgttttgtgtatcttctgataatgtactttcttttgactttcttttgtgcttccccatggctattcgacttcttttcttcgtcttttacacatctattgatctgtctaaccaccctttgtaatctgaactgtagttatctctacgaactagaacaagagatcgtacagcttcgacgagagcttgcttctcgagacgccgccacggcttcccagaacggtcaagaatcatcaggtaacggcaacagcggcgataattcgaacggagttggcgcccaccatcatcctctctcgccctccgagcatcaatctcgttcgtacaacgacgatcgtgggcctcaccaacagaacatgactggctctaatgatgcgtctccatcgtacaacggattccattccggtcaacaggagataaagcctgatgttacaatgtttaaccaaccgtactctgacaataaccatcaacagcagcaacaaggattctctgggcaaatgatgattgatccccaacttcaatcctcttcgtcaccttaccaaccgatgaaccagtcttactttcgcgctcagagccatcctacctcgaccaccagtggaacgccaggggatgcaggtagttctaactctggaagaaaggatattggcagcttggtcaatggtgttggctttgcaggagtcgaaagtggggaacccaagtttatggggacatcttccggaagtaagaacttcataattcatcatgtatgcgcgcgtgtgcgtatttgaggagagacgctgacagactttgatgtgtgtggaaaaaaacaacaacaacaacaacatgatgacagtctcgttggcccgtatggtgctatcatccgtcatgaaaacgggaccggctggagccacacatccaaactacaatccgaattctcaaatcaatcactacggctcatcctccaataccccgaaccacgctgaagccgaagcgctcgatgcgctcgctcaactggcccaacatcccgaatacacatctactcaatcgactacgggatcaaacgccgttccaacttcgaaccttcggggtggtgacccatcctcttcgtcctcttcatatgctgtcagtccatccgttgga

SEQ ID NO: 2639 - DNA, 10693 bp, Xanthophyllomyces dendrorhous
cggctcagttcctcccaaaagagaacggattcatatcgcagctcttcctccgagaggagccatcgagcgacttttggaggtgtacgaccaatacatccagtttcaaaaccagaccttacatatgccaagctttattagacaattgaccagggtactcgatgaaccggatgaggcaagcgaggtcgatttattctttgtattgatgtttttaggtaagagtttatcctatttttattcaacagtgactgtttagctattaagcctaaaatctaacttgttgtccggcaaactgtcacgatccgttcagcattgagcacgatggcattgtccagaaccatggaccccacatcggatctaaggatgtcctccgaggcttttcacgcagaagccatgaagcacatcgactgtatcctggccagttcgaatcacataggaattcaggggatcttgctttgctgtcaggttcgtagcactgatctgcgccttatctgatacctcgtgcaagattcacatgattgattgatcatcgattgacgcgtccttttcaaacctcaccttgtagtatgctcttttcaacccgggtcgaggaagtgagcttcagtttcattttaattcatgaatttgatcgatatgacagcgctgacggttgaaacatgaacgccgcgtggcctacaggtatttggtaccttactggaatggcaatgaggcaatgcatcgaatatggataccatcacgagtcgccatcgtcatcggataacaatccgttggagattgatatgaagcgtcgtttattctggcaggcttataaggtatgttcatacgtaaaagtctgttgagcgcacgacgtttcaaaatgctaacagtgatactgcgtatgtctatagcttgatcgtcagctatgcttcaatttgggccgaccacctatgatctcggatgagttcatcaatacgcctgttcgtcccttatatacttatggcgatttgaaccagcctgttgatgtccctcgtttttacaaaacagtatccttcccttatggatgactctctaatctctgattcatccctgggaacgggcgagcctgcggtttgcaagcaggtcagtagacacgtcatcaccatccgacgaatccaatccgacatccaacgtaggcttcatcgagtcagtcctggagacaagctatgcctgatgggcatgcccgacgaggaatggtttgcgaatatgttggagcaattgaagacttggttgaataatgtgccggtaggagatatgagcttacaaaatggagcagagcagtgggcggtgatgtttcacagtcagtggctttgctctttgtctttcgcctccacgcgtgctcctgttcaaaaagactgataagattttgtgaggatttgtggtaacagacagtgtcctgttgctcttcagaccttctccggcttgccctcggcctacccgggcagctctttcggcatgtcttcgatcatcaagttatctaatcaggattgtgcgacggatgtatcaggccaacaagatgaattatttgtggctaggagcgcatacgttgtttatgggtaggtcaccatctcatctcgtccgagttctcagtgacttacagatccatgcttcgtcgtcatctcttagccggtataacttatctgtacagtctgtggaacgttggtaagtatatactctgtcttcccctttccctttggtctttttctatagctcactcttcctcaatcttacatccgcgtcaatgcatagctatcggcaacatcgacgaccccccatctcttgaggaatcaatatcagacattcaatcatgtaccagcgttctgcaggctctttcctgtaagcaccgttctcactctggttttaaatctgtactctatctattctgaacaatcattccctatcatttttgcagtcaacgtcagctcctccgccgcttgcagagaaacctttgagatcctcagtacggctgtgcttcgccggttgaccgacggcgatactggcaattatctggacgtgtctctcatgccagcatcgacgttgggggctgttgactcggcaaattctgggttgaacgacctcaacgcattcatgggttctggtcgaccggcttcagcgtgtggacctcacgtggatgactcagcagaagattcgggtcgaacagctgatcaggctgctgcaccactaccatcagatctgcagggtctagatgatttgttcttgaagcccctcggtatgtccctttcctcagattcttctttgacactcatcgccttgaccgatcacaaacaaatatcaaatctgtgctgttctgatctgtcatttggttgtctcgctctttttaggctctcatatgagtagctttgaatctacacgggatcctttcggcagtcaagcccctggcgaccactcattcgatcaacagagtgtctttgacaacatcatcaactctcctgctcccatggccagcttttctgctcaatagcctctcccgtgtgtgattatctctcccggtccacgtttcagtcatcaaaacatctagtttactcatcatcttatctccatttcctcttcgtttctccttttgtatgttgcttgataaacgcgaatctgcgaaaatttatcttacagttgtctaactataaattccaacttatgtataggaagagattagatgtcttggattacagaatacccgtcattacatgaatgtcaacactaagcacaatctgatacagacgtatatacacacgataacgctatttcatccgcgctcacaacaaaaacgtcgaatcaagaatatcttgtaacgttcgttctgccgataagtccttgcttggctctggacctatttcaattggccggctctgctttaattttttttctagagtcagaagggccaagtgacgagtgatctggttgtagagatctcttgctactacttagttctacagatgatgtaggataaaccgcacttcttgatcgggtgttattatccgtcaatccaacaccggttgcatcgccatttgagttcacgcgcctaccgatcagtcgcggatcattaggttcgacaggatgattcgtgatctgaaattcactggtaaagttgtttggctcagtaaccgctgtatgcgttgtattcgactgagatgatgaagctagcgtttgattaggtctaggaggcgatggcgcggaagtagaatcttggcgttgaggagcacggggtttatgaggaagggaacgcaggtattgatgaacaagctctttttgatcactccatttgggatttggtaactgacggtgctcaacaacagcttccaaaaactgggcgcagaaatcgtacaagtcgactctagtgtaaacatcggttgtcggatcgagcatccgccttataagcaaaggaattttgagctcatcaaagccgatggcgatggctacaaggagcaatatgagttcaatcgctggctcttttcgagtagaggacgagtgaagcgctgcaattgactccttagctatcttaaaagcattcacagcatgatcaggaactatcataccaggaagaccaggattgaccggtcctgggactgaaatgggcgacagagtaggagttgctgcgtcgattggtgaagatgcctctgaaaccacgaaaccagggtccgctatatcgtctaggtttaatgaaacgacggattcttctcgctgagaaggtagtgagtcgttgtcgttatcatggttattattgctgttctttttcttcttgccgttcgatgaagaatcggtctctgcgtaagacttggtacgataaattatttcaatttatcttttgagtatgcaaacgacaaagcggaagcgcactagtagtgtcaaagagatactgacaacaagattccttttacggccaacactttcctgctgaacagccaacctttccttttctgcttctgcgcgttttattatgtctgcccagaaatcgtcttcatccgttacttcttgatcttcagataattctcggaaatctgcactggatgcttcccaaactggcgcaaatccaaattttccttcactttcttcgtggtcttcttcagcattctccagtttttcgactagggcaaggacatccgaggtggtatagcggatatccgaagtctcatcttcttcaaaaagcactctctagatccatgtgaaattcagagatggaactataagatcctgtttcgtgatgacaatagcgaaacatgacgtagagttagagattgactaaccgctccataagtcaagatgtcttttaagtcataatcttcttcgctggccatgttttgcacctgatttgttgagaatgtaagaatacatcagttgggttttgagaagagatagacaaaaaagtgagactaacaatcagatgatctagaaccatcttcttttttccgccctgaatcatcttttcctcaacactattcttgatcatgctattttgagagggaaaaacatataagaaatacttctaaaggaagaacaacgctctcttccatacattcggttctggaacttacagtttgaagaccaaaacctgaggcggagttttccatatatcagcttgatttacagaatcgccaataacatccacgtagactaaccttcttctcctgtccaaatctacgagaacgggtcatgaacgaccgaggaaattagatatctagtcttcgaattaaaagtcaagacaaatagacaaccacacctgtatgatcgtgatacagcctgaagatcttgatgaggattaaagtctgggtccattatgatgaccacatcagcactggcaagattgataccaactccacctgctcgtgttgatctatatgcaggatgtcagaattatagtttgtataggaaaaatccacgaaggcaagtttggtactaacagaatgtatagatcaacattagaatttggagaattgaaccggtctatatccttctgacgctgagcctgcggagtgtttccatccagacgaagatgaacaattcctgagcctatgagccaatcttgaactattccacacagggtgagtggttgacatcagcagaactatcttggttcacttgaatttgtaggaaaccaaagtacggacggatatccagaactatggcaaactgtgaaaacaccaaaacccgatgttgacgctgctggagtataggcagcatcatctttagcagagaaaactaagaggacaggagggaaagagtcaattttcatgttcgatactgagtatagtggaagtgtgcctaattaaacatactttggaggaagcgtcacaaaggcgctgaagtgcaaccgaggattcaagactatgatcatcgagttcaggattaactaggtaaggatgttgacaagttttacgaagctgcatgaggagattgttgctataagaagaaagaacgagatgatgtcaaccctctgaatatattccaagtcaacgaagccaaacttacaaaacaaggctcttcgaactcccaacgtgttcctgagatgttcccgcaagacgacgaagaacctgaggatcacttgcgagtagtcctttgtagcactctttctgcagcttcgacatggtcaggggaacaatgatctcttgctacaagaaataatcagatatcaaatcatctaaattgagccgatcgaacacggtgttctatactgactctaggtgggagtttgagaacctgagatttaatccttcgtaaaaagctatgtatacgatgtcaacaacaaaggtgtaaggggatcgaagtactaaatacatctcttacgatataaaaaactggaactcactagggattaagcttatcgtgtaagcgagacaacttctcttcatctaattctccaaattcaatagtgagctgatccagattcgtcctgtgagaagagcgatgagctatcagccggcgtggttgaaatttcacgggacgaggtcaacgtcacttaccatttactagaatcgagaaaattcatgagattgaacaattctcgaatgttgttgctacattggaacaaaagattagtgataatacattcagtatcttcatattgtcgtgacaatcgatatagtaggtaatcacttcaaaggtgtgcctatattaagatccggtatgtgatgtcagtttgatttgcctctataacagaatcttctcaagagacgtaccagtcaagatcactttatgagcgcaattaagttgcttcagattgccaaagattttattggtttctacaaagccgaaagatatcatgtcaaacaatgttatctagacttcaacgttctttgctcaagtgtttttaccaaccattcttgagtctctgtccttcatcgacctgtttcggcatgccaatgtgttgattaaaccacacttgattagaatcatgcgggttgtaaaagatataccgataggaagaagatgatgcataccactaggacttcccatcgagggactgtcgagatgacctctcggaacgatttctaccaaaatgtatgtgtttgagataagtagttatccagatatatgggcaacataagccatagagagcgttacactgacagatgttataacctcatatgtggtgactacaacatgggctttcaaagaccgagatcttgcagagtttgaaggatgaaataactcatactcttctaagatagatcggtttttggctgacccatgatcttgaaaagtgtggtgatatcaaacgacaactaaacgcttgaacaacaaccattgcacaagtctccggatcatgatagaacttacaaggtacagcgagaagatcaggagcccacttttcaaactcccgaatccaatctatccaagagatcatcgttagttacaagtacatccatttacttcaagatctagagtgacccacttgagacggtcgagttcggcactactactaggcaaggatagactataaaaagacgacgtatcagctatggtgataccatattatagacgatggcaagaatttatttaccatgatgcttagtcttaagcacattcatgaaagaaacaatttggatactggtatgtgcaagaaaatcagttgttcttctataatcgttcttgcaaagatcaatgacttacgtctttcctaatcccatatcatcagccagaaaactaggatgcagtcgataccattgtgagtataaccagttcaggccttccaattgataatccattagtttctaatgcgattcaattaaaggttgagaatacacatcagcgaagcaacctttaaaacgaagtaaaacatctcactcactcctccttttatatagtcaggttgagaaggcatcctgcgaatattctcaacgttcctttcgtctcgttttttggcttcttgaggagtaaggaccggaatgattgtctggcgaccacaaagatacctctgataagcacgccggaatacctcgtattccggctcttcaggaccaggaggagaatcctcgacagcctcgctgtaaggaagttctccatatttgatcttgagatcaaatcgacaatagtattgtcagatattgttgcgccttcggccggtccatccatctaaaaaactcacaagacaccacatgaccttatctatagaattttcgattgttgccttctgttgattgtaacgctcccacacatcaatatggaccatatcgttgccccaaggcttgaccccgggtactatgtttcgagcctctttctgtcctttcctgtttttaaaggtcttcaagggagctttcaggtaaacatctaaaaccctgtcaggtgtgctccaagccctgtgcaatcgtacagataacagagttttagaatttgaggatgtgtatacactatattgtagaaagaagcggacagtaaaaataacgacgtacttggggatacgagaggtagcatcaggattggcaattggaggaccaatgtacacttgcgggactttcttttgaccgaagtccagagcagaagctgtagaggcgtcttctgcgtcttctgcctgttcggagaggagtgtgagctgagtgccgtttttgaggaacatacgaagtcttgccggagaattggttagcaaccattcgtgaggtacccattcaatctgtgtaccccagatgaaaagaaaaacagtcaagaatcaagcgacaccgaagacgtatataatgcaaaacagatactcacgcgtttgaagcttgaatccataaacttgaccaaataaagcctgggaaggctctgcttgtagaaaggggatcctcccccctcaaacggaggttccaccgcgccatcatacgccggtttccaagcgatgatcttatcaacctccgaggtccaacgaacacaatcgtgacaattccagtgcctgtcctgagagaatacagcaagttctacaactgaaggtttcccaagatagttaggaatcggacgaaggcaggcataatggcaagcacgttgacagctttgacaacgcataaacacttcttttcgaagagccggcgtgggatcagtggaaagtgtgggttgtatagaagatggttcggtatcaacaggcgtcggaggaggcttaagaatgactgagctaatgggtgtaagagaggtctcagattgattctggctatctataatatgagaattggctgtaagagggggttcgaccgagactggatttgaagcgtcttccaagggtgtagattcggcatctcttatctcgacatcgactgatgtgacttgtagcacattgatgtgtgctgtaggactgtcaagctcggtggcttcctgatgagcatggccaagaccacacacgaagcaccgaggatggacagtacaacccgaacagatgaatgactgtatgatgttcagaagaagaccataaagagaacggcagtcagtcttctttcgattattgacgtaaagcgaagatgttgatagatgagccatacgtcaagctcgtcaaacatcacaactgtactcttctctccatcgttgtcgacatcacgatcaagaacgttctttttctggtgctcatcgagacaagcaaaatgagtctagagaatccaaagatcgagtgagttgttcgagttaagattgagggggagaaatgaagcagatagaaaaaactggaactgctcacagatacacaacaaactctacactcgatccatccacccagtgcttcaatcatttctagcttcttcttcttttcctcattgtcatcctcaattcttttctcttcatcctgtgatcttacagctttccgaattttcttgctatctttctctattctttgctcaagatccaaatgaagatcgaaagctgacacacgttgacattctgttaaacatatagccagatccggcaacaaggatgtcagattctgtataaacaaccaaatatgaacttcataggaattacttactcgtacagaaaggaagatgagcactcaatatctgagtcgttgtctcctcatctacctcattttcctcttccgtctctcgtagtttcttttgctctgcaggcctcttagatgatgtgttgtcgttctggtgccgcttgaacttgtcgttggactctgctggagttggtcttgatgaaagttcgttctcctcctcatcttcaagcctcaacggtcccttgcgagatcgactttgccggctggacaattttgactctaaactgggttctgaatactgttctctcgaatggctctttgattgagtcaaacccgggctatcggcggacagaatgtccattggatctaagggttctggtgtactggactgagaattgacgattcgaggctcgacaatcagaagttcatcggattcagcctctgactgtatgcaatcgcatcgaccgaaacagaaagaagttagagttgaatataccgatcttcgatccaggaaagagatcacacgtacaggaggagattcaatccagtgaagattaggtctgctgggtccggacttgatcggtagagggctaccactatcgatacagttttccgaaacttcaatcaatcagctggacgagtaaaagatcatacgttaagtgaagagcttacctataatccttcgctaatcgcccttgattgcgtttcttctggctgatactggattctgcttctagcctattctcagaatctgcgtcagaactcgaattagactttgcggcacgttcctttggtgtagatcgcagggcagattttggtttgctgggtttcaattcgggtgtgggttgcccagaccagcctcttgcccgtcgaggcagaagatacagatctggctcaggttcaggaactaactcaggctctaaaacgtacacccagcccttcattcctttactgttgatagacaaagataccaggaaaatatggcgtgaggtttcagcttggttgtctatattctcatatattacggataagaggtagatgagtagacttacgcgtggcgctgtcgtttctttcctcctgctgaatccccctcttcttccaatacctttctagtttcacgtatcatgtcttcttccttcatagcaacatcttcccccgaactaacatctgttctgttctctgcagttgtcttgtcctcatctggtttctgactcgactctggtcctatagatgactctgcttctgtaggtggtattaatcctgtatgtggttctggtc

SEQ ID NO: 2640 - DNA, 2344 bp, Xanthophyllomyces dendrorhous
tgtatgtggttctggtcctgcaggtggttctgcatctatagatggcttggattcatcttgtgttcgcacagaactcatagacgctctaagttttaaccgaggatcagcagctctgattatactgtgcgcatttaaaggcggtaaagagagattatatcctgatgctggtgctggtgctggtgctggagttacagtcgatgctggagacaaacaactgggcgagtccgcaaccggagccttcgaggcggcaacgtcaacatccgtcggtttttgtttcttagtaaatttgagtgtcagtggcccatccgtcgaatgcgtttctgatcgaaagcatcaaagcagagattatttaataggatgcgtgtagcggaagactacatatgaacaagaagcaagaagttcacagagagaagatacatactgttcggcacggctatagaaagagattgaacatataagatattgctcagtacgcttgtggtgatggtcaggtcgatcgatctgttaatgactgcttactataaagtaattctgggtttatggcatctctcatcatctggacggatgaatgcgagtccatcatggttctcaataaagtgtgagcttattggacctcgatcatgaacgcatcccaaaccaacatagagacaaacctgaacagtcttcccagacttcatccgaacccaatagcccgcctggtcgtttcctgtctcgactggcctcaacacttccaatagaccatccccttgttcctcttcaatcgccctcttactgatattgactacaacaatttccggcgaggacgaggctctgtcagattccaatctctctctgggtagagcctctacctcttcttcagagtcaatgtactctccctgttcaggcagagaagcggtcgatctaccggcaggtgagcccgacattgggtgccgcggtgaaagtgctgtctgagagatcctatttctaactggagttgaccgagtgaatatctgcagaccctataacgtctgatgactctggacggagaagcttagagtatgtgtgcagctgatacaagatagctggtatgacgactcagccgaatagaacgaaatgggatggatggggagaacaggttaagcagacgagagcatccggtggccagcaggatagtaagaatccgtcctagtcaatttgataagattccttattgactttcgtaatgatgtttgtcctctcccatacaccatggtttcttctttcatacattcgtgttggggtttcattctcgacctcctcactaggttcgtgttatggatactatcagccggtccggtacccatacatgtcgcattcgtcatggacggcaaccgtcggttcgctagatcaagaggtcgacccgttatggacggtcacttgaaagggttcgatagcttgaagaatgtgcgtcaccgtctgaatctcaatgtatccttcctagactctctctttctgtgtttctatcccaaacatcgtcgagagaaacaagcaagatagtcactgtgagcgttttctatccaagtgagctgaccaaggaagctctgatttgtcacttctcctttgcttctcgttcaaaataccactcgaatacgttcattctttactgccttcttcggacaactcagatcctcgaactatgtctccgtctcgacatccaatgtgtctcgatatataccttctcaatcgataacttcaaccgaccgcaagaagaagttggtgccctcatgaatcttgcccgagggagatttagagaattagcggaaaaagggtaagtggttttgccagcgttgcgttcgtcgttactttcgctgacaagaacatccgtcctctcggtctctatcgcctcctttttttttcaaatgccactctagagaactactggaccggtattcagtccgagtgaatatattaggcaaaacatccctcctcccgactgacgtgcagcaaagtgttaaagagatgcaagatttgacacgtcataattcaaagtgcgcccacagacttgatttatcttctcttcaagaagttctctgtaatctgacgaccgttctttgaccttcacatccttgtggccataagagctatccttaatgtctgtatgccatacacatctcgggaagaaataacttcttctgttcaaaccaccgtcgatcaagtccaatcagtcccacttcctatcgagtatgtcatctacggcgcgctctctgtatcattctttttctcaagaagtcagacagtctaatcaggagacaattccttctctgttcatattctatctaaagagatttatccatggaatcgatagaatctaatttgtatactgcac

SEQ ID NO: 2641 - DNA, 16931 bp, Xanthophyllomyces dendrorhous
ggggagcagcccgccattggatatcctaatcaggacgtctggggtcaaccgactttccgatttcctcctgtggcaggtaaggaggaaacttctctattctctttacgcattccttttctaactaaatattttctcttctgtacttcttccacctactgccctcatctgatcttaccagacaacacgctcagccaatatttacttcgtcgacaccttttggcctgagtttggattacctcagatggtcagggtacttctccgatggcagagagaacgctggttcagcaacgaccgtctgggaagagtttcaaagaaaatttcttgacgtaacatcaaaacggtcttctgcctcgcttgatcatttttgatagttaatagttgactggacgcaagagccgtatgtgcggtctcagtgccatattatgaaaattcatatagatagatagtagggaaaaaggaaaccaaagggtaactaaaatagaaagaagagagcaagaaagcaagaaagcttttttcttttacaagtacagtaaagagatgagcatagaaagcgacacttgctgcaaaaagaacaggaaccaagccagagcgttttctcctccttgagacactactcctccatatcctcatcagaatcatcatcttcatccgaatcttcaccttccgcaacagaaatcttgggtagatcgaatgtctgatcggctccaagataggaatcacagataaggtacagcttcatctcatgatcgcctgccggtaagttgacatccagcttgaccttgagctctctggagacagtaaccttcttgataccctgtaatgtcttgcccgtagccaagatcagccagaaattggggatcttcttgccggggtagtgaggtgcgactaccgtctggtcctcctcctctgcatcctcatcggcctctcgatcgagagtgacccggacagtgataggttttgaagcgttgtacccttcgtcgtcttcgatgatctcgtatgagacctcaatggacgggtaagcgttgacgaaccgggcgacgtcacgcatctgtcgttggtccatgcgaagcaagtcgtttctctgatcgtcctcgagctccgtgatgtcgtagacagaatcaacgttggcagccttacatcgagcaatgacctccgaatcgaagtgagggatctgcttgaggggcgaatcggtttcccacatagcttgaatgcacatctgcgacaaatccatagcacctaacgcgctgaggtaggcattcgacgacatgacatccacacaagctgacagcaagctgatcaccttgcccaagatgatctgctgatcagaagccaaatcagcagggagaatgacccttgaaaagtgagcctggagaagaatgaacgtcttaaagtgaggcgatccaaagtcaggtgtttcgagcttgacggggcatcgatcgtagattcgtcggagaatgacatcctcatgatgtcgaatgggcacatcttcaaactcagatgaggaagagacaatctccaaaaggcccttgagcttcgttcgctcactgagcgacatgctgaatatctcgacagtaacattggaaatgtagtagtctgtttggtatgagacaaagaagatcagaatagtgtgatttgcaggccattttttgtcagagtgtgaacttacatgcagcaatcattcccaagttgagcggcgaagtgtccatctcgtcctcgattgcgatacacttggaagcaacgagagcattcagagtttcttcgaccaactcggaaagatgatccgaaagatgtcggtgtgaggttccctgcaagttgtagtatacagggttttgagacattcggcggtaaaaccaagtccaggtacaccaatcaacagcttcctgcttgttctcgatcgtcttggcaacgatttctgcgttgaagtggtcgtgaagcatggccgggagctgggactcgataggaagggcctcgctcaagaatttcttgtaaaattcttttcgagtttgctgaagcataagcacacatcgactgttggtatctttagttggtcggcacgctcgacccatcatctggagcagatcggcgatagggtaatcaacatatcgatggtcctgtccgtcgaacgactgtacccccatgataatgaccatgtaagccgtaagagggataccccatgcggtatccttagaagcgatcaaaacctgaatagcgccggactcgaaaagtcgttcgacaatcctcttgtcggacttgttcagagcctcgtgatagtatccaattccgtacgccaaagtctcctttaagctaggatctgaaatcctatccaggtgtggctgaagatcctcctcctcaatgttgaggaacttcttaccttcctgattggcaaggcagtagacgagaatatcatttgcggtaagcttgcactgcttcctcgaagggacaaatgcaatcacaggctttttgcccgcccaatcattgacagccaggtaggcaggtttggccatcccgagcagaagagatggatagtggggaatgtcgtagctctggatgtgaatatccatcggtaaaggtcgcgtactaggagcaaagttgaagacgttctgagcgctggctccgatccagtctcctaaatctctggcgttcgcaagggatacgctacatccgacgatacgagtattgattccggtttgggatgatacaaatcgagttctcgaaatgagaacttcataagccgccccaacggagccaccgatcaactgcatctcatcagcaatgagtagcccgatctcggtgactgcctttcgaatagtcagcttccatcgtcgtgaaaggttatcccactgagtacaaagagaaacagaacaaaaaagtcaacaaaaaagactaggtgacccagacaggagagtaaaataaaatatagacaaaacttacatgagccggagtgcaaacaacaatgtcggcctttgaaaggattctcaaatcagccgcctgctctccagtcagagaaagaaccttctttccaccttgaacattggcaaacttggtcgaccactcggccaccctcaagtcaaccatctcagggaagggctcaatgcaaactgccttacgaggttgaggtttggaccacaatctaagcaaagcaaactctgcgcagaaagtctttccacttcctgtgggcgcaccgatgaacacattgtcatccgtggtgtagagagcttggaagacctgagtctggatcttgttgaagtcccgaacggattgatagacagactcaaactccttgttgtgaagggcagagactggcaaaggctgaagatcaagcaaaggagtatgagctgggaacttttcaggcaagatcaagtgcttgaacgacacggccaatcgagtttccgaatgcatccatcgatctgaggtgaaggtgatgaagtagttgggtggaacgggatcgtggattgggacggtaagggtcatgtgatgctcgctcttatcctcatctgaagtaacatactgctttcgaagtaagaattggtctcgaacgaggatgatctctccatctacatcctccacggtaacccagaacaattgagagcctccgtgaacgttgtcgtcccactggaagtcaggagtgatagtcaggtcaatcttgagaagagatcgagtaagcggcaagacgtgagcctcgaggttgagcttggggaagcagtgaacaagtcggtgaacaagttgtccaacgtttctgtttccgattcgctgaacaccaatgagctctccaagctcaggcggtgagagatcaaagtatctgtaccaagggaattcctttctctcggctcgccgaatgatatcagcaggaacattcttgaactgtcggagtggcgtcattgaaccccacatcctcctttccaccatcttgcacatctcgagggccgccttggtgggagccgcccagtttcgtcggagacaaatctcaaacattgctcgaaggattcggccggccgattgctggacgtaaaccatatcggacacaagcgcgtagccgtcaagcttcaattgagagatataagcttggagaaggacattggtcttggccgtaggctcatcaacaccttccttgacgggaacaggcactcgctcgagaagtttttgaagctccagcttctcctcttgtctaacaggaatcaaacggaactcataagacaatgcgaagattcggaaaagttcaagcatacccatagtcggtttgagatgctggttgtagattgtcatagacgcgtaggtaacgtagtagtgggaagcaatctttccgagttcggtcgaggtaaagactccactctttcgatcgtacttgaccaaattacctttctccaacatgacggcagcggtatgaatgatatcagctcgctaaaacacccaaagatgattgcaaaacagcaattaagtttatgtaagcgttgtgaacaacccaatgacatagattagagatacgacacatgccttttgttccaaagcggcgtctccctccaagtaatcagcgccgacactgtacaaggtaggttcctttagcattcggacgtatctttgaaaaacaaacaacatgtgtgtcaacaggatgaacgtagattcaaacaaaaagaggaaccaaagagaaggtctacatacagataagtgaatccaagccattgaacagcctcatctcgatttctgacgtttcctaagacgatttcggcgttcaggttgtcgaccagcctagagacaaattgactttcgatggggagttgctgattcatcaaactagcgtagtacggcagctctgaagcgttggtgatgatgataccttcaccgaacgtgtcatacctgggtctaccagcacgacccaacatctgcagaacatcctgaggggaaagctctgtccatctacccttttcggggttgtaaacctgggtgcccttaatgatagcggtgtgggcaggaaggttgactccccaagctagggtagcagtgcagacaaggacttgaatatggcctttctcaaacagttcttcaacatcggctcgatcgacgggagtcattccagcgtgatgaataccaaagccgaaaggaagaaggtccttcaggttcgcatcggaagcatcctgggcggcttgaatgagaatctccctgacagctccttcaggcttgacgaattgagtgatcgtctccttctcaatggccatatctcggataaactttgctgtcttggcggtctctttcctggaatgaacgaaaaccaatgtctgttctttaccagcatagttaagaactttctcgtaacaaacctcattcatgatctggaaacgcttgatcggttttttctccgtaacgccgatgaactcttgttgaagcggacacggtcggtacgtcccattgaagtaaaacaaaccaacgttcggatcgacccgaaggaaggtagcgacatctttgtaattcggaagtgtagcggagagaccaaccattcggacaggatccccagtctgctcggcctttcggatcgttcgggagataattgactctagcactggtccacgctcatcgtgaagcagatgaatttcatccacaatgatcaatcgaacgagattcgtgtaagacgtctcggttgactttcgagtgatgacatcatacttttccggcgtggtaacgatcacctgggtttctgcgatctgtgccttggtgagctgggagtctccagtgagctcaccaactttgatgccaaggtaagagagtcgcttggtaaacgttcgcacttgctcctggaccaaagccttcatcggagatacatagatgatcttgaaagattcgaggtcaatcaaacccgttcgctcgtctcgaaagttttggattgctcgaagaatagtgaggacagcgacgttggtctagaatttgttaagtgaacattgaaagaaaaaaacaaccaaacaaacataaatgatgcaagtcagttaaatcacgtgaagagagcgattagactgttgttgatgacaaacctttccggcaccggtgggggcgcaaagcaatatgggttcgtccgttccgaaagcgatcggatacgcttgactctgaatcgggttcaatctactagactctgtaccgaaagcctgtctagaccattccggaagttcctgaatattgactagatccccgtcctgaatctcgaccttcttgggcgccttgacaagaatgcggtcgtaacccttgaaggaaaccttggtggatcctgcggggagtgttggcttacggtttgtgttcaagtggcttccttcagtgaagatcatgtcgttcaggtctacagttcgacggggctgagcaatgagcgagccgggagctatagtcgccaaagcttttgctggcttcgccaatacagaatcgacgtccatggcatctaaggtagatgaagtagcggtggcgatagcagatcttccgcctcttccaccagaaagttccctcaaaatccacccaacacctttttctcgcatcgcaacctccacatccttcttgtcatcttccccgcttcgtgccaacttggtgcaccaaatgatagcctccctgttcttgataagaattcgaacgaggtcaaacttgtcgtagtcgaagagttccatgagcgaattttcacagtctcgaaggttgaactcggaaccaagaatatcgagcgttttggcggtgaggtcgcttgaggtgacagggtcaggataggactttgcgataagtcgctggaggtagaaagcatcgatgtcgtgaagagagatcacatcagaggcggcagaagatttctttttggatgatgtagaggccgacgttcctaaaagtagagtatcatctccttcaagatcatctccatcagccatcgggctgtccccatcgtcttcatcattttcgtcctcgtcgtcagagtcagactcgtccttgatctcaaattcttgtccgtcttcgtcttcatcgtcgtcctcaccctcgaactctacggcgacaccttcttctccaaagtcgccctcgcgtttaccctcaccatctgcaccggtcgcgtcctcctctccccagtcagtgagctttttactcaagttcaggaacgcggagaacgattcagaatcgacgttgccaacgatgtcttccatttccctcttcttatcaaagtccttcaagtcatctgccttgaggatatcgagaacggtatcggtggcggatcggacgacgtcggctgcctgatcaccgagcaatcgatgggtcatgccgagaaccaactcgaatacttctcttgtctctgccgttttgggtcgatatgacacaccctccgagtctaaagcagcttcgagaatgtcttggtagttgccggctcctggcacagaagacgtgttagttgctcctctacggaccgatcgttctaccaagtcggcagccgaggggttcttggcctttttcgccgatgtcttaggggcctctctgtgaacacgagttcccatctgggactgatcgatccgaccgacgagagattctgcctctccagtaggctcgaaatcacgtcgcggaatttttgaacggtctgaaaaggtacacgtgaaagcgtgacaacagagagagattggagataaaagcaggagaaaggatcggatggatatattgaggtggcgaagagtaagggacaagacggaaggtgagagatacgcgacgatgaggttcccacaaaaaggcaagcaagtcaagaagagaacaaaaaacaacaaaagaagggcagagagattgtttgaaaagaaagagagaaaagaacataccggtctggaggaccaaactactcatgttcccatagttgtattgagacagatcctgttgcttggacatgatgggctgatgatgggaaagatggatgggtagtggaagatcaagagaaaaagaggggagcaggagggagactaataatgtggatggcctgcgatttgggtaagatcacaaccccctctggatgatctgagagaagaaataaagaaagagaaagagatgatcagaagagaaacgaagaaaaaaagtggtgggattgtcggtgggaggtgagagaaaagagtctgttggaggcgagggggaaaaaaagcaagagatcggcagtctaggcgagaggaaaaacaatagagaatgttggtgaaaatcattagaagcatctgtgagattcagtaatagtccatattttgatagggtcggtccggtatgacttgcgatcgaagtctcgttcaagaaaaaccgaccgttttgctagtttcgtaatcgttttcctagtcctggtctgtagtttgtctgcgggtctggattttgtattgaacattcgaatcgcattacgcgatagctctagtcgacttcctagttctttgtctttgcctccacttcgttcgttccttcgttcctccgcttctttttcactcttgaccaaatcaggaaaaatcaggaacaacaggaacgaaccccatcaggacagatcaggcacgagttctgttcctagatcattcatctcgcccagattccatcaaggtttgtctcttcaccaccaaatccccatatctactcctggtgatcccattcgttagacaggagtgaggataggaaaattgcagacagggaacgcgtgaactgaaaccttcatccatccatccatccatccatccattcgttgccctcggattctttttccttctctctcttgtagatcttgaataaattctggcatccttctcctccttcctatctcatccagagacagactccttggcctttctccacatcggcattctatccagttggatgcctttacccatactctatctccgctctgtcgtacgtgttttcttgatccgggctatgcctcttcctccttgccgattgaccttaaactcatgtctttcgccctcatttacgtcacctatcgacatgacatccagctctcttaccatccgtacgcgatctgaggaacatatgccacagtaggaaactcatcacctcaacgtaattccgtatgttccaagttgcttctttgcttgttggcttcatctttttctatcgctggcaacttcttattcctcactctgcttttattcttccttcttgaattgttcatttttctctgcatcagttgtttcagaaaatcgccatggactcgacagaagacattgcatcccttctgttagcacttcatgattcgactcctcgaacccatctgcccgtttctggccaacccacagcgtctacctctcaattgccatcttcatcatttcagtctgatcaacccctgctgccctcaggagcacctcctccagagcatgtaaaagtggagcctctatttcaacctcatcctttatcaaccaggagcccaggccatcagttatcttcatcactgggccctgcatcgtcacctgggggtcatctacagaacaacgcaaaccgggatccaattgagattaatacatcttttcacattcgtaccaaatccccttcaacaacccttcagaatctaccacccccaccggtgatccatccagcgatcccgtctccaccggcgatagtagagtccacttcttcgtcaatatttcctacgccagatacagactcaaagccgacagctcctgtcaaggcactcagtccattggtaccattggatgctatctccggtcccgccgctgctgcaccgacggcaagaggtacgaaacgaaaaagaggaacgggctccaaagctgacaccaaagcaaaatccaaatctgcccttgtctcagcagagccccttaaggttaatgcacaatccgacgctcatgtccttcatcccgatgcgggaatcattcgatgcatctgtggaatcattgttcgttcacgttcttctctattgctgcctttcacgcgtgttcctgacttgatggttcgcgtcaacttattaatacgcgtcatccctacaggacgatgatggattcaccattcagtgtgatcactgttacgcctgggagcatgccgtctgtatgggtatccaagagggaaatgtcccggacgaatacctttgcgagctttgcttgcctcgtgctatcgacttccacggagcaaaagaaaaacaacgagccaagaaagaggagctgactctccgtgcagagatcgaagctgctaaggcagtcacacatccgcgaaagacttcggggcctattggatcaacattgacgacgggggagaaaagttcacatcaggcctcccatagcaagaacaagaaatcaaatcatcttatacgagaggtccttcacccaccttccaaggactcccaacccctttctatcaacacatcttcgctctccgattctatttcggctaccaatggccatatagtcctctcgatggatactcttcctgaacctcatatctcgacttcctcgcaaacttcctcgacaaaccaacgagcacactcaaatctccatctttcactttcttctatccagcagcagtcgctcgcgactaccaatccaccttcgcctcaacctggatcgactaactcagctgtcgtcactcaagatgaagatgagaagttcgagccctggacgatggagtactttcctgtccgtgaaaatgtggtgagagatccaattgtgatgaacaagcttcatatcctccagaatgtctgggaccgaagacttggtggattggtcggcccttcgttattatcgtctttaaccaagctaaattctgaggtcgagtcgtctagagaggcagagtctccgacaggaaatcaggttgaatctcacgaaggagacgaggatatgaaggatagatccagtcctgtcgtgtctgtgacatccacaaccaaccagtcggcgaagagtccagtccctgtgccgattcaagtgcccccggaatacgaaccttcgttctcgactttgggcaatttcttacccccggtccttctttccgctcccaatctcgcttcagtctcgtccaaacttcagattaaatcgcttcctgcgaatgctccatccaatccccctcaacaatcgtttacgctttctcatccatccatcacgacatcgctcctccgcccggtctacacccgaccaaacgcgtacgccgtcttcgccgaaggcctcatccctcaaggtacccttgttggtgagctcaacggagagctcgtacagggagaaaagtacagacaggatcccatcaatcaatatcggtttttaggctgtccaaaacctggggtcaggacacttgggccgggtgttgaccttgtattggactctagagggttcggaaatcagcttcgatttatacgtagtagctgtcacccaaacgctgtgctacggccaatgcttttctttcgaaaccccagctcaaccgctcgggacgcatctgttccgcctgccgacttatcaccttcagacagcaatccaccgtctacacattctggtacagccggcgagctcttattcggagtgttcgcatcgaaagacatttccaaacgggaagaaatcaccttaccgtgggaatgggacgacggtcacgttgtacatgcccttcaaaaactcctcgactccaagttctccggtccctttcaccattccttattcggcccttcttctgcagctactcctattgcttctcacaatcctcaaaccccgacaccaacatctggaagtcgacgaaattctctctatcctgttgatgaaatcccttcccttgctgagcttgttcctaaattatcaatcgtactgatccatttgacggggactttcgcgacttgtgcttgtctgaaaaagaaggattgtgtattgtctcagatggctaggcttgtcgaagggaaaccgttctgggggctggttgaaaagactgttgggcaaggaaggggtggaaggagacctaaaagaccagatctagggccattgattggcccagtaagagggtggagaaaccgagagatggagagacgggcagaaagagagaggttgattgaagctcaaactcaggctctgacccaggcgtcggaggaagtggatgaagcggagattgttaaatctcctgaacgatcggatcaagtttctggagaagtggaaagtgctacggaggctgacgatgagcaagaaaacaaagagttgggtgttgaggatgaggttgaggtcgaaatggaaaccgctgctgatgtgcaaccgcaacaaatatcgccgcgtccggagcgcaatttgagcccgatcaaacctgttacgaaggtcttctcaggaagttcgcaagacgaggaggaagacaagatggatgtcgacgaacctgttggtcaaggactagctcacgaatctgttcgtgaatctccttcaacaacggtatcttctccttcgaaacctctttttgcaacaatcaacccctcgccggtagccgggccgccatcgtcgacatctcttctcaataccgcgcaatcaaaacatccacactcagagtcttctcaacgacacagttctccaacaaaatcttctcgctctctccctgcttcatctcctgcaatcatcaaacctagaaggtctgcatcagacgtggaaccaactgctgatgaagatgctggcaatttttcagatgcctcaactttgaccgagcccctctccaattatgactcagattccgcgtcggatgatgcaggaacatactcgtctccttcctcaatcatcgagtccgactcagaagaagatgatggagacgaagacgaggaagagacacaggagggaaggccccgaccaggtgtagcgcatacatccaaagcagtactttactcatctgatgaactttcttctcctggtcctccgtcatctcctacaacctctcccccggccctatcagcgcctatgacacctttgaaattggctcctgttggccgtagacgatttccaacacgcgttgaatcagaatcaccgtctagttctccgcctgacactaacaagacgtccgttgaggggaaggttggcgacgagggaggtagtaatagtgccaacagtatacaaagcaagaaagagaaggacgaggacgactcgatgtcgtctcatccatcactgtcctctatagccttgcaatcgccgccaccacaaactacaacgacgacggtcatgcctttcccaccgtctccaccacccgctcacctcgatccctggatctcactctcccttgtcgatgacgtgaatagatccgctgaaaaagctatcccgactggtcctcgatcgctcgtaggtccgccacacctaacgtccgcaaaggattctacacctcttttaccaccttccccttcgcctcctccgaaagaaccgacaccaccgccaccaaaacctcccacgccgccgccagtcaaacggatgagcttgaaggattggagtaagagaaagaaagcagctgcgcctctgcctgtcacggatagaacggtagatgccgatgaaagcacacatgatctttatcagttagtgtcttctctcttaagtgcctcaatgtttggacaaatcatttattaatactcaatcgatattttcgactgcttcttcttgtctagacctcaacagccgcattcttctagcccaaagaagacaagtgaatcgatttccgtctcacagttacctgtctcagcatcttccctcgatacaccagacgatcttatttaccctcctagttcaccagatgagaattctgttgctatcaacgctcgtgtcggggctgtcaaggatgctagtcgtcctcctaccccttcatcggaagatgaacctatccctggattcactcctcgacaatccagagttcaacaatcaagtctgacttcgatgaacgttgaatatactaaaatgccacctccgtcaccatttttggctacctcttctgaaatcaagacgcaaaattcatcaaatgaacctccctcgaccgtctttaccgatccactgatgtctcagaagatggaaacatcctgttccttgccaaatgcttggcaacatcgtaaacacgaatcggtcgatgttgaattcaccgaacaccgatctatcacgcctccaccttccatgatgctgttatcatctccaaggacgcgtcagtcctcaatgactcacatgtcggacccctatgctcgatcgccttctcctacaggtacaacatcacctagcacaactcctcctttaccatatcgacagttaatcagtactcctagatctagtgatccgccaaaaggaccagcatctagcacgtctcgagtcgcaggagtcttaccagttcgaaggcctgagagtagtattcctacggggccacttaagtcgcttccacctcttcctccaagcttaccagcgaaaccaacagctgtccgaccaacccattctcctactcgaccccgattcagtacaatggatcgagaggagccatcgcatcatatcgaacgagatcgagaggtggaagaacgcgaacgagagcgagaacgtgaacctgagcgaaatatcgttcgtgaacaacggtcgtcaataaccttgaaggaatcaccagtcttgtcgactgtccctctggttcggccacctttccatccttctcacgttcgtcctttcggacctggcgctttcagaggccgaggagctctcgccggcgtgccgtctggacctagaacaacttggactccccctcgtgggccccgagggatgggcggtcctttcagaggtggtggaatgggaggtagaggaatcagtagtatgccggcgtcgggaatagcacctagggcaccaaggatgatggtacctgctggagaagaaagggagaggattgatactaggttgccaccaccaacaagatcggagggaagggacatctcggagagtccgagaggtgcgttcagaggaagaggagggctgttcagagggagagctagataaagtatggtctgtcgcttgatttggttaaactttgatctatcaactcatctgcttttcaataaccaatcattcaatctctctcgtcattcaaaactttttctctatctatctttcgggtatgattagcacaattcgatgtcggttagcgttctgcacatgttgtgctaattttctttttcttctttagatcacgttctcgaattgatatgatgttgtatgactagcagactcaacgacttatccatcgttttatctgacaggtttcaatcgaatcgtcacgtaatgattgtgatatcaaagagcccagaaattcagtaatgcatatgaggtgaactaaaacgtgtgcaaaaacaaagaaagtagataggggacgcagcggaggacgaaaaataaagtacaatcaaataattcagcgttcagagcttccaacgtctcgaatgagtggtccctccatccactttgcgaggtcctatcaaactttctgaatccgatgaagaggcgtctcccggcgcggagttgacgacaaccagttttttgccatcagattgtgcgggataatcttgaactgaaggagctgattgagcgtaagacctttttgatgttgttgtcgtcaaagtcgccgcctgaggaagaggggaggaaggagtaggaatggttgatgccataggatttggcgctataccagtacttgttggaaggatgggcgaccgatagcctggacctcgcctgttcaatataggagaggcgagcgagacttcagtcatgtctccctcgccagccctattccattgtccaacagtcgatttatgtgatacctggtcagatagatgagaatcgagcccgttccgctcctcgtcgtggatccaaaattgctcttgttgacgccgtcttcgctgattcttggaaaagaagcaccaagagagtgaacttccaacaagagtcaatatgatgaataccaggagacatccaagtagtatcgcgggaacatttggttgctctggcgaggtcccgttgcgggacatatctgtcgagggaatatctgaagtcaatgatattgattgggaagaccggctcaaagaggctgtagaggcaatgcggtagagaccatggtcggaggtggaagatattgacgcctttgaagaaacactagagacggaagagcttgtagtagccaggctggatctggatgttgttgtcttcgcaatgcttgtcatcgtcgttgtatcggagagtggtgagactgtagatgactgcactggctgaacttcggttgatgaggtgattgtgggaagcagaggcggagcgccaagattagacatggcaaatgtgatccgaggaagatctttcctggttggcacgtcctgctctatctcttggaacagagtcaaatgagcattcacgtcaggacggaaaggatcgggtttcatcgttggcatgttcttgaaatcggtcggcgcgaaaccagtcgacaccgagggaagaattctattaatgacgcgtaaattgagagccatgttgaggagaggactaaaaaagggatttcgactaagaaaaacttagttcagatttcggtgcaatgagcagaaatcatgagcagaatgatcacagactcactcaacgaaattagagatgcacctggcactcttatactgcagctcggcaagaattattagaggaaacgaaaggcaagaggcacaaaggtcgaagagagattcatagaaatcctcgtcatattccgcacttgcagctgttttataggatgaagtcgcaaacgggaaggtcaactggacaccgtaagggttaaagcgggtagatttcaaggtcaacacgatgctgccagcggaaacaacgcataggcatacatatctcacacgcggactagccaggtattaagctagtcgaatagtcagatagttagccagttagtgtctcaaaaggaagctctgaatgttgttgtcgactagacgtagtcgacggtcacttatggcacgtagaggtttggaaggcgttgaccgtcatcctctatatata

SEQ ID NO: 2642 - DNA, 9894 bp, Xanthophyllomyces dendrorhous
ctatatatatattctgacattcgacaaccatctacgatagcagccatgtaagtgtcaagactcctatcaatccttctcatactcgtaccaataatttgttccctcaacagggctccgaaagggaaaggccgagtgtccaaaacaggctcaaacacgccacggtcttcattagcaccagctgatccgactcagccaactattgctgtaagttgtaatattcgtgatctactcttagttcttatatctcatcagctcataaaagtttcggtgtcaatgatctcagtccgttgtggactcgctatccttcttttatactcccagaccattcaagaatccagactggcagaagaaaaaagatgcgaaaccccgagcgaggaatctgaagcagatgatggtagctgaaagagaaagaatgccgcgtcacatcctgccatctggtgagaagggagaagttttggggtgtgagtgttttcaatcattgatcatggaagttttctcagacgggagcgaagaaagatgtgtgcttataacaaaccgaccgtgtgtttgtatggtgattctggcagatacgactctgcatcctccaccatcgttgctaccgcccaaaaagtactgtgacatcaccgggctcgaagcaccctacacggatccgaaaacagcgctccaatatcattcaaaggaggtgtacgagatcattaagacccttgtacgttccgaagtcgacgcttatatctaatttgttcatctacatgtaactgattctgtccactttatacatagccaagaggagcggaccagcagtatttggaaattcgtggcaaaaatgttatcatcaagtagacactttatcgggaagtctgtattttgtttcatccatatatcttgcctctgtgcttctttgtaccatgtatacctatcaaccccctcgacgagacttgaccgttttgtccacgagtcaccataaattcagtatttcaacggatgcgaatctgattggccacatagagtggacgaacatatgaatgacatgagtatatgaagatatattgcgaatgtatagtgggtttgaatggatgcatgcatgcgactgttgctacagaagaatatgataaagccgatgtgtagaaacaaatgaaaccccaaatttactggaggggagatacaagtgggaagcgacgattgatattcaattcgctataaccaaagtggatttttctacaaaagagagatggttttaagaagcaatgccgagatgcgctgaactacgaaacaacgctcaatgtgttgaagaacgtcaactctcgcatcgtccgttcgttgatgaccaactcagccctgttctttagtcgagcgattacatcccaacagaatattgtataattgtttccagccgctgtgccttgcattttctgaacgaaggaatggcacaagatatatataatacggtagcatgagcgatacattttcattattgccacaggttgaaatgctgaataaagacgtacggtaacatgatcggccatcgagagaagcatgtctctgacacaagacatcaaataagattttctttgaaggagagaggtatttccaaacgcgttccgggacagttcgatatgtaaattcctgaagatctctattgcatcgaaagaagcggagaatgagttagttaaagactttcaggcagagagattcgaaagatttaatgtgaatgtaccattcaatatgtcgagccgctgtgcttggagtttttcggaatcaaattcgaaaatcccatgttcgtttcgctcaattgggagctgaaagaagattatatcatccagtttatccatctggaatagaagagatgtataatgaggttcgactgtgaatgttgaagcgggcgctacgatagactggaaccaaaccgagaggaagtgttctttgaggtgctggaaagtaggaaaagtatgcatatcagatagctttctacaggatgcatccctattgatatacttacttcataagaagaaggattcaactgtgcaaggttccacataaaccgaagaccgatttgccgcttggtggccgattcgctaaatcgtttccaagactctgtccccaattccacataactagaccaatcctatatgacacaaggagaaatagaaaatatgagtacttttggtctgataagacgaaacagatcaatgacagaccttcaacccatgctgaacaagtacgctagcacaaccagaccaacaatctaccaactgagccacatagctatctctcgctctcgaatcttcctctctcgaaacttcggatcctctttcgccaacgagttggacccaagcctgatcatcaacgaccatattggagagaagcttatagatagcaggagagacgatttggttcacagttgatgcaaatttttcgtccatagtttcctcactacgcgcaacagtagcctctgaggattcgccaaacttttttgcagaaggtccatcgagcagaagaagtagggttggatcgttcatgtcgatgtctgcaaactcagccccgaactcatcctgagagtctcccgctggattcggtggaggtgtatgaagatatgagagcgcagatcgacgggcgtcgaggaatgcctgaacacaacgaaggacttccaggcctgtcagaggttccaatgctagaggagaggccaaaataccctctgtccaagctgataaagacaagttatataaaatatcagtctgatgaaatataaagaaagggcaagtcgacaatgaagttataacactcacatttgtgaagcaacacgggatcaggatatggtgttttggaatgacctgttctattttgaatactgattatcggtgaagatatgatgtgtcggacagatcccaaaatcaacgaaagacaaaaaataagctcgtgtttcggagctgtgggactgcctagccgtacaactcctggcggtcgatctatgattgacagctcttgaagaagaacatcggccaaatcacctagccaatgtgcgacgctttgcaatgagagattgagatgacggtgaagcactgccatgtacatcatagccctgatgcagatcttacgagacttaaagtccgctacctcgaaagcaagataattgcgcatctgtcgcaaagaatgaacagcagtagcttcagcaggatcgagaaggacggagacaatcgagaaactgtagcgattgatcagcgttgacagctcacgcatgcttggaggacatgaccgagtgaatgaaactttgcccatgggcgcagaaatcgcaagaagtctagagatttctctctcggcctgttttgtggtgagctcgccctgtgaactagatttttgagtgtcacggaccgccaacgcaatgattttgatgaaaacatgaaaggcggagtcaacacttggatccacttcggaaatgagcgaacgattggattcccggatgaaaagtgggaaatccgaaacaatggggtccgaaaataggttgagaaactttcgtgttttgaaaactttctgaccaagttggccaagaatcggatcctttgcgttcaatggccatccccatcgaacgccgagaaggtaacaacgacttagaacagtccacacatatttgtcgcgcttttttaaattagaagaggaagcctcggcatcatatgtggagtcagcctccaacttgaccgatagaacggcctcggacacgagtggccagtacgcaagaatgaaaggggtatcctcggtgatccctcgccggttgaactgtgagatacaacagaccccttgaatgacataccaaatcttctcagcggctagcaagccagaagatattattccagtagcttgtaagccagcctttacagcgatccagaaggaaggaccttggggaaaatcgagatccatatacggacagaggtgaataagagaagcccatagctcgatagttaagtcctgaacatcaggacgatattcgttcgcgcctgtcaacgaagaggatgcagtcttgaccgatctaatggttcgactgaagtcatattccaataagcgacggacgaggattgaacacagactttgctgagaatctcgaatttgctctatcaatataggagaagaaagcgcaaatcgggtggccagctccagaagaaaccagtgcagtcggaagaagagtccgcttcggatatgtttcagggaggtgggagtcgtcatcgtttccaatcgttcaagaagagactctattccatccataatagcggggaagaaaatgtccacatattcatcatccgatcggcgatgcatcacgaataaacaggtgaagcgcatagctcgttcgcatgttaactgtaccttcgtttgggcgtcaatatcatcgtggttggccaattgagagtccggatcgaccgcgtcatacaagcggttaacaatgagtccaaatgcctccgagaacagagagaggggcatatcagccgtaagctctagatcgaacgcggagcatggaggaggagcaagtatagattttgaggattgaccctcttgatggagatagaaaatttgacagaggtcaagaagttcagacagatagccctgacgagaataagaaagtgaaggaaaagccagtccagccggaagtggtgtgatgccgaagtccgtcgagaatccagcgtaagtatcccacaagactcggggacctggcgaggcggcttttggcgaagactgcccatcaccgcgatctactgtcggaaactcaaatggcaccgaacttgcagatgaatggcgagcaaagactcgatgagaagtaggtgtatgaacgggagaatcatttccttgtcccactagtcctggcgataggggccgtactactataggcggatttggtctgtgaggttggggagaaccacgagcatgcacggcagggacaacccgaatacccgctcgacgagtctttctacgcaagagagactctccggtaggcccagctggtctaggagggggctggaagtcgccgaaaatactatcatcgtccagaaagacttgcgtgggccgaatctttcgacgagctgccggtcgggatgctttcttccttgacttagtcttgttgagtgcggctcgaggcggatccgtccgtttgatattagaatggtttaatcttgaaagatggggttgagcgcttagacgttgtgctcgttctgcgctatttcttgagcgtacggccgttcgactcagctgtcgatccaccacactctccgcttgtttgctcggcatgccgatccatcgcctgatatcgtttgaggcaaattcgaccgcttcgtctgaaaaataccctgccctatcctcatcttcatcaaggtttgattcttcgtcatccgtctccggaagcagctcaccacttgtcccatatatggcattgaccaaggctggatctacaacatctcgattaagtatcacatctagttgtcgatgtcgaacttgttcaacaaccatcggagcttgttcctcttctgccgatgattcagaatccccctcaatcacaaacggtcgtttggtcgctccgacagttcgacgaacgacagattgtccagctcgaagagggccctctggtatttttgctacatgtcgggccgctcttttgagcgcctttcgatcagccttatcctttgccaaatattgaagatgcttcttggcgagcacagcaggcatcatccggtttaggatcttttgtttcttgcgttcgaggatcattgtggtagcctcctgagacgatgaagaggatgatgaggaagacaaggttttgctctcatcgtcatccaagtgcgaatcggaatgagactcagaatcagaagtcaggttcgagtctgcatcagatgcttccaagactcgtcgattccgtctacttgtaaatcgtatggatctacgtggtgccgtcagagaaggggaagcagtcctatcttcttgcgcgtgcgaagcatcgatcccaaaggctgtaaaatcaaaattctggctttcttcagggttcaatatcgtgttcgaagcgtgcattgcacggagattgggatttccacctggagtaatttgacctgtaaggtgggatcgatgcatgggggtcctctcccttactttccgacgagcataagtccgtttcgatttgctcgttccgccgaactagagaagattatacatatatttagaaccccttccacctctctttcatttgattagatcgacaagcagcaagagaaactcacgagagcggttttttctttccttttgacaactctgttatcatcggcatcttcatcctctgtatcgccttgtttgcgctctccatcttcagtttcagccgtctgctcttcccttctatctacttctccaacaccgggcgtccatgtttcttctcccacttccaacatatctaacaggtcatctccttcttcctcaagccatcctcctaaagaatcctttccgttcatgtccttatctttgtttttcctcgagattttgtccttccggagctgatcggcctcatcctcttttccaagtaacgcatccttgaaaccacgcattgccaagcgctgcttgtatgccaacctctcccgagtgtacggctgaagctgaagactggttctctgacgaaggttgcgcttccctggtggttcatcggtggtgtttgcgaggaaagcggccacttctgcatcggtcatcgctggagccagaagtttgttagatgaaccaacaggagaagatgggccagcagaagtggattcgatgatgggaggagattgagatggaagcaagattgaacctgaatctggagccgatggatcaagatcggctgtatgaattgcgctgagagttgagagtggctcgattgaggttggttgatccgtcacatccgatttagatatatttatactagattgagagaggatcgagctcccatccgattcttcattaaggattgataatgagggcgttaagctgggtatgtgaaaggatttttgggtatgtgctagctcggtgggtattgatggacaacgttgtatatgtgggtcctctgttgtagaagataccgtgagtttagatacaatcggggtcggacttgatgggttgatcgatgcaaatttggagggtgatgattcaggacctgcttgaagatttgtctgaattccattcacgacaagagggatagtcttgcggcagcaaaacaatatggcgagagattaggtcagaataaatccttatatacagcttgacaacgcttaaaagcttacacctgtcttgtctttgactggtccatcaggcttcaatggcactgacaaagagtcaatagctactgacggcgaaggcattgatgatgatggcttctttgccgccacaagattcttatgatcgaccagaagggattcgtctatcgtgaccttggttaagtctgggataaatagattggaggtagaaggcaatcctgatgggaaaattatcgaagcgctcggaggagtaggtctaggtgcggtgataggagataaggacaaaacgtcggagaacattggtccaactacctcattctcaaaccattccaggtcatgtgccggtggcagagaatgagtgggagagaacataaatgattgaagcaggtcatgacgggaaatcccaccaggctgttgatttgaaacgagagctcgattcttaggtgagggtggaagaggctatattttattcaaccattcccagacatcagcgccaccagaggttttcaatcagatctatctagttcaagcacaagaaacgagaagagtccactgacctcgagttctatcatcacagattgttcgtaatctcccattagagattttgtgtcttgttcaacatcctcccttcgatagagagcgtttttccaatatgtgctgttccatgtagacttcgtcaaaataccctcttgttcttcctcgtggtccgatgtaggaactggggataaatccagatcacaaagggcaagttctggcgattcattgccttttttcttttggaataaggatggactgctgattgagataccatctggtacaggatttggaagagaggaaggtgaagcgaaaggagacaaagatgacgaaagcgagatatcaggttcgtcattgtcctggtttgggcgcgtaacggaagaagaaagacctgatgttagttccgaaagagaaggggcaattctccttcgttttagtggtgattctcctttgatagttgagcgaaaatatgctccgctatggccaatgatctgctgatttgttgtaatgagtggtctggcagatgagagggaatcaagagggacctcttcgttcaaggacagtgtgtccagtgcaagctcattgcttgcctcaccagacgattgagagaccatgtttgaaccaaattcttcccgaacctggagatgatctctcggtgaacgtatgtatgtgtgcgggtgcgtgtggagttgtacgaatgggtgtatgtatgttgctaagacgaggtgctcatcctaaatgagaggcccgttgatcgagacgcgttgggaaacgcgtcatccagacgcgttgggtcacgtgctttataatcacgtgcctatcttcttttcgcactcttgacgcaatcgttcccaactcccaacattttcttcgcaactccaacaatcctacacgagttataccaacaccaccatcatcatgtctgccgttccaccagaggcgcttcgttcgaagcttgagtctggactcgtctctttcaagcatgctgtgaatcgttttactcaaaactcgtcttcaagcttcgtggccattactgactgacgtgctctgcttctctccttctctgcctcgtttcacgttacggacacctttctgatcgacaggacattattgattcttcgtccggatgtggaatgagctactctatcgtcgttgtcgctgatgactttgaaggactcaacacgctcaaacgaaaccgacttggttggtagatctctttcctcttcctttcctctcatgtctatttcgttcggatgagtccttgatgatcagcttaatggaacgcatcggctgacgtgaggtatgtctatcggttatgttctctggctggttcagtgaactcaatattagcagaagaaattgctcagcttcatgctttctcccaagtaaatatcctctttttttgcctcattgtctgaatcgtttgcctgacaaagaaccttctcgccatgaacggttggaacgacagaaaacgttgacgtccgctcaatatcttgctcaagggggaaagatcgccgcaaatccttgaagaagtcctcgaactttcaacatatcgttctttccatactctgcatcgttcagcttaaatccatatccaagccttacttatagtccctcagggctatatatcttcttctctttttcttctgatttctcctagttctgcatcgagcgttgacttcgtacgtcgtccttacgcacatatttcgcaaatgtttctttctattcttccttgcgctgagatgattagatacgcaatcggcatctcttttgttttctatggctgccgcttatcagattacaacatatcggcttaaaccctctttatgaatactcgtacagttacccaaagatgataaggacacccgtcatataattgagacctaacgaagtcaatgagaaacaggagtgcgagcgtcagagagcagacgaagaaatactcgaccaccaagcgttatagttgggagatttgtcgataaaccaaaagatattgaaacatgatgaaagaactatagaggatagggaggaacgggaacacatgaggtaaactaccgacccgaataatttctacaacaataagacatatttaaaagaaaaaaaaaacagaagaataact

SEQ ID NO: 2643 - DNA, 16294 bp, Xanthophyllomyces dendrorhous
caatccaggaaagctctctatgcattatgttgtatattcaccaagcaaccaaacacacaacaacggagaagggcagatcgatctatatacatcaaggaaacaaagatgggattcagagcacgcagcgctcctccctcaatttatatcagtttcctcagaggcttctcaccaaggaaaaacgagctcttctttgctccagcagttttcattattcaccagcctgaggcctgtttgtgagcggagatatgtgatagagacgttggcggcatcaccgtacgttcttgaacgtattggtcaggcgctggtcgaggaagcgcggtttgaacggctgtaagaaactcaaccacatttggctgattgatgccgttctttgggtagggaggaagaggtaatggatactgctgtgccaagaatagatctcgttggacggcctgaacagagtgaaagtcgaaattcttcgcgtggctcttggtcgatacaggtcgaacagagtagattggcaaacctctcggctgtacagaatcaaacttgctttgagtgaatccgtccagttctccgtggtctgaatcagtcaaggaggaagcggttgatgcagaggaggataaagtaggcggagggagctgagtgttcgcgttgcgatagacgaaaccgagaccgagctgaagaggcgggcaaggacgaggaccgtgggagtcggggttgtatctcaaattatactcgaacgaagagttgctgaagatatcctcgagtacaggaagctctgaggtcagatctacgcttgcagagcggtttctcagcacgacaggtttggtaggctctcgtgagaccttgataaatgttgacaaccgagtcaatcattccgaaagatataacagtgacacgataagacaaactcacaggtcctagcttaggacgagcatccccaataataccaactggatcggaagagcgacgcaggactatatgctgattagagtcatcctgtttgccaaggaatgaggctaggatgcttcccaacatggattgtgggggtcgctgttcgaaagaagaagagctgatagtaggaacgataggcaagggttcgttcgtcgattcgcccttcattgtgtatgccctcagactttccccttctttggtgtagacaagcacagctgaaggtgttttgtctagctcggctcgagaatcggagatgcagtcttgtgtagagaaatccgatctaaccctggagtttgtagaggaaatagcagaactaccgagatcgaggatttccataggttgtgaatccttgacgcggagtgcacggatgacgagagctgtcatggcggttgtgagctcgcgagtgacggttgaatggatcttgaggaggaagggaccccagatacagagatattcagtattcggatacgcaacagagaacctaggtatacttaccgtcattcggacgaggtttgtcaatccagcggcactgaagatggcaaatgaagttttcaggatgagctaaatccggatcaaaggatagagaatgagaaagtgatgaatacttgccctcgggtaaaatcaccctcaacctcgggcctatttggatcgacaatgtttgacgattttcccagctgaacgtatcgattcggttgcctgcggtcacaatagagttgattcgatggttgaatatgcaggcgagcagaaagcgatagatagtgagatcgcttaccggagacggaactcttttctacactggagaagagaacacaatggtggaaggatgtcaactacagttgtgaacaataaggcaaagaacggtagaaccaactcctggaattatgcccatctcaaggataagaccaccgagcgaaagtctcttttctatctcggcgggtgtttcttctactgaggacgcttctcgatccgttaaaacctccgcagggctgagaaggcgaagagaggtcacgccgtccagaggaatgaccatctcgtgccgggcatcgtcgaggaggagacagatggacggtggtgagcgtagacgaagccgaaactacgagagaagaggggagaagggagaaaatggaatgggttgtggagagggccctgtcaggcacccggctgtatgcgacagattccaaagagatgaaagaatcgacggaccttgagagaacctctggactggctaccttgccaaagcaagggatttccaagttctggagggttctcgttctgtcctgttgatggcagctgatagagagcggcgtgctgaagatgctatgagagggaaatcgatcaagaggaaccatatatatgtgtgtgtgtgtgtgtgagagaaatgaaaagaaaaaaaaccgaaacgacgcgcaagactggaacgcaccagatcaaagacgactttgtgtcttggctggctcctcttcggtggctgtctgggtggtgtctgtagaaattgagccatgtctatcagagagaagggagagaagcgaaaaggagagtggaggatggatcgaatgaagagagagaggaaagaagagaagagagaaggcaaagaagaatgacagtctccgactctttatgtggacaggtggtacagagagacaaggatatgttaaagggacagaaaaaggacgtcagggccgagccagggccatcttttcaggaacggttagagaacgacctgaaatcaggacagcatgtcagttgaatagaccaagttacgatgatcaagttggtgattgatctaaggctcaaccatcagaagcagacaggtaggagagtgagagaatgtgtgtgagtgtgactgagtgattgagtgattgagtgattgagtgattgagtgaatgagtgaatgagtgaatgaatggttcgagatcctatctgaacaaaggtagttcaaaggcaacccatgcacaccatgaacaccatcaacaacaaacaaagcggatgtgcagtcaagtcagtctttttgattgccaggtcgaagtgaatggctctttgatggactgagcagtgtgattgaactctaaccgtcggccctgtccgtaagaagatcgcctgccgacgggtaatcatagcctgggatgttagggttgcgatcaatatcacgtgtgccaatataacacagcctccacccattatataatcgcacctctccttcgcaatgcttcggctaatctcacccgcaactggaccaactccatcctatttttgacctctcgttctatccgttctatctctcctacatccgtctagcttgcatttgttttcttcttcttgcctatcttcctcttcccgataccaatcgctccaccgcatgacagagaatttaccagccttatcgttattggatgaagaatctcggtcttcaattactcatcacctggtcaaacataagaactcccagttcaggtccgcgtccagaaaggcaaagaagcatgcccataaattcggtcgatcgaacagcccatcctcccaccggaatgctgtatcatcagacactccactcgatgtactcgagccgttgacagagcggaacagcatggaggatctgccctgggatcctacagcggcccaactcaacggaaatcccacggatggcaggcccgacgctgaatcttggggcggccaggtctcacttgcagtaagaagggcccggaacaagatatctagacatggttcaactgaaggagctgataatcttgacagatcagacagcctgttgacgtatcgaccaggtgctagtacttcccatcgttcaaactcttttctaggcagcaaagatcggcctcagcgcgtacgtcgtcaccaccaccaccacaaaacacctctcgttaaccaacatcacacatatcatcatccacttcatcgctttcgcccgggcgaaagcagatcatggggtggccaggaagaggatgtgttagtcgaagaacgagactgtgattctcccagagctccgccctcattgacctttctcgagagcttagcctcgacagtcaccgacacatttaccgctccaaacacacgttcaccttctcctattcaccggccatattccgaccggcatcggctctttcctcaccgatcatcgtccacaccaccttccaagtcatcactagcagagaatccgttcgaaccgccagccgattttttcagaattctgccacccacccccagtgttcataacctctctcgttcgtcttcccttggtaatggctcgccttgccatgattatctaccagggacaacccattcctcctcttctactccctctcctccctccattccctctggtatcccgagcgccaactcttctccactgtcgccaccatccgatttgtacacatcccttcttccctctcctctgcgctcgcctggctcgctttctcccaatgcagcacatcgccggcttcctcgggttatcactgatcagcactgtgttgattccactctttcttcgtccccggtggccatgtcggcgaacaatgagtatccgtttcttcccaccattaccgcgatcaagaaaactccctcggcttcgtccgccgcttcaccttttctcccggcgatcaccgatcggccgctcttctccagacctgcctccttccttagtcgcaccacttcggcggacgacgcatccggaaaatcgtggactgagagcgatcgggaggatcacctccatcgagagactagcaaccaaagcgcagagtctgcctcgctcgctccattcccttcgtctggtgatctagctctcacccgatcaggcagacttgctgagcatgccgctcgcaagctaaagtctctacgtaaaagcacaaacacctcaaaaattgacagacttctttgcgaagcaggtcagactattgacgttgaggaaggcaatgtcgtttgggttcgtctgtgggagaatcagagagggttagtcgatcttatcactttgtcgctgttgattttcgaactcgtttcttacccctttctctctatttctctcctttgaacatatccgcagtattctcttttttggaacgcccagattttctgccaacatcctctttccactcgatcctgcgcctttcaccagaccgggaaacaccaaacaagagtgtcagactccatataacttgaagacgtatcaagttcgtccctccctttctgttcttatctgtttgcgcactctatgagaattcttagttgatgtgtaaacacttcatatttacagctcccggatgggacttggaaatgggcttcagaatggatggtcaacatgaaacgagacggagagactgatgagaaaggatgtacgtgcctttttctgtgtctcgattacttacattccatcacttgatgctttactttctggttaacctactttttttttccttataggggagtacaactccatcttccagccccatggatggcattgctcactaccttggcatggatggaaaggctgggtccgtcgacgagaatggtttgtcctttctcaatttttactcttgattcattcttcttgctggagttgatcttggccatgcttgtcaaccttcaaatttaggattcgacttcgagtgaagccgaacccttgcaaacagattgaagccctccctgccgccaccaacgttttccaaaacgacaacaaatggtcagactctcccttctctcctatagataatacccgaacactcgccgcccgtactcgcactcccacatgggccggcattcactttcagctcgatgaggccgtcaaaacgcttgctagtagaagggttgatcgagaacggctcgaggttttggctgaatggttggagggtggcgatcggatcggtggattgagatgggtcattgaacacaaggtaaatcttatctcttattcttgactttcttttttttctgctatttatgatcttcacttactcattacttttatgtgccttctttctaatcgttcaaagcttcccgaacttcttcgtgtgttcacatttgaatcataccgatcccaagcgatcgatctcgtccgtcggatccaacctcgctggacgttcaccctcatagaccctgtccgatcggaatcaatgacagattctgacgaacctgatcttcaagtaagacaaacgagtaatggaagttctatcgggttggtcgtccctcgtttttaatccgtaggtttactctgatcgtttcttccctatatttgagattctttttgttcctcgaccttttctacccttattcttagttcacgttcatctctttgtgttcctcactttggaaggttcatgccatcgcacaactcctttgtatcatctctataagaacgtaatccttgcttgccactccatataccttcctgactgcccctccttcatcggatatgtttctctaacccgagagggtcgcctgggtttcttgcctttcgtacgcacacgcctacaatatttacataccctttggtttcggttgtaccttctatcgtcatatccctcttacttttgcttttgctttactttcgcatcatgttcaacgggcgaccagtccttttctagtcactacactttcggttatatatttaagcattgcgatgatggaaaaatttcatccatctgaattaagaagggaaagaaaaatagagagaagaacacctatatctcctctccaaagtatgccccactcagcgggccaaccaagccttcgatgactttcagtaaccctctcgcgctagcttccactccttcgtcctcatcctcgaccagttctgcaacaaagtcagacaccgtatggggcacaaactccaacatctcgtctccactcttttcccaaacggccttgacaatctgcagaccaagcgatctgatctcggcgatatccgatcgagaatggagaaggagagtatggttcaacgatttgagcaacgacggcgaggtcgtggcagccgaaagagacgccatcgtcttggcgtacacggccacggccgactcagaatcgaacgtgtaggcaacaggaagttgagaaaccaggataggagtcaatttgctgagaagctcgtccgtccagtatgctagaagtttacataaaattacaacaacccgggttagtagactcttcatataaagatcgagtactgggttgatttttgacacttactgccttcgtcacattctaaagactctccgaacacagctaggacctctttccaaagctgaacgttcgtgatgtctttcttggcgtatgattgcagcaaagccatcgaatggtccaagatcaaagccatgtacgggttgatgatggactacacagtcgtcataagttcgagaaagtgtgagtctcaacagttcatccaatgtcaaagcgtgcgagacagagagagaaatcgacatactttgaactttctcaaaaggtggaacatgatactgaatagtgtagtgcgtcgagcggtgacatgctcatctttcaagccagctatgatgaacagcgtaagcagaatttagtaaaccaactttgaccgatatcctcataaattgaataaatacttactggcttcatctccaaccaactcgacaactgcccaatcatagattctcacgaacagaggtcggaaagatgcttcactgagtttgacaacgacctcaaggaaggcattgatcacctggacctcaacgacatggacttcctcagaggacagagtgttcttcaaagtccatcgggagtcaaacgcagaaaggaagaaactgaataaactcttgagcaagccggtcaagacctcccggtttgcgtttcggataactcttcggagaagatcaagaatagcggccaggggctgttgtcaaaacccaatttaaagcaccgttgttaataatgtctatcatgagggcactataacgaaatattacccacaagtgcagatgatttgtcgacctcctcccagaatttgaagatggcaggcaaagtggacttagccggtaccgtcttggcaatagcattgagcagaccctgaattggctcaaatctgcccgaaactgccgtgttatcgccgagaagactaggcctcaagatagtggccagcaggtctcggagttgacctccgacaaaagtcgggaccgaggatatcaaagcagagagagattcaagaatagcagggaacagagtgtcccggaactgttctagtttttgaactccagccctaagattttgatcaatgatttcggtcgagaagacaatgatgggcttgatgtaaggaatcagtcggggtccgatccgtctgttgatgactgccaaaacagaaaagatcttcgtctgaacattagcagagttttgggatcgttttcctcgggcgataagagtgcccacagcttgggctaggctaggatcctcaagaggagtagcggtggaggcaattgctttaatggtctcaagcacttggcaaaggtcggactcaatctcgtccgactcaacaatcttcagactggaagcgagcgcagtaatcaatgcaggagaaatgtctttccgggccttggtcttcattccgggaagtcggttggtaagagcagcgcaagctccgagctgggcctgaaagtgcgaacatgtggtgagttgttgagatagataaaagctgagatacatgtgcactcacatggagatcatcactctcgaacaacggtgtgagagcttcagcaaaggccaagacggatagatttcggacagccgaatccagagcaagttggctggtcgagactaaatcactattgccattctcacgaatctgtcttgaagcaatcgcctgaatttcgagaagacctccgacggtagctttgacgacaggattcaaagatacatcaccagccacagcgatgatagaaggagagttggaagcgaagtgaacgaaagataacagagcaagaactcgtcgtcgctcgattttggtggcgtcggtgacatcagtgaacctgtagttacgaaattactcagcctatgaaacatgcgttaaaaatggaacacttcacactcacggtttggcagcctgggtcaatagagcttcctctggggttcgtagaagattctttatctcattcacgatatcgttcaagccctaaaatgcaggaggacaagataggagatattgagaccaccaccccgatatgtggctgaaattgtattcaatgactcacttcatatcgtgtggccacatcaaagctctcaaaaaccgccaaagggaaagtaaatgtcgatgcctcagtagttcggatcttcgatttgaaagccacgtggtctagcaacaacatggtcacagctcccaagaaatcggagggtcccaaaacttttattaaagtcgagaacaatctgaaatttgaaaaacacatatgtgcattacatcaaaaagtgcatccagagaaaagtttttttttaaattagaaaagcactcacctcgtctttcgatgagccggtacgtggttagccatgcccgaaaagacttgcaaaacctccaaacattctgcaagttgaaaggttcgttatttttgttaagtaagccaaaagcagtgagaagagacaaaaaaactgaaactaacgattccaaagcgcagacctgtttgaggtctgggacttgaattggtcaaccatgactggaaggatgctctcaatagtctgcagtaatgaaacaagtttgaatcaggccaagaagtttgcaatctctattttgaaagagtactgaccttctcgacaaccaagaacgtatggtcatcatctcgctggagtgtatgagcaccgacagaaatgaagataggaagagcgttttgcaaaacaacggcaggagagaatcgagcaaagtttgaaacaagaacaagcccttgctgaaaagtctgggggttcttcgagtctgcatatttgatatcagccaagcttgcgcccaactcttaataatactctgaattcgacttaccagagataactctcatcaagacagtctggtcgatttcctgggtcctaggtacagtctatggcaattcacatgaatgtgtgtgagcaaatggatatatttgactaagttgatccaagaacatacatcgatcttggaagatacggcacatagaccggtgagaagcagctgttcggcatagtcgatattgatttccgacttggtttgaatatccatcagagaagcgagcacctcgagaagggcaactaaaagctcgacacttccaggcaaggtgtccaccgatcgagcctccagcgtaatgatgagtccccgatggaaaacattaagtgccttgagttggttcctttggaaatgaaatgagacgccacagttcagcggggtccatgaatattcggagcttgagaacacgtactcgctgtcagttttgtttcgcttggtgcttctgaacacttcggcatcagggcgaaggctgaagactgtggctatgatgacttcaggctctggggcaatatcccgaaggcaaagttttatatccccagtgttggtcttcaaagaaggaattcgttaatacccacaatcatgcgaggtgacagacaatatgaatataacactatcacgacttacagtatcggggtccgcgacctgacgaacgagagtctcaaaaatctctatctgcttgcccacaggaagtaccctgtagagcgaatgttgaagttggaacagagccgacgatgcaacctgtttgcctagttgaacctcaaatcatcaacgaggtcagtattttttaaaaaaaaatcataaaagaatttacagccacgtacttgacttgatgaaatttttgaaggtgttccagtactcaggatggttggggaagagagttacggccgaacgatcgtagctatccataagtagcgcaacaagagatgaagcatccgagtcctcaggagcatcattaagatcggcaaggagaggatgaaggatttggattcggacagaatctctgattgcctgaacggttcgaagtaagaatgcttgtgcagaaacaagctgccacgacgcaacatgagacagaatgtacgaaagaaggcctcgcttgaaactacgattgatattatacatcagcagaaatacttgacactttgtacaatatttgcaaagactcacccagcatcctttttaggttctcccttgaccaaagttaggtagttagtgtgaactgacacaatgtgtgctggatcaatggataatgaaccttgatcattaagtatgatgtcaagataagcccgcaggtccgaaggcttcagaatttggactctttctgttaagatgaagttttttaaacaaaagttcagttgataaattcccgttcgcattcgaaggtggatcaagaagaagaaaggaatgctgaccagagcgagaaccatagatatcgttcaatgcaaacggaactgtagattcgttgccagccgcattcctaataagctccacgcatttcaaagcggcctctctggtaggcttctccagcgatccaagtgcaacaattaaagcgggaatgacggtctggaagtccattgtctccgaacctgaactctggacatgggcctgcaggaatgcctcggcgtgtcgaagtgccgctgtttgaagagcactcgaaaactcagtgactccacccggggtggcggtccagatggaagcgagaaagaggagcgtattgtctcgaagtccagcgaacagatgtcgaagaaatcgggccgataatgaaagaggaagcttagaggagttgacaaggccatagatgaggtaggcgaatctagcgacttgaacagcctcggcgtcctataaaggaaagaaaaggtaatgcttcagctttgtgacattggaacaatcgaacacgaagactaaaacttacccaagaagcagcgtctaaccaacatatcgatgcaatatgagtaaatttgacttcctggatagatccaatcaagattcctcgcactcgaagagttgttttagcagcggaaggtttgagaacgacaaaatcgagggaagagtcttgaatgggctctaaacaagcaaagccatctctgatgcctcgtagtttctcgagggtcaagatggcagcgcttgttgcagatgtgcctttgagcaacttcaagatgaccgataggatgaggtgagagagaactctagagtgaggatctgagtcggccagtttagagagcataaacttgatgtgtgcgtcttgatcttcagactgaatgacgttagctacgtatcggacgagtaaagtgagaaaaagaaataacaaagaaaattcatcgaattagtcaagtcaacaaggaagggtgtcttgagttcaagggtatgtagacgaacctgctattttctgaacaatcagagtgttgagttctgcttgtttttcgtgcttgttttccccttcaatctcagagccttgaacgttctgggctatcccgctcaggacgccaatgttgcccagatctgacgaagccaaggcttcccaagcatatccagatacaacctgctgcgtcttagagatgagcaaatacctgaacaatacccttcgaatgacctcattacccagctcgggatacttagatgcaaaagggccgaccaagaattgaatatgtcgtcggacgatagcctttgagagagaatccaaatccagagctgcacatatggtacttaatatgacctcaggttcggggacggcgctgaagagaacagagggagaagagtagatagcctctagaacgggaagataggtgtcacagagtcgaggcaggaggttttctctcgcagaagatccaagctatggacgatgatagtgagtaagtcgtgtaggcatcagtaacgcagcgaagactgagcatctgacgagtgaagtatacaacgaacctcgtccacgtcgacgacgtctacatccatgtcgctcccagtagaagcgttctttagttctttggccaatcttccgatcagactctggactccgttgagcctattggctgagtccgcactgttgagattgatgaacatatctccaccatgaccatggagagtttttgtctgatattaagattgttatgagtaagaagtttgtactcaagagatgacctagtaagacagtttcgaagcttacctgagccacctgagcgcacaaatcaagcacgtagtttttcttgacttctggaatttgatccaagatttcaacagtatctgtctcccaagtctcagcatatcgctcttttaaaatggcaagcaagttgacccgtgcattttccacttctgaaacttcagatccagcatcagagagaagaagtccacgaatcaagaatgatatcaggtgaagaggaatggaatttcgagcgcaggtcgcgaaagcttgtaacgtagtcatagaggaaggaagatcgagactgtatgataaacccaaaatcagatgcggactcgggtactgaaggcatcttggagcgatgtcagaaaagagacaaacctttggatcaaagaaacgatgataggtcggagggctcgagaagtctcaaattgagaagcgtggtgagccaagatattgccggcatttctgtgttaattgcaaaaagttcagtcgctatgaacaaagaaattagcagctgaaacatactgacgggaggcctcctaatcgttcagcagcgtccttctctattcctcgtagctcttcctgactttgtagaaccccaatgattgaagcaattgcttgctgaatacccttctcacttctgaggaacgcatcgtttgcgttcaaaactgacatcaagaagacatgaatggcctccgggctcaatgtggcttttcgggcagtagcgagaagaacgatgagattgctggatatgcaatcaacatccaaagacgcctttaggccattaactacttcaggaatgataatggtgagctcagtgtcgccaaccagcttgctttggccgccatgagcaaggaaaccgacaagaatggaagcgtggaagttgaccaaagtccggtagagagtcttgttttgaatagcttgagtcaagatagaagatacaaatcgcaagagatctcgcgacttgtcttgatgaagagagaggatgaggtgatgtcgggacaaaggaacgtgagcggtttgaggaccgatcaaaaaagaaaaatgagagttttttcttgaagaaacttcgagtcagttcggtctcttgcttcatacgaatttaaatgtaaatgatactcacgggactttaagaatggatagaatccgaacaaactgagtagagtcatgataaggcaagaaggcggataggacactattgaagttcatttcatgaactctgtattttaaaagtaaaaacgcgtcctcttcatctgtcagccacaggcctctttctccattcacatatctttatgaggaagcatatagaatactcaatcagagcaaaataaacgaaactaacctgaacctcctcaccagccactcgatcacttttgctgcagctcttaggggcaaatgtttcgcaagtttacttaagaaaatgtccaaagtagcaccaagagccacattttcctctttggaaagaaccattcggtcggtgaccttggcagcctctccaaaaaggtcctcctcaaactcaacaagggaaggatccaactctttgagttcttcgaatccattaactcccagtgaatgaatggtctcgaaatcgtgctgagcagcctccgttctggagaagaggtaggaggcctgattagacacctgcttggaaagagaaccgaggcgactggcgtctaacgacgcgatggaagccaattgactggctaaggaagacatcctttaacagatctgttcgttcagaataaaatgcaaaagagatgaataagaaagagatgaaatgccgggttgaatggggtggtgaacggcaaaagagtcggtcaggaaacggtggatgtaataccaaacggatcgaacaattttggcggattgaaattctttgtggctgtgcaaaatatcttgtgcacgtgaatcaactcccgaaattgatggattgaggttccttatatacaatcatgaaaactttcatatttaactctttttctttgagaatctacagtctgacatggtttgaatcgttgaatctagtagtccagacatcaaatatggagtcaagttttgtgagcaacgagtggtgcaattcgccttatttctctatctttgggatctcgtatatacagtagatattttattctctttattctcttctgattctctggatcgattaattttcactttggtgtgaacattcgtttgagggaatcagaatcaggaatcagtttgagacaataagatgcaggataaaaataaatagactcagaggatttgaaaagtaggactttatcgtttaaataactccttcagaaacacaaccaagtcttgggagatccatggtatgttctatgaatgagaaaacacttatctctcagcaaacaaacagtatatgtgaatgctgaggaaaggaaagaaaaataagagaaacgaaacgaaaagagaatgtcgagcgcagatatatgtgaaagaacacaaagcagaacacaggtgcgatgatgagaagatagatgagaacaaacataagaaaagagaagctaaaagacaataagagaaacagccacgatggaagaagatgtctgccaagacgtcgactgagaaagaatgggtcgaagttgaaagagcacaagtgttatgggcgcaggcaaggaggctgagtaggggatgcactcagcgcgctcaggctcttggaaggttcatgcgatattgaaaggaggttaagggcgaggatgactgtacggaactatgaggatttaacgaggttccaagcttgggagagaaaaggggagatagctaacgactacatagtatatatgtcattcgagatatcaagccaaacaaacacaagcaagagcgaagagataccaaggaggagcgaagagatactaaggaagagccaagatataaccacgagagagttaagatgtaacaagagactgttgcaagaatcggtctacattgcgcaaaatcaccctgcgcgggtccaaccgggtcagatcatgacaaacagggtgaagatggatttttcgttctggcacttgttcccaatcaagtcctcactcgtttcccgaaccatatacacaccacccaggtgtttcagtaaaatggattgagaaaccaggaaaacaggaggaaacccgctaaaaaagttatagctcttcggaaagacaggcttgagactccgcgcaaacggaagtcggaaggtgatgcctcaataagagataacaaataacagatgaaattatgtcaagactgctgaaactccaaca

SEQ ID NO: 2644 - DNA, 793 bp, Xanthophyllomyces dendrorhous
agattcttaagagattaagagtctgagtaatctacgtgctcatcaacaaacatactcatcacaacatgtctaacaacgtcatccagtccgtccagccggacccacctccaccagccgttcccctccatcgggacatccgcaacaccatgttcaacaacatcacccggctagcatctcctcattcacccgacgtcaactacaacatgtgggagcgtcgactggagtcagccctggacgacatgcgtatatgggacgtcgtcatcggcaaacgaactcggccaagcgtcgcctatccaaccgcaaaacaagcatggggcgtcgatgacaaggtcgccaggaacttcatcatctctgttctcgccgactccgaaggcgaacgggtcaccaagtgcaccaccgccaaacaacagctcgatgtgctccgatcggcccatcttaagcgaggcacgactggtgtcctccagctactaagtacactctgggatgctcgcctcgaaaactcgaccgatctccgggccagcatagatagcgtgttccgacaggtcagtctcatccgccagatcaccggagacagcatcaccgtcgacgaactggcaggccttctacttctgcggatgcttccgaagaccatccaaggcgagactctggtatccaacatacaggcccaggtcggcacagacgctcacggaacccccaggccgctcactcttgactttgtggccgatcgaatcctggacaacaaggacatacagtcaacagcgatggcgaactgccagaaccagcagcctcactc

SEQ ID NO: 2645 - DNA, 369 bp, Xanthophyllomyces dendrorhous
cctcaatcgtacgcgctttccctcctctgtccgagcttgagccacccgttcaccttccttcttgacactggctgcacacagacctgcgtcaatgaccgatcgctcttcaccacctacgagccatacaccgacgagctcttcgttgcgagtggtgcgtctctaggtgtcgttggcaaaggaacggtgaacgtggtaagtcagtctcgctcggacggtcagcaggtcgaggtatcatttagtaacgtatggcatgtccccctcttgtcatccaccattctagtctccctcggtcagatctgccagaccgatgggatcaccttcaccggcaacagagaggagatcgtgatcagtgaccagaccgggcctttc

SEQ ID NO: 2646 - DNA, 504 bp, Xanthophyllomyces dendrorhous
cctctctcggcatcactcagcagccgtccatccctgacactccccagcagaatggtaaggccgaacggacgaaccggacgatcgaggagaagatcaccgcccttctcatggagtacggccttcctggctcgttctgggccgaagcgttgacatatgcactctatgttctcgctcggaccgtgcgaccatcgactggcaagacccgctatgaacactggcatggccgacctgcaacatacgatcggatccatgtctttggctgcactgcttttgcacacaatccaaaacacaagaagcaccagtcaaagtcgaccccgtgctggttcatcagcccgtccgaggatagctttggcaagcaggcctaccgtctcgtccataagcggaacgtccagaaggtcatatactcccggaacgtcatcttcgcagaggactggaccatgcgaactgcacatcagtacggccaggacaactacagtcagtccaagacacttcctgctgctggta

SEQ ID NO: 2647 - DNA, 350 bp, Xanthophyllomyces dendrorhous
accctaccctgaccctggaccctccaccgacacactcctcggccctctgacacaccccccttaccgccctcctgggccatgtccaacagagacaatcccatccagtgtccccactgtgacctccgcaccactgccctcctcgaacacctccggaaactagaccgcccaaacagatggacaaacgcctctcttgctggcaccggtctcatcgcctgcagctgtggctttccctgtgctagtcaacatggccttctcacccatatcgccaagactcacaagaaacaggacccttttgctgtccaccctgtctcttcccattccctcccttctcagcctgtgccctcccagcc

SEQ ID NO: 2648 - DNA, 825 bp, Xanthophyllomyces dendrorhous
atttttgtaccggaacagatcgtctggtgcttcttcggagtgcgggcgtttctgctgctcgggcgagttgttttcggtatgtaccaggaccgtgcgttgggactgggatcagactttgttctcgaggcgaaggtgctgctattctgacggagatatcttctgctgtggtttctacaggcttttgtgatgcgttttctgcagtcgttcctggcgccttttcggatacggcgattgatgcattttctgacaccaaaccctgagtgattgccaaagtagtctctggagaaacacatgaagaaacagctgaagaaatagctgaagagacagctgaagtaagatctgaaacaccttctaaagcggttcctgaaaaaccttctgctctgactcctgacaaggtatctgcagcagtatctggattgatatctacagaatcacctagggtgatgcctgaaatagtctctggagaaacatctagtacactttcttcagctgattctaaagtagtctgtaacccaggcagtgaagtagtttctggagtagtttctgaaacgcatccaaagacatttactttcccggtttccgctgcatcttcgagtaagtcttcgacttcatcactttccgccacacttcgcgccacactttctgatgcattctctgatgcactctccgatgcaccttctgatgcgtcggaaacagatcctactgccgggactacctgaactggaacgagatcatcagtaagctctcttacaatctttctcggttcatagatgatggtaccctccgagtctgactcttctactgctgcagactctctatccgtcg

SEQ ID NO: 2649 - DNA, 459 bp, Xanthophyllomyces dendrorhous
ccagttccagttccagttccagttccagttccagttccagttccactcccaggtccactcccactcctacttctatcccagcagttgccactagtactgctgccatcatccatgttgcttcgccaacgcaaaatacaccgaacaccaagacgaaaccagcctctgcttcatactatcactcggctttgtgctcatcctctacactttcttcgcctggtcagctgacggacaggagtacgtctgtgagctcggctttctcgttcgacgagcatggcttactggctaacgatgctgtatcgaacgagacgaaggcccggtggcagatacggaagcgaaaagcatgggatgagtttctcagagaggaggacaagaggcaggagaaactggggaaactagggaaactagagaaactagagaagctagacggacgcgggagactgagagaaggggacgcctcga

SEQ ID NO: 2650 - DNA, 871 bp, Xanthophyllomyces dendrorhous
gagaagaagagaaagagaaacaagaacaatcaacacttacaatgcagaaatcagctgctctggagtgcaagtgccctcaggatccaagttcgaggcaaccgttccgttccacagcaaggggtcctatttcaccgcgcgcacaaagaagacccatgtcgcctctctgcgtcagtactgagccactttcgtaaggctcatatgccaaggctctctttctacaatcttcagctgacgatccttacctgtgggacaatcccgagctttcgcctaatcgacgtcaaaccgacattgcggatattcacaccatcaatctcgatcgttccctccgtcagttcaaccatccggaagagtgcttggagtaaactcgactatcgatgcaaaacatggattgagcacggcagttgcagatggatcgaacgatgtggtatcgaggatgagaggcaagtgagcatgatagcaatgcacatcagaagcagaagtcaaagcaaatggtggtgtcaattagccttgaatatcaccagtacacaaatgcaccgaaaagacgaagactgacctttccggctcctgtgcgacccacaactctgcaaatcacatcggtccatcccatgcgagatacgagtacatgaatgacagaaggatagcaggaggatgagagaacgtaaatatgaatagaaacagcgacatcaagtcagccagtgcaaaattcctttccttgcacacccacaccttcccatcggcgcggtttctcgctcagtgacgccactcacccgatcttctctcctgcaccaaccgaaaaagacaggcccttcaacacaggaggcaagtccgctcgatatttcagcaccacatctcggaacgtgatagcacctga

SEQ ID NO: 2651 - DNA, 492 bp, Xanthophyllomyces dendrorhous
  misc_feature (252)..(261): n is a, c, g, or t
tcgtttatcatccacgcctatcaaatagccagagtgcagaacagtagtactcacttgacgatttgagagaagatttgcgacatggacagagaataggtgagaacgactccaagcttggcgggagactgccaacgacaaaacaacaagtttgtgagctactcgactattcgctatggacatcccaaatgaagcgactgttatgcgcactgtgttatttctgaacccaacaccaatagtgagacgcataaaacnnnnnnnnnntcaaatagccagagtgcagaacagtagtactcacttgacgatttgagagaagatttgcgacatggacagagaataggtgagaacgactccaagcttggcgggagactgccaacgacaaaacaacaagtttgtgagctactcgactattcgctatggacatcccaaatgaagcgactgttatgcgcactgtgttatttctgaacccaacaccaatagtgagacgcataaaac

SEQ ID NO: 2652 - DNA, 865 bp, Xanthophyllomyces dendrorhous
tatatatggttgcagagctacccattcagtgatgtgatgtcagatgaagaacacacaaacagcatatacttacccgctgagactctctgcagtggtcagaaggtgagaaacgtgactgtgcgatcagcttctatccgtcagatcaacatcgttggtccggcatcacctcgaagaacagactaacctccgaactgagcgtagatcgtagatcggaaaatagagtccagccgttttgcctctcgcgaggatgctcggtagtagacagcagtgatgtagtacagcgagagcagtggtatgaagatcaaacccagataggggaaggctatcgagtgaagcgataaggccatcgaaccatcaggacatgctcagattcgagcccactgatcacatatacatccaagaagaaaagggagtaactcacagtagaagaccaaggcgatagtaccaaacacattcagactcatagtcaggaaagtgttcctgttgatacaaagaaagtgatgtctcagccatggcatacacctcatcacccatcattcgatcggcgcaatgatccatctacagtgataggaactcaacataccactgcatcggtagctgatcatccagcgtggttatatcttttgacaaccgactaatgattcggccgatctgatcgatgattcatgtcagcttgaacttgtaataccatatcgccagtggatgaaagaccgtgcttactggggtcgcatcgaaccacgagactggggtggccatgacgccatcataagccgagttgaacaagttgaaactggcattgatagccgatagatatctgtttgggatgatggatggatccccatgatcacagtcagccggatagatc

SEQ ID NO: 2653 - DNA, 465 bp, Xanthophyllomyces dendrorhous
tgaggtgaagaaaggagatgggaagctgagaaggcttatatggaaagtggtggacgagaaagttgagcaagcacagagacaagccgaagaaggtggagcaagccggagaaggtgagactagtcggaaaaaataaatgaaagacatggaaaatatgtagaaacagtatggatcgatagagcaaggttgcctggtccggatggtgaaagaagtagagcgatccgggcgggattggtggagatatgggcgaaataaggaaaaaatcgagaaacatcaaaggacgaaacgacgaccggcggcgggcgcaggattacgtaagctcgcgcgatgggaggtgatgaagtcaagaaaagaaaaacagaagaaaaatggatggaaatatagctatgtggttacatcccgggctgtgcaacatgtggtcacggtgcaattctaacagaaggaacgtactcaccgtgccgaaggaa

SEQ ID NO: 2654 - DNA, 911 bp, Xanthophyllomyces dendrorhous; identical to SEQ ID NO: 1132

SEQ ID NO: 2655 - DNA, 1511 bp, Xanthophyllomyces dendrorhous
acgaggaatgtagttgctgactgggtgtcgccttccttcaagataggccgcagccctacgttaggtgggatccggggcgtcatcgctgaccgaacgatcgagcgaggcgagctacttgtggtgtgcaagccgtttgtatctgttgacttgaaggatcgagatttatggccggtgacggagctggtgaacgtgtcaactcaacaatttgctgaaggacctgcgcatgcatatctggtacgggcgatgatggacaagatccaagacgaaccaagggccttggacgtgttgaagaggctgtatgctgggccgggacactcggatccagagttggtcgatctaagcgccttcgaactgcctggcgcgctgggcgatatcgagaaagagggagagtcggtggatgtggatgtgtcgaggctggagggaatcaggacatacagctcttttgggactagtccggtcttgatccccaagactgggcccactacgtacagtggtcatagagatgagccgtgttccggtacgtctcgtacttttgcctctctgatgtcttctctcttctcttctccttcttttccttctttttcttctcctttttctcttctttctcttcctcctctttccttgcttctctgtctccttcgcaatttctgacaatgttctgaatgttttcctttttttttgtgtcaaatcacatcaaatcacatcaaatcttgatctacacaggcatctatcttgtcccctcgttgttcaaccatgcctgctacgccaacgtcagttgggtattctggggcgatatcatggtccttcgttcctgccggactatctcgcccggcgaagagctgacgatcagctacttccctggtagctcgttagcctggcgaacaacgttgattggcaagtacgagatcggtctatgcgactgtatcctgtgcaaggagaaacggcttgaccccttggacgggcgtaacatgtggccagatgagctcgaatgggctttggaatatgatgaatacatatctggagttgccccgatagtcaatggaaagatgtataagccaccgagaagaaccctcaaaagggtcatgaaaatggcccgttctctcgaatcaaaatacgatcccagacgctcacctagtttcatgtctgagctctgctgtctctataacgccttgtcgggccttcacatgatgaaggtgatgggcggcatgaaggaccccgaggatacgttgctgttgatggagcaagcggtctactggaagaaacgtgcgcttgagtgttgtgggttcaaagggatagagtccgatggaagaggtacactgacgtctagtccgttcgcatacgagatggaatgtttgagtatagggttgtcgatcgtgtcgatactcggcagaatggataggaagaaggatgcgcaacgatgggccagagtggtgttggagatgcatgacatcgttttcggaggtgggaaggaaacactggtcgttctgtggaggggtccgttggactcgatg

SEQ ID NO: 2656 - DNA, 38349 bp, Xanthophyllomyces dendrorhous
gtgtggatgagatcgcatatgaatgcatgtcttgctttgtatcacaacagcgatagtactagggccaggtagtcgatagcatatggtgtcttcccgtgtgtcaagctagacgcatcacgatcgagtcgaacaagcagaggacacagagaatcttgtcatttatacacattcagtcctcagccttcgttcgcttctgcttgtgcttgtcagcaggcacaactcgctggcgcgcggctgggtgtcaagcgagttctgagatccataagtgcctatgttgaagaaaagaagaatcagtgtttgaaaattatttgaaacccaaataaaatgagaaagggaaagagagaaaaatagtgagaagtaggaagaaaagacgaaagaacgaaagagaggacgaacacggctgcctcacctttcggacacatgaacgtgatggcaagatccgtatatccagctcgatcggtatatcccatgacttgcatgcggagggcagaacaaggaaatggatcggaccggtccgatgagcgtaagcctcgatcgcatctgacatctgccagttgatgacaagcgaaacgtccccaacaccgacctctcgtgcagcctgtgtgagcgagcgcagatgccgggcgtcggtttggccgtgagctaagtgggctcaccagaaactgacaaaatataagagagtcgcaccagactggagcgataagaacatctttcgtcccgcctcttgagacctgttcgagtgaagcgccatgacggataactagggcctattaaacagagggggaagtaaagtaaggctgagagggaagcagagaagtcgaaaagagacaacggacctctgtccgccgaacgctcttggaaatggtattggacgtcttcttttgtttacgaatgataaccatggacggtgccaagtcagctgtaggggatatctgtatgttttgtcgttcatcgcgatgagcaacacgccagagcatagtaaagcagaacgacatataaacgatcggaacaagagagcaaacacaggtagggaacgaatgacagatctgatcttgtgttttcatctctctgtatgaattcgatacgttgttgtactgtatcaaccacatcaactgtatcaactgtaccgattgtaccggctgcatcgacagcctgtcgagtttacaatctcaagcacccaaatgtacctaagtgttggccatcactgcgttaagtggtgcagaacacgaagctctcatcttggtcactggaaaaaggccatggcggatactgaatgatataacaggaagagaggatatatggagccacccgataaggcaagatgaatagaccgtgcacacggccaagtggtgtcaacaggaactttcaggttgttactggtaggtcatcggagatcagatcttgtcctttgtttctcttatcttatctgaaggtatctattagacttcctatttgcatccttatcctcttctaaccctaacccagagttattttctaatgtatttatgacccttttgatgaccctcacaccctgatccgaatcctaaatgggacgagaagattgaatctttaggcttcaattagaagatttacgacacaaaccctcgaatgaacaaagatatttgatttgcgatgaaaaatgcggttgatgaacaggaactatggaggataagttgaatataatgcttgaagaaaagaagacaaaagaagagagagggaggatgaaaaagaagaacgagactagaagagaaagacgagaaaagggtacttatgacactcctcttgaatctgtttcattcatcagctatccttcgtgtccaagcggggagagtacgacattgtcatcaatgcggtacgtttgtagtacaaccaagttagcaaaacgttttttcccatatccaagtcctgtctcgctctgagagattcatgctttggagcaacctgagatgacaagagtctgtgtcagcttagagctaaaaagttcgctgttgacaaacatcaccacttacaagacgtctgacttgttccattggttgatgaagaatttgaaaacgagtctttggcgagcttagacgccatgtcgacactcgaagggacatctagaccaggatttctctgtaatttggcaggagaatgatgaaatgtcagctctcggttcaaaatgagttttacacagcttgaagcaacgtttactcacgtcgaagaagctagatggcttcagatgcaatcgcaacatctccacgggcatgatgggccaatcttccggtcgactgaagtgcgtcatgccgaaggaagcccaaacgaccacatcttcgttgacaatggaggcgtctcggtctacccactctgcgagtccgtaggaatcacctccgggatgctggttgatatgaagaccggatggatacagctcatcctcggcataaggtgtgacaaacatctataagatgagaaaaaggtttcaaacacaaagataagtcagttgtaagaagacgatgcaaactcttgaagatccactcacattatgtctcgcaaatggtgctcgattccaaaccatcgatccaggcgcggcgagcattggtggcatttggccacagaccagtttgtaaccgacattagcgccactgatcttattcttcttgttgggattctccatcgaccagattcgattcacttttgcatcataatcggcaacactctccttggtagtcttgtagacagtcttctgagcgtggaaaccattgccgtagtagttggcggcacttcccaatggagcttcatcaggtacggcatcgacttgtaccacttggttctttagaccatccaacatagggtcgactcgaagggaaaatagatgttgatggtgttgggcagcaattctgggagctacgatgacttcatgatcggcgtctcgagcttctccttcagccagtaaataggcgttgacaatacccgtagctttgacctcgagctcgatggttccggcaaggtcgaaggtgaaatagaatccgtactcataattggcgacagtgcagatggaggacacaataagttttcgattacgggcgacttgagccttgttggttcggaagtcggtatgcttatgaaggataccagcatcctcctcacttttggaaaagaagaccaaattgaacacatattctgtcatcatgagcacacgatgaggtctgagatgcaacggttgatcaagatagacttactgtatgcaaactgcattcttgatggtttcaacctcaccattcctgctagaaccttcgaagtcaaggtatgcgatcttgcctttgcaatcgcagcccaattcaagactgttagcaagggcccctattccgtattctccagtgtcgaatgcatgctttcgatggtgagggaaagtcgtcttggcgtagggtaccaccatctcagctacagagagtcgatagaacaaaggtcgagttccattttttccatcatcgtaggtgatgttggaaagaaccatgccttctctaaaattgaaaccgacatggaagcgccagttctgccaaaccaggactcgtccctcgaacttgaaggatactccttccggctgagtgatctcgatgggtttgagcccctctcgaggcttgaagtctgcctcatcctgtttgagttcagaatgcagatagttatgcggctccatgggaggaggtatacggtctcgaggagggagagcggcatgggcggtggcggacgagggagcgtccgggccattgagatgaggataatcaattgtcatgatttcgccggtgtaagaatctgcacaattatcaagacgaaataagccttcgtctgatggaaagaaacaatccaaacgccatggctacatgatcgctggaaagacttaccgatgacagggatgaagtcaagaggatgagcatataaattgtcttctggccgagatcgagtaaaaaggaaacactgttgcagcctcctattagggaatcgctcgtcgacaccgatacaccaacctgtggagccacatttgtatgttcagtgtactgagcaaatgatactcgcgaacagaaaatgatgtgaatatgactgaccgtcaacatatatgtctgcgggagcaacacctacggcttcggcagcttcacagatgacaggagacttcctgcagatctcttcagcccatagaagctcttcgacttgcaatgatggctgaatagccttatccagcgcggtccaagacgagactgccggtttcaaaacggtcttaccacgatccttgtcaagatttgagggaagatcgacgatgcactcgaaagctcgggcagtggccgcatcaagacaatgtacctgagttcgtcaaaagcgatggtggctttaatcatgatgcaacttccaagaaaggaaatatctagacgttgacaattgaggggacttacatcggcttgcctggtgatgacatcggaagcggcctctacctcaggcgctttgacgacaccgccccacttgaggaccgagagcttgggaggctccttcagagtgatagagttgaaaagtaatctctcgagagggacttcgagagcattggtataactcctgatggcggaagaagccaagacgatttcctatcagatcagaatcgaacaaagtcagtaataagccaagaggatctgaagaccaagatgtgattcccaagcatacctgagaagtcaagggatcgaggggatggctataaggcttttgactggagtgatcggcggagccgttcatggctgaagccttgagttgcatttgagaaggagttatgaagtgtctgatgtggtagatggaatcgtggatactcgagtctggaagaagaagtcgagagcgatggaaagagcggttgatgagagcttaagaatgcagacggaccatcaagaaagttgagctccggatgaacaagctttatacaaacgcatcatcgcacagtctgaggtttgagttctatgttcatcagactcggattgaacctcggcagaactcaatgggggaaggatggtaatcggacgcgggtaaactctaactgagtttagccgttcaattcacccgtttgtctggctgccctaagacatggtgagagtgaccggctcaacgtttatcgatatcggcgccgttatcgtgggaaattatacaaatcaaccgagtcagtcggatctatcctccaggatgatgcgcttctaacacttgacgattcctctggggaacattcagcacagtcagattctctttataaggtatacgcctgagaaaacttggcttctcgagtcttcttgacataaccacttctttcccagatattcatcccagcacgaagaagtttggcttctgaaaccgagtactgtatcccaccgctctttcccatacggatagttctctagacatatgcctcttgtaaaggagccggaggcgcagatagtccgagtgatgaccgctctccaggtagtgagtcttctgacaatgttcgtcttgatatcgcttggccgttcataatcactcatcatcccgttgtgactgctctgtacttcttctcccgtattgctttctccttttttgtctgcacgcccacttggataaccatgccaggacgaagagccgtctccggttacggtcaagtctgaggcaagactagagatgcttggatataaccaagagctcaaaagagatatcagcatgtttgagacgtgagcacgagccttccctttttcttttctctctttcttgtcattcgctccacattttctccggctaaagttactccttctaccctccgccgatatgtcatacttggcttctctaacaaagcttcggttttgcgttctctatcatgtaagtatcttcttttaaacatcaaaccgaattttggatactgacgcttatgttttgacttgttatcaccactaggggtgtgctaccttccattgcatccaccattttctacaatctaccctacggaggacccgttgccatgacatggggctggcttctcgcaggattcttgatattgtttgtcggaggcgccatggccgacttggcatcgagtatgccgaccagtggaggtctctattactggactcaccgtcttgcccatcccgacgtaaggacccaaccattatgtacattatctgtacttacgtagtacgcgtgaagctaaatcaacttttcatcactttcatcacaacttagtaccgcgattttctcgcttggatggtaggctacaactcgtttttgggtaatatctctgctgtatcgtcccttgcttgggccacatcgggtgtcatctatgccgcagtgtctatcaacgacaactctttcactgccagtactgcccaggtcttcggactatacatcggtattctgatactcatgggtgtcttctgtgcatacgggaccaacattctcgcaagattgcagaccccgagtgtcattctcaatgtacttctcttgctcgttaccataatcggtcttcctattgccatgcgaaaggatttgaactctgcgtcctatacctttggtggctgggaaaacctgacgggatggaataatggcttcgcattcatcctctcctttctggccccagtgtggacgatttgctccttcgattccgccgtctctatctctgaggaagctactaatgcggctatcgcggtccctgtagctatcgtcggggctataggaagtgccaccatcaccggttttgccgtcctcgtgatctttgccttgactatgggcagcgacatcgaagccgtgtataattctgatattggtcaaccgcttgcctatatctacaatcgaggtaagtttaaggtcttctacctccttgcttgcaacaggtaaactgattaaatcgcatcttgttctctgactttttttccttgtcctcacgcagctttcggcgtcaaaggctctttggctatttggtcgttcatgtgcattgccgagctcatgatgacggccagtctaacactgccagcttcacgtcaagctttcgcctttgctcgagatggcgctctaccattctctaactacttctactctgtcaattcgaagaccaataccccggtgcgaagtaagtcagctttagcgagatgttctgccgcatgaccataatagttttatgctcatcgactgcgcacggtacgctccttcatcacagccgtctggttggtggtcatcctggcgatgcctttggggcttttgggtttcgctaatgatgcggcgattaagtgagtaggcttgtattgatatcatgtccaaaacgaaagctgaagcagttccttctctttcgtctgacaaatcagcgccatcttttctttggctatcattggaccgtgtaagtcacgctgtgttataattatctctcgcgacaatactgacccttggattgcaaattcttcgatagattgtgcatatgctatcccaatcgcttgtcgggtctttgccaaagaaggagctttcattcccggtccgtggttcctcggccgtttctcgaagccgatcgccgtcatcgccttgatttggatgatctttgcctgtatcattttctgcttgtaagtccaagttccaagatttccaagagtcacagtacagatagttaataagttatcatgttcgcagccccgccgacaccaacacagatgcggcctccatgaactatgcgtgagtgtccgccttgataacatctttcagagtatcgtttactgaattacatgtgatattatttctctttacagcattgtggtagctgcagccgtatggacatttgccatcgcgtactggtatctacctaaaatcggcggtaaaacgttcttcaaggggccccagactcacagtgtttctttcgtggaatatggtaccgagagtcgaggcaggacgatggcagaagaggaagaagtcaacggtcctgaagattcgtccgatgtcaagaaggtttagttgtaattttaaggaagtggttgtatagcgaaatatatgttatttgtatctcatgataataagaatataccaatgtcttgaagcttgatccggttctccaagaccgggctagcgctgatccaggtctagttgcggcgcatcccacgagccagaacttgagtcaagaataaattgagccagcaaattcgatggatcagtagcatctaaactattgagatacgtagaaaactgattctgtggttcggcgttgaatccatcgacaccctccccgctagcgccacgttcaggcgaggccatctcgggtaaacttgcagtggtcgaggtgtctacgagcgacgacggtgcgaacagtgtttttgatccaccgcttgcattcgggatcaattctccccaaaagtgagttcttgctttgaatatgtcggtcacatacgttgatgaatgggatgaagaagcgttgatctgaaagcggacattaagttagctcgctcgaccacaggtaaagacgcaatattcagagaacatacctcagagatgtcattttcgagggcggcttgactgctttcgcgggcgaaagatgtaggaataacagccattaaaggcggcaacgaccttgggctgtttctttcagaaggaactcgctgtcgaggtactgcatcgagatcagcgaggtgaatttcgagacatccatcacacctgggtcacttacgtttcgacgattgactgcagcgagttcttttcctcctttgacgactggaacatgcatggggagaggatcatcagtctcgacaaacttgggttaattgacactcatttctttggagaaggaaagaagaactattgccactcacggccgtcgaaaaaaagccgatgtgctgaagccggagcccaaaagctaccgatttcattcagccaaagacagcatttctgaaaattgatttcggcgctactagcggcatctggagtttggacggccgtattgtaagcgtgaaactacatgaaatgcgattcatgaaatgtgatgggtcgctgatgagcatacaacgcgtgtttgataaacagaacaaagaaaagcagtcgcatgtccacgctagacttacgactgccgcatggctgagcatatgcaaaacgtcgctgcttgatggcgtcaagacgtcaaatttgtcaaggcaagctagtaattcaacgatgctctccgctgcgtggttgcaaagctgatggcttgtgccgaacaatccggtctcgccactcgagtctggtttcgagtccattcggcgagaatgcattaagattgttgctgagtgataccactgtcgtacaaacgaaggacctggagatcagcagagatgcggcatatagctcaacagcgcgacttaccatcatattcactacaaaatgcgtaggtggacaagacggcgcttgcacatctactttaagatccggatccaaatcagcataccactggttcaagcctttggccactcgagtaacgagcttcttgcaatgctgttcgttatcgagattgccgccttcatcgccaaaatccacattctgcaggcctagttcgttcatatctcctcgagctgcgaaatctaactcggcgtcgatgtcgaatatgagttcgacaagataggctaagcgacatgtggcgttgaaacaacttatcgttcgtgatcgtacacgttggatatttggggtacgatccgccgaggatgccaaattctgggggatgtagaccgatgggggcggccaaagctcaaattcatccgcctgcaattcggacgggaacggtacagaggctgttcggcctcgaagaaggtgaggccgacctgtttcttctgaaaatgtcttgtccataacgtaacaacaccagaagacccgcgaccgagtttctttttctgcttcgaagatctatcacgaatgaaggtcgagacatcgactgacagggtgagtcagatctaacagctttgaagctttggcctgcgaggcacatattgacttgacttacaggatctggtcgcttcgagttcgaagtcattccagtatgcaagcccagttccagagccataccgattgcttgacaggaaaggccatatgcctcagtattcatacctctacttatctgtcgatgggtgaaaagaaggagggcctgcaccgagtggatgtgagacacggaagattcgctcagggtgctctgagcctcttcgaacagcaagtctgcttcaaccggggtcaacacgggctgggaggctgttggaatgactgaagctgcagccagcattgcgaggagaagcaatgggggagatgtcgccgggtgaaagctaggcttataaatcagaggccagacattctgtgcaggtgcgccgatgaacagctttatcagcaactagcatcgcaaatctgtgtttgggtgataaggcaagcagagaaaacatagctacatgtatatgggtaaaatacaagctgagaagttggtcttgaagatgcaacggcaattcaaaagatgcattcacacgacgcggatgctgtgtaggattattgttctgcattctggccttttgtgaagctttgttagggcctggaggttggctgagggtgttgccgtccgtctgtctggaagaagacagccggcgtggaacgctctcattgctcgcgctttcatgcagagaagatcttcgaacggtggagtaagagatagagggagatttgctgggacttctgatcggttgctcaaggttatataatgggacccgggcgttgtgggagtgactgatgcatgacatacgccgcgtcgattgatcatccggacttgtaggggatttactaagccgttctgatctgaatcctctccttggcccactgaaaacagtcgtacggaggaagcagattaatctgaatgtctgaagtccggtctctgagttttgcacaacttagatacaaacagaagaagggaccacgtaccgtctcattccagtatgtatgtactcacagacaatgcctttgtgaaggcatgtctgacagccattgggttctgtatgacgatagcacgctactaagcatgttagacttcgtcttaccgactgctattatgatcttgttcttgaaactgacctcctggacaacgtatctttcttctctgcaagtgatttgagagaactgatgagctacccagagcttcctgcttgagatgcaactaaaatcaaacccagtcgctcaccttacaggccacacatgctaatcggattcgtttccgaggtctctcatcttcatcttcatcttcattattcagagagtgatcattactgcctggtccagcttcggcgtcaggggaatccagaacgagaggaccgggagacataacgctggccgggtatactccagatgatagtggaaggttatcgagaaccaaacccatgttgaacaaaaatccacagcagctatcgctaaccccgagtcgagtcgagtctcacgcgcccagaataccccgagaagtgataacaccgcggaaataacgctcggccttctaaattacgcatcaatttcgatcaggtcccaattttgatttgaaccggtatggaggcagtttacccgctatcaataagtttatccgctagatccctatccggcggagatccgttaccacagcgaatggtgcaaccgaattataagtactgccatctgatcatcagggttctcaaagatcagttcatccatctctgccttgacatagcgagatacccaagcatacacatcgtccagtaatcaaatctctccatccacaataccttcaactatgcccgcccaatgttttgaaaacatcaccttgccttccggcaaacagatcgatgttcctaccggtctcttcatgtgagtcgtcaggtggcatccgcatcgttatccggctgatgcactgtgctcttcccttccctcgactgaatcccgtatgtgcttgccctggttcttttcagtaacaacgaatggagtccttcctcggatggcaagacctttgagaccgtagacccagctaccggagagaagctgctcgatttcgcccatgccacctctgccgatgtcgatcgagctgtcgttcacgccaggaaagcattcaaaaccacgtggggtaaaaatgtcgctgccacagaaagagcagcttgtaagttgccgtgtcgaatgatagctctcttgaccggccatcgatcctgactgttacgcacgctcgccttcctttacagtattatacaaattcgccgacttgatcgagcaaaacagcgaagtacttgcagagctcgaatcctggaactcgggcaagggggttcgaattgccagagaagccgatgttggtgactccgtcgcctgtataaggtattatgccggtctggccgacaaaagccatggccaaaccatcgatacctttggcaaggacaagattgtctataccttgcacgagcccattggggtgtgtggtcaaatgtgagtacagtcattcggcatcgtcaagagagtgttgaatctatgtcattttttctcgcactgatattgatgaacccatctagcatcccttggaactatcccatgctcatgtgggcctggaaggttggacccgcattggcaggtgaggaccccttgcccgtacaagaccattctcaagctgttgacctgttggaactgacatcttcctgttcgtcttgaccatgacagccggatgctgtgtcatcatgaagccctccgaacttacccccttgaccgctctatttctctgtacattgacaatcgaagccggtttccccgccggtgtcattcaaaccctcgccggtcttggggccactacaggacatgccatctcaagccacatgaacattgacaagatcgccttcactggaagtgtgatcaccggaagacgaattgctgtagcggctgctgagagcaatctcaagaaggttactttggagttgggcggaaaggtgagctacccggcgactgttcaagggttacatatgttcgacgctaatctttgtcggatctcattctccagtccccgtctctggtgttcaactcggcagacatcgaagatgccgccaactggttggctttgggtatttggttcaactctggacaagattgttgtgccggttcaagatgtatgttgtatagcatcgcatcaagctcttctgggatctctcaaacagcttgaatgcgaaggctgacaataaaacgtctcttgaaccttaccctttctatcacagtgtatgttcaatctggtatttacgatcaggtcgttgccaagctcgtggagaaggccaaagcatgcgctataggcaaggtgagtcaaaatcacttgaggggggagttacctgacttcagaaattgatctttagccgtaacccgcttgtcccggccctctttaccttagccttcagatgaggcgacctctttcggacctttgatttcggcaggccaacgagacaaagtcatcaactacatcgaaaaggccaaggcagacggggccaaagtagccaccggtggtcagaagtgggctcaatcaactggattctacgtcgagcctacggtgcttactgaagtcaccgaggacatgcaatgtgtcagggaagaggtaagccttactgcatcatagatggatgccccggcagcaatactgattatgagacgacactcctttttatcacgttctcacttagatctttggtcctgtcattgtcgttgccaaattcgagactgaggaggaaggtttggaattggccaacaacacttcctacggtctcgccgccgccgtgttcacatcggacgccaagcagtcaatgcgagtctccggggccttggaggccggtacgatctgggtgaattcttatgctcttctccatgtccaagctcccttcggtggttataagcagagcggtatcggaagggagttgggcacttacgggttggaggcttatcagcaaatcaagtctgttcatcacaacattgacggtaccatgtgagtcaatgtttctacagctaagtgaaagtttaaactttaaaactgatgaaaagcatctctaaaattttccaggagctggccagtctaactgctgtagcaattatgtagcaaaaactcaaacgatcaagaaactggtcgggcgattgtattctatgccctaagacatgatgagagtgacctcaaccgatggtggttgatacatggcccttttggacttgggtgtcctcagaccacaaaccaccaagatcccatgggtcatgggtttagtttctgccagcctcagcctcagcgaccagcgtagcagcagcagtattaaacaccagcattcttgctccctcgttcttctcgtgaagggataggtgtagcatgttacgtaacgtgttcacatccctgttccgccaagtctgagagcaagaatcagagagacaaaggagtagcgaggacctagaggtagacaacgacaaagacaaagtgacaaagtaacagacagacgaagacagaagatatgcttgatcaagccacgtgcaatgtatttcagcggtgttcatctatatttccggcgtcagatatacaacatgaccatcgaagtagtcgagccaaccaacggtccgaccgctctcaacagcgtttgttgagattacagcagctcgacatcatcccagccatgatttgacatttacaacctaatttaatcttacagattcaagcccatattcaaaacaaccaacgaataatcctctttccgatcttttccgacgagtcgttctcgatctcctggaaagatagggtggcctcgtgttcttccacttcagccaaaccttctctaagatcgatgtcttccagtttggcgaatggttttcggccgatcaatttgatgacagcgtagaatattacgaacaggataggagcggcgtaggaaaagatgctagtaagaaaaaagacagggcgatttagttcagcagatgcagaataattaaaagaaggggaaacagacgagatatgacttacaaactggctgtatcccaacctccgttcaagaagacagggtaaccattagagatcatgacgatcgtggaaaggacgagtgcataccaagcgccgtatggctggaacatcgatcggtaaggtaatgttgatcggtcgatgttttggatggccatcgctttgaaccatcggatgtgggacacactcatcgccatccaggtaacgatctgagtggcggtcgatatgttgatgaacctgttgtgatccatgaatacagtggaacaaagaaatcagatttgttcaaagcggctttaaaagaaggatcgagcaagcgacgtaccactcaagaaccttgttggctcgatcagagcattggaggaaactgaggcaagcaaagcagagcgtagcaatcaacgcatacacaggtacaccgttcttattggtgcgcttgaagaaagcgggagcgtgaccagcttgcgcgagaccgctgcaaaggttgtatgggcaatgtcagcctatcattcctttgtttctgtatgaaaatagcagcaaaggaggacgaactgaagagttcgggatccgttgaagaggaatgcgcttcctgctgagtaaatgctggtgactaggaagttccgaatatgattatacagtgattcgtaagacacgtttatctaaattttaaagtagtgtcgaaactactgactgataccggcattcacgatggaacctaagtacttaatcttgagtctgctcatcgcagccacgtaaggagatcttccagctgaaaaagatagcccagtcaaggaggaccttaagcgtcactgaacgatcaatcgagcaaaagaagaagagatggaccaacctccagcagagttctccttgatggcatcgttcaagatcacatcatcgtagggcacaacaataccgacggcgagcgcagatacgaggaagctataaaccgatcgattcaaacaagaaaggaatctgagtcaatatttgaatctgagaagatgatatagatatattttagacctacaagagaattaatcgaatgtagaccgacttgaaggcactgggaaggacttgtcgaggattgatagcctcggctgcctaaaattgtagtgatagaaatgacaaaagtaacaaaaaaggagttaaacttgtgaactcggcgctcgatgaagcaaaatggacaaagaagaacctcccgaaactgaccactaaagacaagaaatctggtccggcaacggcaaacgaggctcctagcagacaggtccaaaacccttggaagtaaccggaagagtttttgccatagtaatctgagataggaccaggatttttccagtgtctgaacccgtaggcgtccttgagagggtttccaccgcacatggtcacaaaggtgaacatgaagagtccgagcataaggacaatcttgcctgaaagtttgaaatgtcaagaggtgattatgaggtgatattttcttagggtcaattggaaataagctcctcgaacgtacagagaacaatccagaactccgtttccgcaaagatcctggaggaccacatatgaagaagcgcataagtgactatacagaccactgggacgattgccggatggacatcctaatgtgttggacaattaaaattagcaaataataagaaagagacgagggacgtaggggaggagggagacacaatcacaagaaacaggaagatgagaaacaagaaagaaatatgttagaccatggctacttgaaaagaaaagaagctgaagccgcttacgctcgtccagtatccaagggcagcgtggaaagcagtgatttcgaaacagagcagagaacacatcgcaaggaaataattccaaccggtcgctcccccaaacgcattatccacgtaccgactggcaaaagtgatgaaggatgactcgaccggtagttgacagaccatctctgcctgaccttcgtttacactgttgacattgcaaaggtagaagacatttggaaattaggtggcttttcttcgctttctcgagttgaacaggaaggaaaaggagaaagagaaccaatactgaccaaaagatgacggatgtccataaaatgtatccaagcaagagcattaacggacctcccttaactaaaagtatggaagaaggagacgattttcaactggtaagcacatcgccattggggccaaatagacagagataagcggcctaccaagacttcccccgattcccaagctacaaaaccaggtgaagtcagcattgttaatgagcttccaggaacgcacagggaaaacattgcaggaaacgcaagcaaaggcaagaaagaacgaacaagacggccgttccgattgtaccaccaatcgcaaggaaccgaatttgtttggcggtcatgactctcttcgtatggttcatctgtcggtttaatcctccctcgataccattgacctcttcgatgtccacggaaataatgtcttttttgcactccagttgatccatcttggctctattcttctctttctttatcgccaacgagtaagaggaagaagggtgaggcagtagtatgaaattgagtaagcgtgtgagcgtgtgagagtcagaaagggaacagaacaggatgacgatggggctgaaacaccagagaaacggtttatatatcaagaagcgatagttatctggtccagatcgacccccaggtcaaagaggaagaaaaaagtgttgatcgatgataaagagcttgagcgataccagggcacggcaatctttgtgagttatcagtttagcgacagagaacgaagttcaatctctcaatcagttagatctgttagtctcatcgcagaagtgagcgcaaaagcatcaaggttagtctcaacacagaacggaagtgaccaagaacggaactgtcaagatactctcggcatgatgatgttcgccaaggtacccagagcgcagcgcgaattgcgttcacagccttagatcgatggccgaacggatgggtcggctaaatttcaagccataatttccaatgtaatgaaagattttgaatgaccttctatacttcactaaccttcagttctctaactttccgtcagcagtctccgagatcaaggtcataagaaacctacaagtaaaagaaaaaggaagaaaaaaatcggattcatattacatttttttgtctgtccattcgtccatctgtttcggtccttcaaagacaggttcactgaactgcccattggaaatgagggcggcatttatgtgatcaactaaagataattactgaaataaaagggtgaaaatggacttttcgttctggcacttgttcccaatcaagccctcactggttgtccaaaatcatattcacaccacccaggtgtttcagtaagatggattgagaaaccaggaaaacagaagggaacccgccagaaaatatatagttcttcggagagagaggcttgggactccgcgcaaacggaggtcggaaggtgatgcctcggaaaaataaataacaaataacagatgaaattatgtcaagactgctgaaactccaacagatctcttacaagctgaacaaatagtatgcaagtgacttttagtcaacaagatcgtatagtatagtggttagtacttccgcttgtggttggcaacaacgcaaagtcgcggacgacgggtgttcaattcaccctacggtcatttctttttagtgtctctttcggctccttttcatctatatattttgaagatatatgtaaacatcaccttggtcttgtatactggtgaagagtaatgtattgaggcaactacacaatctagacgaccgtttagatgagctatgatttatccttgacgatcacgactcctgggttcaaggccgaccttcaccttcatggaataagtgagcattagagaaattcaatctcgcggagctggacaaaaggccagtacttgacatagtcgtctagagtaatagtctctccgctagttcaacaaagtagaggtgcgatgaccatggtagattgatgaatagatttgttcgatcgaagagaccgttggtcgactaggctgattgacattcatgctgtatacctatcactgggcatctagatgaacaccgctgagatcagctgcacgtggctcaattgaacacttcttctctgtctcttcgtctgtctattgcttcgtatatctgtttcttcgtctcttggtctgatgatctcctggtcatggagtcttgctaatttgttgtctgtggcctgtggtctgacgatgcccaagtcccaaagggtcatgtatcgaccaccaccggttgaggtaactctcaccaaactcaaggcttacaacatttggttatggtgcgatcactcccctaaattccgcctcgagacgacgttttctgttgcgacctgtttgaccccaaacacccagcccgcgccgccgctgaatacattagctggcaaactctgatttccggttgtcttgtcaatcgatggtttgagggctccgttcgattgtgaagtggtattgttgtcagaaaatgaagcgaaaggtaccgaggcatgggagttgtcgtagatatccatgctaacaaacgaacgataggtattgatgtcggtattctcgtcggaccacactaaggctgctgtagacatggatacagtgtctcgatagaggctcaaatctatgggctaaatatcaaacaggtcgaaaagagatgatatactcttaatcaaagaggctgaaatatgtctaaaaagtgaagatactgactctgcccagcgtatgagaggaaaacaattcgtcctaaaacccaaacgtgtcaaagcacatagaaataggtcagccgagtcaacaggacatctagaacacatctgagtgtcaccccattggtggtcttcggaattagagaaagtcagtttgaaagattagtggctgaacgaacctcatgcgaagcagaccatcttttatagcacaagtaagagtatcagtgtttgagacctagaacagatgatagtcaaatggatgtaactgaccgaacgtattcttggatctcgttgggttctactactggttgtaggcttttttgaactttccactccaccgagttgatgtcggttgaggattcatctccctccgcaccgacatggactgaacgatcatccggctcaatagctaactggttcttgagctttgacatctgacgttgggcaggaacgtaggttccatcggaagcaagccatcgccggactgatgatatggactgaatacttctatatcatcaaaagacatcgaaaatcttgtttaaattgaataacaaaaactcgacatccatgccatatccatgaatagttaaaattagcaacttaccgtcgagatcgcaacgatttacttgctttcggcctaaacggcgaagctctcaactctacatcgtttttgctgttttgggtgggaataagttatcaattcactgtgcgtgaacaagaaaagtgtttgtagcgaaccttgatgtattgattctcatagcaaaatgcctatccaacacagtgaatagtcgaggacgatagtactcgacataaaagtcagagccttgggagagtgtgagtcgaattcgattctctgcttccgtgaggctgacagggtgatccaagtgatttggatcgaaccaatctcggtaacctcgtttaggtatgcgtcttagtatgggcgaagatatgcctttttcgactccaaggaaagcatcgattgcgctctgtttttcggcatctgtgtgtgataatcatcagtatatcaagcaatattaaggatgagattggcatttgacgaaccaagcagcgagttagcgtaataccgcttgatgttttctatcagatccctcgaatgactgttccattgggtagtatgtttgtacgtgtctaccctgttcacaagtgctcctccagagtactgtaaagccagagtgtctccttggtcgtgatacatctatagaattttgcagaagtgtcaatacgagtatcgacggaacaagagaagaatactcaccgagttcaacaagtttgtagctacgcaatcgtattccaaaattggactgggaataatgcctagagcataaagctgatggccaaaaaccctttttcccatagcgaactgaatatgattgattgagtttcgtgcagaaataaaattcagacaagatgcgaaattcttacctgtgccgcgttcgtacgatctaagcaatcgacctgcgatagattagggtattcagtgatagcacccgtcgaattgggttacacgttatgactcacacagttggttcgaagaatgccgctttgtagttgaagagtgtcgcgaaacggtacgattctgtatagatattttgggtttaatacaacgttgctgactgtaaggagcttgaaccaaaactttgtgatactcgcccgtcttctcgtctcattcttccactgtggaagaacttggttatctctaaactttcttccgctatatcttccaaaataccaacaacatcctgatccttactgcaaacagacaaggcacataagttgtcattgaacacaaagttctcaggctcttgttgacaacctactttttggatgctcgagacatgtcgaacggtatgtggatcattttggcgtcttcggggagaaactgatttagatactcaatgcattgcgtgaactcagccagcagcttcatctctcttgggacggcttctttggcctgtgagcgaaacgtatatcaattcagatgttaacatagtatcagttgagtgtcgtaagcagatcaatggcaaagaggccctcaccttgatgagattgacgatgatgaccctgccaccatacgttttaagtagctgattgaaatgcctagcggcagcggagaagtaaggatcgacaacatttactgtcaaatgtttgagggaatgagttgaacatctcatgacgatatcatgctcagaaaacttctcaaaactcactttctatcggcggccggaactgggagccacttgtatcttggctccagagcaaagggatactgcctctatactggacgtagcttgtgtagttaggattagaatgcttgagaggtatagatggggccgtatcgttgccaatccgcgagtcaatagcgactgattgaggtgacaagtttgaaaatctgggggtcgggcagtggaagggagtagtagtcggttctgatacgattctgaaacataggaagaggagaggcggacgtagcacataatcagcaacaggttgaaacgaatcaaagagagtaagtagaaactaggttatgaaacccactgttctgtctcgacctcgtttgcaacatcgccctaaagaggagaatcgagaatgaaaagacagcagtggtattatgatagggctttgtcgattgagtaggtgatatcacacgagatcgaaacaactgcacagtacatgaatagacatacccactcatccgcccctcttctccagtatctagctcccgcgctgaaacgcgagcggcgaccgatcagagttatgtagaccgttcgccctaagatgccaagctctacacatcatcaattgataacaaaatgctgttagacttcaaggcatgcgatgatgatacgtggcaaatgatagaatattaataagaaacgggacctgagggtgagaatacgtactcgcctggtcaacgaaacttagaagatacacaaatagatgatatcgatcaatactttcacaaaattcatcgacacactgcgaacgtacccatgaatgatcggaaggatccagctgcccttcttgtcgccgcccaaaggacctttccaactaccgtgggtctgtgatccatcatcgagaccgaacgcttgacggaggagataatagttccacatatatctatgagatattttgtgaaatgatgtcacatctgcgagggcgttagcagatcgtggaggacatgatgctcgaactcctgtgagattagactgtagactggatgttaaatcataagtgtagcttggtgttgtgtagatggagagttagaaagactaaaacgacgttctttgggctgatcaaaggaggagatctacctgaaatagaagtttttggataagtcgactttctggaaggtcgagagcagtctgtcatgtgcatacgagataaagcatgcgcgccattattttgtgatagttcgttaagtgtcggatcgcatacgtcacggaagagaaagaaaaaaaaaggaagaatatcaagcgaacctggtctcttcagccgtcttctcgtgccctcccttcgcgacgctcatcatgagcgtttcgtcgcagtgatatagataatgccctcccaccagagcaacgacggatcgtttggtgatcaagatctaggtttaaacccgtgcgctactataagtgaccgatttgttttccttagatagcgttgacagtagtcaatcaattgatacactcacaagataccatccctgtgtgaacttgacgaaccctacgagcccgctgaggaacgcgatgatggcaacaacagcattattgattatttgttatgggccccatataagattgttatagctggtttagaacgaggatgagattaaacgaggagacttactagaatatcatgaccttctccatccccccagtccctttatttccctcttcgatcatgcgtagaagctctgcagtctgcctagcgtcgtagattgccatatcctctaccacattaagttcggtaccggagagacgatcgatcttgagtactcgggtccgagagtctgattgattggtacccaagatgtagaagcggctggatttcgagaatcatgaaggagggatagtcagattgcaagtgaaacgaatacgatatgattgacacgaattaagactggccagcaggaagcaagacttacgatcgtgtctcgtacagagtgaatttattcaacgacaaaggtggcccgttctcctggttaaactgtgtctcgcgcatgtttccagtagcctctttggttgaatccagggccgggctggacgatggtagaattggaggttctggtccagtccccaaggggtatgtaccggtgaaataggaggaaggttcaacaggcttctcggagatagtgttcgaaaccgttcgattgtttaacgaatctgttgagatcttcgcatcgttcacaggctgaaacgaaggatgagatggataagtggctgtaggtgtcttgtcctcatcagcatgcgatgattcgaaaggcgaggtaggcaagtcgagggtagcgggtgaagatggatcagctgttcgatctagttcatgagaaaccgcggccttttcagcaagggatgatgaggacgatgacgaagatggtaagaatgtgtttggcatcttgaaggagtatctaatatgagtattaaggcgagtgagcagaaggtgtgagatatatgatgtctgtcgtccttctcatcgtcatcgtgatggttgttgatctcatctactcttgctgaaagaggaggattggcgtcatgacgactagaatcatgactattgattttgtagttgactctcgttcagtttcctattgtccttcatatcttcatctatcacgattccttaaacctctaccctctgttcatcacgttcagagtctttaatctatagagtatctgtcgactcttgactggactggtatcgccaatatgtctgccaaccgaccatctgtcaaagtggctagaccagccggtcgatacttcaagggaaaagcccctcaagaggctccgtccgactcgtccgatgaggaagaggctgatcaagtgtctcagaatgagaaggaagttggaaggaacctcgtttcgtccgtatcatctatttccgctcataccaacagagcaaagccgataataatgggtcaggtcaagggagtgacaaaggaagggcaagtgacaagaggaaacaacggtgcgtgttggtaaatgccacctactcaatgattcaacgcgatcccttcgaggttctcacccaagaaaactattcctctgtgtgtttgtagaatcttctgaagaggattcttcatccgaagaagaatcagatgacgaacctccgagacctcagtttcgagctccatccaaagcaggaggtctatcaatgcctccagctgtagttgcttccaacgtatgtcaacttaatttcgcatgatgatgcatccctggtatgtgaggatatttaacatatcaccttcttaccggcgatcaggacgaatcgagcagcgagtacgaaactgattcagaggaggaagcaccaaaggtcgctttgcgtcctacgtttgtcccaaagtaagtcgactagctcatgtcgcgttcaagtggttgaactgttagtttgagctgattttgtttctctctatcctaccaccttgacgatctatcacagacgagcgagagaaacactgattgctcgagatgcaaacactctatctgctgaggctgctgctgccaagctggaacaggaagaacgacagcgaaagcttgatagtcataacatggttgctgagagtttaagaaaggatttggccgagagtgagtgattcttatgttcacgatgattcgtggtttccatcagtctttccaaattgacacgctcatgtttattccttcaatgaaactgaaataaatcaacagaggaggccgttgctctgacgaccgacgttgatgataccgatgggctctcaccagaaagcgaatttcaagaatggcggctacgagaattgactaggctcaagcgggacaaggaggcatctctggcattcgagaaggaaagagaggaagtagaaagaaggagagccatgccagagaaggagagaatggaagaagatttgaagcgtgcggaggagagcaggagggagaagatgaattcgaagggtgctggtggtttccttcagaagttttaccataaaggagcattccaccaggtaagtccatcctttctttgcatatctttattctcccttgcaatataccaagacagggttcatgtctactagactacgcgaactcgtcttgacttggcaatcagttgtcattgacacgcctctctgatctgcctacaggatgaggagattttgaagaaccgagactatcaagctccaaccgaatcggcggtcgatatttcgatgctgccaaaagttatgcagaagcggaactttggaaagatgtcacagacaaaggtaagtactctgaagtttatgtatctgcattgatatgtcggacaggtctcttggattcaaaccctgatccttctctcttcgtgtcgatattcttttctgtcagtacactcatctggcagaccaagacacaaccaaagggacgggaggaatagggtttaacactcggtcgacgggcggcagtgcagagggatgtttcaactgcggaggccctcacctcaagaaaggtgggtttctgcattgatctatcttgatcttttgttcttcctctctttcaaacaccccgttgctcattgatcatttgcctctcaatacttgatggtcgtccaccaatatacagattgcccacagcttcagggtttccaatcctcatcttcgacgtacgctacatcaactacgggtgctaacaacgcgtcaggaccttcgcgctcctggggggcttcatccgagtccagagactatcgagaccgagaccgagaccgagaccgagaccgagatcgagatggttcatactctcgcagggatggaaacagggatgatagagacaaggatcgcagttgggggcagtcgtcgcgtagggagcaggatgggtcgtatcgttctcgacgtgcagatgactacaggcaggatcacagaaggtctcgatctcgatctcagtcgccaagaagagagaaagaaagaggtggctactctcgagacgcaggacgagagaccagaagagaggagtcatctttcaagactggtgacggaaggagaaggaacaggagtagcgatcggctcgaacaggagagaagggatgaggatggcaagagaatcagacgcggttgagaaaagaatacactctggtgtctttagcatttggcttgaactttcttcccgaaaacggttcatggctttggattacagtacaaagctctgtatacatatgatttcaacgtttgtaagcgacggttctactttagttttctctccctcccatccggaagcgatcagttttctgtggaaggaaagcaagagagacgaccgataagtggatgaacagagagttgacagaaagaaaagacgaagaaaggcataagatgcgatacgtacctcgccattgatttctacaacttgtacaacggctgatgcagatatatcaactcagaaatcagtcgagttgtactcttatatatcatcaagaacaaagcttactagaaagttgtcatcggctcatccgcactcctgatttgaagctgcatccaatatgccttcatgttgtcacacttggggcagcgcacttgatgtaaacgagagacgacaggcgacacatatgaataaaacctatgttagatagagaccaaggagcttatgatggggataggtaaagaacgaactttcggtctggtcaacattttcccatgcttcatctcctccaagtacgtcatcgacttcttttcgcttcattgtcgttcttgtgttgacctgaaggcattgaaatgcaagaatgaggggtagagggtaagtcaagcccatgctcccaacagtttatgcagaactataaagccaccaacctgtttgatgattggaaatcggtaggtacatgattggcaggcccatgtttggtctcccgtggcagtagagattacgagcatgtttgcacatatcggacagaaaatcatgttgattctgaactcgattcctcggtgatgaatggttgatgtctacaactaaacgagccaaaagcaaaagtgagaatgaagtatacgacgatgaaatttctgtgttagggttatatgcggaggggtcaacagtagcctgtttatgtcctcaccatctcttctgttggcacgcgaacatcatcaattcgaggatcgacttatcaagacaatgggaaacgcaccttcctccgcctcgggatctttttcagagaatacgaaggctttacatgtgctccgagtggcagagcaaagtcctgctgcagaggcaggcattcaaccatgtacgttcattcaagcttacttgttttgaacgtgatgaacgtttgtgcagaaagcgatacggatcatagtttcagaatgatgggctgacgggtggatctctttgtgttcataatcgaacgctgccagtctttgactttattgtcggaatcgatggtgtagagactgtgaggtcgacatttgtttcgagtctgcggtgtccgttgaatcatctcgactgatactgatgtctgatatgacttttcccggcgtaccaggacctatcacctgaatctctctcttctacggtcgactcgtttgaatcccgaccgctcacccttcttgtatactcatccaaaaggcaggagacacgtcgggtgacactaattccttcccgggcatgggcgagcgaaggaagcgaagcgggttccccgtacaacagatcctctcgccctctaccgccctctaacccatcagcgtcatcagctcttccgccgacagagggttcggctcattctcatgacgatcattctccactggcgaacagccattctcatgatgaccattcatcaaatcgaccgcaccactctcataatcatagtcaagcatcggtcatgtcccagtcccagtcacaaccgtctctattgggtttatccctgaggttttgcaccccccagtcggcgttagagaacgtgtggcatattctcgagattctagagggaagtccagcggagagtgctggtgagtggttttccttcttggctcgtatacctcaccacactctagcgtaagctccaactcaaaagatggtttcgtgtgtgtgcgcggacaatcaggtttggtcccctatggggattggatcatcggttgggctggaggtgtattgcaggatgagaacgatttttatgatgttgtcgaaggagtaagtcttgattgtccactctctctctattcctgcgatggccgcaattggaacaatattcttcaaattccgagcttatgtttggcgttgacgaatcttggtataactataaagcatgtcgatatgcctctaagactgtttgtctacagcgctgattttgagtgagtatctgttgatcttgtttttcttcattccgagcgccgaatggtctgaactggaaagaagattagctgacagaaaacatctgatccgatagcacgctccgagaagttgtgttggttcccaatcgacaatggggaggcgaaggtctgctgggttgcggagtggggtacgggctgttgcatcgaattccaaaacctcaggattcgggtcgaccaagagagttagatgagccgagtggaagaaggacgtctgaggtatttgacctaagcagtgacagaggatgaacaggacgacgcatacagactgtgtgtatatgtctatcatgtctaccatgtctatcgtgtctgttcccgttgtgtgttctttctgtactgtgtgaaccgatcacgaagaattcaaagaaccgaccggagcgcaacttggatctggccaggggactcgactgtaaccaatgtgaccacggtgaaattgaactgctatctgcgggcttgtcgggctgacggatgagaacggccgtgcaaaataaagagaactgagtcaatacaatcacatgtcaatacgctttgtgctcgatttaggttacaactcgatcaggcacaccgcaaacccacctgctcaaacgccccggtagtggctgacgtaatgaagccagactgtctggacgcgtaaccgctcccagcccgcgctgcctgtcatacccttacacccgcccgatcgaccttccttgcctctcaccttcgtccctcatctctttcgttgtttcttgttctcccttcttactgcaaagacaacatccacagagaaagaaacatttcgacttgaatcatagttagatggatcgttcggccatcgattctgttttgctttgtctctaggaccctattcaatatgtcttcaactggatcaaacagtcaacactctaagctctcaacttcgttcgtcccgtcctctgccaccaaatcacacatcccaccaggaacgatccctctcaaacctaagaggccgccatataaatctactctggtcgacaaatgtattcggtacaacatcaactccgaaggctcgacggcagtcctgcaaaaacgagttcagttagtgtcttctttcctttatttatgaacactatctattgtttgtttctgaattctctgttagacacaaaagagaaatacctgtattgacactattgtatgcgttgcatactccttttcgcgctctctcctcggacaaatcttcactccctcatccagagagttcgaggccaaaaatgatccacccagattgaggagaaaacgaaagtggtggacattacccgatcaagatcaggtgggttatacctttttggtccctcagtagatcagtcggaagagaaggagaagagaaaaacagaaggcgcctccaagcctggacaccgctctcttaagagcgcgacattcccgtatgatgtcctcggctctgcacaaccggaatccccatcgtcctacccgagtttcagtccgatttttatcacgacctagccatcatccggtctcacctcccgactcttgacaaacatattctgataaatttgtcaacgttgttgatctcttattcgtactcgatgactaaatcctgcacttccttctcttttgggtttgctccttgttttcttgtttttgtttttccttttccctctccttgctcagccgattcctatccaacctatagtcctacaagaggtaaaaagcgaaaacaccactcttcaaaaaactgttcctccttcaccgtcgacatcaaaaataaagaccactgcagtctcgaccaggacgccgatcgcgaatccaactgagttgccattgtttgaccctcaattcgagatgcctacaaacgaagccttacctgagcctggcaattatgcaggtacgcgttcctctttctattttatcgccaagttattcgtctttatctagaattcgacggctgatcgttccaaaacgcttgccttcggacctatggccctctagattttaatcctcttctgagtttccctacatttcccttcgatcttcctcattcaggcaactctctggtcccgtcatccttcgacaaccccaacacttcctctaccatgaattccgatctgaatacgagcttctttcagtttttccacccatcctcaaccacttctccaacagctgatgttctgccttctctcgacagcacatcccagcctactttgttctctgcgttcgaaacatccgccctagcttctttcttaacttcttcgtctgatgaagcgcccttcttgttcctcgatggtctcccttccaacgatagtaatctaaacacttcagtccgtgacgatggaccgttcgccagcctggtgaggcatcggggtgcctgggatttcaatccgatactacctaaaggcctgcccatgctcggcgatctttccaaactagatctttctggatcttcgcccaaggtaggcagcgaagacctgacgtgtcaatcagcggtcgggtctcaccattcatctctcaccaccgagcctgctggtcaggatcggccactgtggacgacaacgacgccgtcgagaaagatttctcgatcttcgtccagcttatctaacaatgttccccgctcacaatccaaacggatctgctcccagtccaaccagaccgacgatgagagccctccgtctcggtcttccgagtcatcgtccctccacacgccggaacgactttcgatttccccgtctcaaccacataagcgaccgagaacaatgtccggcggatcgggtgtttactcaccagataaaccttcacagtcgacattcaatcagttgctcagccaacaaacatctgtgacagaagacaaagatggttttcttttgtcaccgttggtggtcgaacatgagttaggtaggacatgcgatcaggcgctcagtccagcgtccgtcgccgcgtttgggcctgtgggaaacggagagatggaggtggatactgaagtgcaacctgtggaacctaccggacgatatggtagatttttgagtgcggtaagcctttctatcgccgtactctttttatcggtctttgcacagaactggttttgtgtactgatgttggatccctcgcaaactcccccctttgtctaatacagagtgagaaacgtgcaaatcacatcttgagcgagcaaaaacgaagagatgctatcaaggacgggtacgtgctttgccgatattctctacatatttcaaacttcgcgagctaacatcttgttccatcgattcgacaaattcaccatagatactccgagctttccactttgctttcccaagcccaacttcctcatacctgggactttactcagcctatcccgtcaggttcgcttgcaatcgaccgatctttcaaacatccccgagcagagtccaaatcgagtgtccttgaaagagcagcaggactgtgccggtggtatgagcaagggaacaaatggctcgaagacgaggttgttagggtcgagacaatcctagagagcagagcggagcgggaacgctgactcttttctcatttttctctctccctttccttcttggcaatctttggttatacacttttgttctacattttcttatctacgttgtacgtcagtaatccgtcacgaattcgttacccatttgtattctctttgtgttattctttattgtgatctctttctgtacttcctttcaccttcttcattcattgtctttgtcccgtttcttcctctttattttctcctcattcatggagcggcatttccaactggattttttttctttcttttcatatcttgatatcacttctttccttcgtctcattcaatcatcctctgctgtcatcctcttcttctctttccttctgtaacttttagtctttccatgacagtccttgtaaactgtataatcatctttattgtatgtctcaagctctatgacagaacatcttcccaaatcctctttcaagaataatcttcaaccggtttaattctactccaaatcacgacgcctcctcttctccgctcatcgtcctgagcccaatcgaacccattccaaccgctgacccaggtctgttcgaatcctctttcctccaggatctctctcaccttgtctccctcgccattcggagcagaaagcagtgtctggaagaacgctaggtgggtcggccaaggtttgatattcggattgagccgacgaagagtgtggaacgtccttggagatacgacgggtgaaggtgggaaatacaagaggagatatcgagaaggagatgagtagaatatcgactccatggtttcatgcagcctagcagacgttctgtagagaaagattggtttgttcgttaatccataagtccgcaccacaaagagaacgagaaggagtggttcaaccgttgaaccgaagaaaatactcgaagcagagagtgttcaaggtgttgttgaagttctgagacctaccctagaggtggctcacatgtcaagaaccagctgtcttgttctagatcctgtctatggagcatgctcatccaaggcgtggaatggcagggcataagcaaacctacactctccacttgagactgggagcgcagatgggcgatcacttcgtgctgtgcggctccatggtagcaagacaagtacacaattaacggaatttgtgggatagtcaaaaagaaaaagagccggctgttgagtgtagtcttgggaggagacgaggaagactcaggcgtcgattcatgagaggaactggacggagatggccggaataatataggtgcgagcttcaaggatgtcataaggtgcaacacgggaagtaaaggtaagagaaacctccactccttgtgtccaaggagcgaatatactccaatactccagattgccagtccgagaaggactaggggggtctttccatgccttcccttccacacgtcgagcagagaatatagaaaaaagggtgtggctgtgaaaagaaggataggtagggattgagtgatatgatagtggatcgaggataaaccataaaagtgagaagtcggcagaagaaggttgtgtgtaataaatggtagaagaggtatcgtcaaaggtattgttgcatcatcggcaggaggatagatcgccgtgtctagtaaaatcgatagaatcaagaagatcgatctgtcagagaaaaccgcaaggcgtgtcagtacacgtacgttctaggagagaagatagctatacgaaccctatgaatgtgctttcgagaatcagccttccacattcttttggcttgccttctttccatcttcgaaccaaaagctcgccccccaagaatatccaaaatatggcgttggtcgggcgaattatgaagtcgacggcagccaaacttagggcgatcctggttcgttttctgcaatatttatagggtccagaaataaaggtgagctcatgcttgtatgattaatccaatgaaaatagcagggcaaacgacctttcttgaaaatctatcccggtcgccaatggtcttgacttgccagatggatcgtcgttgcttatagtttcttgaatttgtgggcgcgctgagggaaatggccagaaattcagagcgcaaaccataaggacggtttcgatgctgttcacgaacggtctcgttagcgcatgagcatagaataacgaggacaggctgagtatcaactacaaaggggaccaggtcatgatcatcagcgggcatgttgcgacaaatctacacttggtacattcaaaacttactgccgtccgagcaatcgattggttgaataatcttgaggcgagagtgtatgtcattgaatcgcatatggaagcgagtacggccattataagtttaggaaagaatatctatttttgttgagagtcaagctgcatttgatgagaacgcttgtcgcatcaacaaactcaactagagaaagacagaagtagagacaaactaaacgaactagagcatttccttcactcaatcctagaatatctaagcaccagtaaattcctgcccaaaaggctacccagagtgatcctctcaatcgaccttcacccatccacccccaccagacgcccggaatctttgtgttcggtctccattcccaggtgagatgaccataaccaaaggcgagttgatgagctggttcgagagactggtacgactcgtctggctggaagggcgttcgttgaactatcgaaagcggtaggcgaaccagaacaagcgccaggagaaagacgagaagcgtgttgttcttgttccaatcccccatgctggcggtttgtctaccgcttaaggattctctagcgaccggaattcaagatgacgagggatgtaatcatgttgcgcggtcacgtgattagttacatggttacaactgatagatcgatgtcttcaacttctctcggtcagtacttcatttccagctcaatcattgaacctcttttctcgcttttaacaaccatgccgaaggatccagagccctcccatctccagcgagactttacgtttgccgctatcaaatcaggcatcagaacagatggccgacggctagacgagtctcgtccgtgggatcttgaatggatcggaggagaggacggcggggtggagtgcaggttgggaggtacttggttcgtttgatctttttgttctctgtcgcccgtcgtacaccaagggagcatggaaggttattatcatgaatatcaccgactcacgccaacgcatttcgtttgggtatgaggtttcaatagcgtttttgccagagtgtcgtcaaccatcgtcaggccaaaggctgagagaccgtacgaaggcctggtttctatccactttgagctttcacccatggcgtcaacctcgtacgagaccggccggtaagtgacatatcttcgtctactcaccgatccagcctgaatgagcgatatcaaccatttggatgagctccttgttatcataacatcctcgcgtctcatgaaacattatgcttagtttctcatttattcctttgtgcaactcttatacactcgtagttcatcggaggaagagaccaggctctccctcctgcttgataaagctatccgaaagtcagattgtatcgatcgagaatctctttgtataatagctggcgagaaggtcagttgcatttattcatgttttgtgtctctttctgaactgccacaaagatccttgaacgttgcccttacttagtctctttcttacccttgtctgtacaggtccttcacttacgtataacgattcacccgttgtcagatcaaggaaacctactggattgcgcgatgatggccgtcatggccggtcttcgaggctatcgaagaagagaatgggaggttgaaggaggagaagttgtggtatttgctccagatgagagacctccggtcgctctggctctgcatcatgttccgttatgtatcacatttgcctactttgaagggtaagtttccttgactttttacttttccagatgaccacccacagatgtctatcgacaagcttacctctacctgattatccctgcagtcttcctccgattctggatccctctctttccgaactacttctctctccctcccttttaactttgtctctctcttcaacatccaccacgcataccgcctcggccgaactcaacatgctttcgaaaacaggaggtgtcgccttgagccctggagacctattggatgttgttcgattgggtggagagagatgcgcttcatggggtgcctggttggagggtcgagtcaagaaggaggtccaggcaagaggactggaaggtgctttatagatagacaagaaacaaaaaaaaaacagaatccaatgaaaccccgatataaaatctctcctttgttcattggcattcaagcattcttccctctggatcaacatcagggtcttaattcaatcaatgcttattttcgtttgggaatacatcgatggatagagtagtggttcataggatatgatttatagtgggaatatggcttatttgtaaataccgatgaggaaagcgcgatctacaccctcttttctctttctattccgagcgcatccatgagctcatcccaatgggaccagaaagcctgtgtatgatgggggatcgagaaagacgggcttcttaattcatgttgcagtatggtcataaccgatgaggaaacaactcacaagaacaacttctacggcaatgagtgcaatgatgataacctccatgtcgtgagtagattgctatatgggatgaagaacaacatcctgatgagtgaaaatgaaatgtatgaaggaaagagtatacaaacaagcgaacctcagttagaaggtcttttagtgtacctaaatttcatattagtagaattcagaatgcatcagtgaacacaggatcaaaagttgatgcgcacaagatacagaaagcatgtactaaccatgaagttcttgagcatggctgatcttgtggttgagctcttccactcgctggttaacctcaagagctctaacgactcttttaaaatgttctgcagaatatcaaacaacgtaattgagtacgatcctataagctttttttttaattcaatggaagacagcgctgaccctcaagaataggtggtgcatcccagaaaagctcaggtgtgtctcctactccttgtaggttgacggcttgccgaacaacaagaagttctccgagtctatgagaccggaaggcttggattagaacgttgcgctatctagaaaaccgagcgagagaatcgatgtcgttgcatacagtttgataacctccttacgcttgtatggaccctttccctgggtagccagatactggggaacaaattgtactttgtttagtaagttgaggagttgtcctatatatttttatagacagagaaacctcaggctgtcaatagtcacatttcttgaattgaagacatcagtctaagaagacagaccttctatgacagatagctgagatgatcgagaaatggcctcggaaaacgtatatcgggtcaggagggtcgactcgttgggagcagaggaatgtttggaagaaagaatgatgatgtctccctgaagacgagtgtttggcctagacattgacggaatgaagtcgaggcgtgtcaacatatgtttttgagacgttgaatcagatcaaacggtactgact

SEQ ID NO: 2657 - DNA, 59499 bp, Xanthophyllomyces dendrorhous
gtactgactctgcaggatcgatgtaaaattccaaactctcgtcttccacaacctcatagggtccaacctcaaaacctgctggctttgacagctttcgccaccagtttagcgcttgatccctctccaatccccaagtgacaaaacttccgtttcgaaggatccagatctctcctgttccatccgagccaatatttagatttgaggaagtgtttaaaggaaccctccaacagtattcgctttcacccgtcgagacggcttgcgctcctgggggaagggaggcggccaggcgatcgaggtcgtacttgacagcggttgagaaggaaaagatatgtttaagagaggatcgagtaggactgggatgaatcctgataggctttgattcttctctagcggccttacggggtttcggtggttgttttcgaggagtgccaacagcaggagaagaacttgaaagcgaggccacgggtgtagaactagatgacctcagcgaagaggaggatgaactttgatacctagccaagatcggcgataccgtccttgcagcaggtattctgagagctccagacacagactgagtctttgccctactgatgagggagcgcatgaaaggagagagcatgtttctgtgatggacacacggtagaatgaaagatctacttgctcttagttatagaggaagagcgcaacagagcaaaagcggatggccgagaaatcacgtgatttcggcatcatgtgctgcgtcaccgccgtcaggatccgggttgttagagttcaggtttggagggtaacgatgaggctacggaagttgtaaccacacaagactcttagatttcaagggagaaattcaggctctcaggactgggaaataggatagatagaatcacgaaggacaaggacaaggacaaggactaggaaacaaggcaggcatcaggattaacaaaagattcaaacttgggagactaagctatggttggcggaatgattcccgtattatatatcatcctcagactccaacggttatacataagaagatagatcacagaaggtgcttctagcacctgcgcttgaaggtcatatatttgcatgttgatgtaatgagatagcataaggaataccgaagcaagaggaacggcagaagcaggagaaggttaccggagtgtaacactcaggtcacatccctgacaaccgcttatctaatcacgtgttcatgatcttcaaccctaatcatccgtcgttcaatcctacacacatcttatccacgacaatcgaatcgaacagcactcactgcttgcgaccatgtacatctgggacgactcaggaatcgtacgagctgttgctagcttagtggcatctttctctgttctttcttcgtcgttcagatcgcctatcaatgaaatatccttgagcacagattctttcagacaacccccgagtgaagtagtcgatcttattgatccgtgagttaacatcgctgaatcagaaaccgtttgaaattgtatgttctgaaagtattctattcaagtcgttctatagtctagtgggaacaggtggggatgaacccaataagtctggcgggatgattcctactacaggttggtagtcttaatgacgcgtcgcgtaacccctcaagagccgttggactcaattgactaacgagatctgtatccagctcctccgtttgctatgaccagatggacagctcagacccgacaaaatgtaagcttctgaattctcggaagctcatatatgcccataggttcacattcttgggcgattcaaatgcacgagcatagtttgtatcaagtacttcatataacgtgacggatcctagaatacacgggtttcaaggtacctaccagatgtttgctcttaatgcgctgttcgacgtatacaactgagtgctcctctttatcgtaggtactcatcaacctgccatctggatgggtgagtcaggccaggtcgtcgtacaggctgggctcggaacagtaaccccggcgtttcaggatcgaggattggcgttctctcatgacgatgaggtcactttcccttcttactaccgtgtcaatatgtcagccggccagggaggccggattataggagagcattcgtcgagtaagctctttccggacctattcgttcaggtgtcggctgtcgttgctgttgctactgctgatggcctccgtttccggtccatcccaatgtaggctctcgggtgggccacatcagatatacgttccagaacacaacactgtctccctttgtcatcgttcaatctactcgtaacaccatcatcacgtctgatccttcaaacgtcacagctgttctcggtggatcggcgtacatcaatccttttcttcgcgagattgccggatctaatcctgaacgtcaagattctataataggtccctcctcagcatcctcatttgcagggtattatgtcgctcgattctccgaacctttcgcctcgtatggaacctctaatgggagaactctgtatcgtaacacagtgtcactggaagagggcgaggacatagctggatgggtaacttttgtatctcatgttcaacaagtcgaagtcaagattggaacaagcttcatcagtatcgatcaggctaggaggaatttggaaagggagataggaaaaacatggcggctggaggacactgcccaggcgtgtcgacaggaatggaaatctgcgttggagacagtgacgttgaccgggacagacgctgatcgagaggacaagaagtggaagaaaattttctatagtcagcatatacgtttgatactgcatatgtgccatgagtattcagatctaactaattaccagttcgttctttttgtcattacatacagccagcttctggcactctctgcaatatccttacgaagtcagtgaggagggaaggtactactcgggctacgatgattccgtgcataccggtatatcctattcaggatactcaatatgggataccttcagagctgcctggccatggcagattctttttgttccagagcgaatttcgggcatgattaattcgatgcttcaagattatgaacaaggaggatggctgccgatgtggaagaatgtagtagagactaacatcatggcaagtcacacccagtttgacgcttctcggtctatctgctcgtgttggcacactctctaatcaagtttctcacctctccgtgctttatagataggcacacatgcagactctctcattgcaactgcgatggtgcgtaacatgacttgtttcaaccaaactcttgcatatgaggccatcaagaagaatgcagatgttccccccgtgaacgataccacaactcagtatgtttttttaggtatcaatctgatgtctttgacagtatctgaacaatctgatttttcatagatacgctgatcgagaagaacacaccgattatgaagttcgggcgggtttgactttgtacaaaaagaaaggcttcgtcgcccatgatcaggtaaggaagaggttgtgatacatctcagataatcatcaaccaaatagataactgatgcctgaatgagacggtgttcacaattcagcacactgaggctggctccagaacgctggcatatgcatatgacgactatgcggtatctgttgtggcttctctgatgaaccagagttctgatgccgagttctacgccgatcggtctctcaactacaaaagaatatataaccaccaaactgggttcatggaagcccggctggagaacggttcatgggcaggtccagatgccggttggacagagggagacaagtgggcttatacatttgatgtcctgcatgacatgaatggtaagttttatttttgacccggtttgtagatgtagctgtagaatcgtctgacatatagactttggtcgatactctcaggactgatcaaattgaagaaaggcagcgaaaagtttgccgctttcttggatgaacactttaacggaggacataacgaccacacgaacgagccgtgagaagcttcctcttctcctctttatattttatcagcattcatcacatttcgtccttactggtcacatgttgcgcattcttcagatctcatcacatgccatatctgtactcaatagctaggtttccatcaaaatcagctgagagagtacatcaggtacgtctttttaggcagctggatatttgatatggtgagcctattgactaaagaatatgttcgcgcgataggttgctcttctagagagaaactatggccttggccccgaaggtcttctggggtgaattttgtttctagcaactgggcctgcaagaatgactcgcactcatttctaccccttgtctctttcgccggtttgttcaaacaaaagcaacgaagattgtggacagatgagcgcttggtttctattctcctcgttcggattttacccaggtattcaatccttgtttagtccaccttccagtcagagaaacccgtcctaatgccattattctctgatttcgtttctcaaagtaaatcctgcatcaacagagtacatcgttggatccccgttgttctcgaacatatccattagtcttcctgatccacacgacacctcatcaccccgaatcaaattgaatatcctagcgccaggcgctccgtacaagaagtttattcgatcgttgacaatcaacggcaagactgtggaccaacctgtcattcaccatcaggatatcctacaagggggtgtctttgaatttgagatgagtgagtcgcctactgattgggggaccatatgaaacacccaattctacaagggccatgtatccaccgttatcggttcaggttgctctcacgcagtcaaaaaccatacaactttgaggttgcctgtacaactagattctaatgatgtcacagtttgtgcgagaaaggaatggaaacgatgcaagatatagagatcgagatgagtaaagaaggaagagaagtgattgaaaagaaagaagaaaatgggatgttatatcaataggtggtctcctcccatccccacgcatctaaatcgtcaatgacgatggcttgagggttactggattgattgttttcgttcctagagacacagatgtctctcatatctggtaagaacgagcagctctcacattctcctgatgagtaagagggggctgatgggggcgggaaagtggaaagggccactccctagaggtacacgagaggaatgttgaaaacgttgatatcagtattgattcaaacacacactcacacacaagtacaatgccattttttcaactcacataagaagccacgtggtatccttttttacagccttgaacttcgataatttcacttaatcttccttccgtgctacttccatcagagggaggagaagttgaacccgacagaggcacccaactccaaatgatctcctctccagctctaccttttaggtccacctttttatgatccaaagtgtacggcgggatttcatcttctctagtgttggacgaatcaaacccgtttcgtctacagagttgacgaactccgacggctgtcgaggccgaggtggatgtggagtttgaagtcctggagatatgagaagacactaaatgagctgagagggagatcgaatacgtcgacatagtaaacgaaggcgtagtgttagaagcgatggttgaataggaggaaggtagaacacattgaggtgggtctcgcatcgaatcccgtataggtccctgcgggccgtcgaccatctgtttgacggagcaaaaacacagtgtcagttcggatcctatggtgatatttgacctatagtacaagactcgcctggcaaccaggataaattttccaccaccagcacgttcgttctccatcatctccccaacggcccttaaagtttgcccagctatcaggacctctatagacttttcttcgtctgtgagccggtgtggaggtctcttcccaatatggtaaaaaccgctggtcgagaagggtatcccatctttggccgcgggatgtcctgtagccagggatagtatatcagaatccaacacaattcgggtaaagagaaagatcaatgaagagtagcctcacgagtcgaccaacttgaaatacttgaaagcctgtagaggtcacatagagatgagttggaagatatgattgagaagaaaatatggaagatatgacctacagaggcatacacgtgttcaccttccgtcggccatagtccgtgagaacctgagatggatagcagaaaaagggcgcagagtaaatacctatacatgaaatgataggagtagaaggaaagagtttacccatagcagcatagccaaccggtcgaccgtcttccttcgtcactttgttccacggcatggttctaggttgaccgatgtgtttgaaaaatgatccaaatgaactcttcatcttgttgacgctcagttagagaatataaactgacccatagttgaatctgcccgtgtgagagactagaagagaaaggatatagtaagcagcgtaggacgaggcagcgagagaagtaagggtgagtgaacatacgataatccacgctgataggctcgccgtctacagtcctaaccatcatgcactcccaatcactgatgtggtttcctacccaaccgacgcgtgcgccgacgaactttccaaaattatatgggtagtatgtccagtaatacaaatcgaccacgccctctttactcttctcgaccgcgacagccaaagaggaccaatcgcctataggtctgtgctgattgccgtagacgcgctcatcgatctcaccaggtcgggcgggaggaaagaaaggttgggcattgtacgcgttttccttggcggacggcgcgggtggagagttgatggcgaggtgaacacctgatccgtggtagggaagacggtccaagttagtagagttgagtgacgtgggcgaacgagaaacaggacgggacgagtcgtcatggagagcctgaaggagggaaaaagaagcgaaaaacgaattgagagtgagaaagttagcggtgtgtaagtgtttgtgtggctgaatcttgagcactcaagctgaccgtcaacgatggaagaaagtagtcgatcgaggcggggaagaaccgttcgtccttgctgtgtcgagtcagattggatcagcttgcgatcttgaagatagataaggtatgaagtggaagagagtaaactgacgcaaggtagataatcggtgcaaacttcctagctaggttatgagtagtatcatcattattgctgttgttggtggcagtagtgactccagaggattcagccacaaacgggatttgatcaaacggtaggccggcagttgaggtgatcgacgagagtatgtacaagaagtttagagctggcgctgctgatgttatccacatgaaagaagactataagaaagagagagaagaatgatgttagattggtcgacacaaacatggtagtgggtaagaaacaagcaatggaattatgaatatccaactcgaaggctaccaccatgaattgcgtatgtccgcacacgcacacacacgcacacagacatgctctctctctctctctctcacccaactcacctagctgatcttgatggacgaaagacggtggacgttcaagaacgggatgttcactctgtcttccaagtgtgcgcttgacgcccaagccaaaacgcctggccgggccgagatgacgttcgtgcgcccgaaggctgtgcttcagttacgtaataaggtattgattacataatcattaccttacgtaatagaccttcatctcatcctaccccgcttctcttctcgtcagatctgcaacatcgtccagcatccatcatcccatctgtcgactctggaggagccatcatcgccgttggccttctgttcgtctgaaaagcagcacacaaaggtattaatactcattagaaactgtcaccatgaaaggaatcatcaaagcagctcagagaacgcctcacaatatcacctcccgggtgggaatggccaagagtttgtccttccgcttgtgctttcgatatctgttcttcttgtctcccttggtctatcaatccagggtcgtaagtctttccagtagatcgtagctgatatgtgtgctgtgtttttcttgtgtttgaatcgtccatcgctatccacttcgttcctcacactctacttctgtttccttcagagagcaatgatccagaattcgtaagccacgccgctgttccagccaacctaccgaaacatctctcgccattcctgaccactcctcattccttctcgcctgacaggatgatctagagcgaaagtacaagtccatcgaggccggatgtgaacggctctacaaggatgctcgagtcttccgagacggagtgctctgtcagtactttctcactctctcccttctgcgcctttgtcgcgagcctagaacgtttctgatacgtccacgtccttcttttccctctatctctcccgctcagctcttcttctctctggagatcagttctctgtctcttttacctccctcttttctcccctcgggagcgagtacgacctcatcggcaagtttcctcaggcagagaacactatcaaacacgcgactcagtacagctcgctcatgtccgagctcaggactgttctcagtccagagttggagctcattgatgccaggattatcggtccatgcaaggagctgaacgatgttcttaagaggataaggaaaactatctccaagcgagaacacaaggttcatctggagcttctatcacaatcccgttcgccaagacttgcttcctgccgcttatcaaggtttttgtctcttttgcctgccctgtctcgcctcaacagttagtggactatgaccgacacaacaactcattgactaagctccgggacaagaaagaaaagtccatgagcgacgagaagaacctgttcaaggttcgttccgttaccatcctgaacaaaaggcgctcgatcgaatactgacagacagatctatcattctttcatgctctcagtacgaacaagacttcgaactagccactgaggagtatgatcactacaacaatgccctcaagatcgaacttccccagttccttcgactttccaccagattcatcgatcccttgttccattccttctacttcatgcagtcagtccctctcgactctcctctctaccagtctttctagctgcttctagctgcttctagtgtctcatcagcttgctttcttccagactcaatatcttctacatgatgctcgagaagctacagtcattcgcagatggaaaatacgatctttctagaacagatatggacaacatttacgacgaagctatcggagacaccgctgaggtcctcgaaggcctcagcgtcgttcaaagacaaacttctactggtgggtgaacacttgatgtttctaggcgtcgcaatcatgtttctgaacaaaccacttattttcttatctgctttagccaagatgatgagccagcatggccacactggacttggtcgaaagtcctcctcatcctcctcgaccttaggccgaacggcgggtagtgttgctgcgccccctctacgatcgtctagctcttacagctccgcgcctcctccctccaggacagtagccgcgcctcctgcgtacaccgctccgccatcctcctctgcgtacagtggtgctggaggtgtcaagaaagcccccccacctccgcctccgctcaagcccaagccaagctacaacgctcctgcgcctgcctatgtagtcgctctgtttgactttgaagctcaagtgcgttcctcttctcttcgtcaaatacagagttattcgagggcttcatggttcatggatgcggagaaacaacatcaacctaggcttatcatgttcttttcgttcgcttttcttccttaggctgcgggcgatcttggattctccgttggagacagaatcgagctcatagaacgaacgccctcgaccgaggattggtggactgggcgactcgacggccgagagggtgtcttccctggtaagatattcttgttctcatccctttcatgttcctgcttgatatcaaagacttaatcgtatctatcgtctcaaccaggtaattacgttcaagaggcataaatgtcagttctggcttccgtgttctcacgtggcgaactatcaactccctccattctctctatcctatcgaacctactctgttctacatagctattttcctcctgcctgccgtctattcttttcagtcatgatatctatgtcatttcagtctcgtgaattagagtatgaagcacgaaaagaaatgaagcgagaatcaacggattactgcgtcagacaagaagttcaacatatgacgttgaacaaatagagttacgcgttcacgcttttaaccagacccagaccatcatctctcgatatgtctagcttgaagaacatccctcaagcgatcggtataccgttcaccaaaacgtattcctctaccccgccgactagcactcaggttcatcaagagcttcatgctcgagagcgacgacgacgatcatccctcaacgatcgtgcatcatccaactctcaaccttcggcctactccgcaaacatagcccggcttcgagtgaaccagaagaaaaacagatattctgatatcttgccatatgatcgaaccagagtgctcgtagatgggaatgaaaacgaggaaggttatctgaatgcgaactgggtgaaggaagtcgatggggagagatcctgggtggctgcttctgtgagtttggtcgttagagagatgaactatcggtctcttcgaaagctgaacgtggcttgtgttcttgttcttctcgaacctaggctccgctgccaaacacagtggctagcttttacaccttcctacttacttccaatactcagaccatcgtccaactgacgggcttggtcgaatccggagttctcaaagcggacccctatgtaccctccgattcgagcccggtatcgttccccgatgctaccctacctgggtccatcattgaggtccgcagggtgaatgttgaaaagtatcacgcagagacggattgctatataacagaactagagatccagggcagaggatcagtcaagcttgtgaaacacttattcttcggaggttggccggacagaggagttccaacaggggaagacagcacgatgagactcatagagttagtccatctttccttctttcttgcttgggcattgtcgtcttgattcaaagccgatccatatcgtgtctttccttgcctacatcgctctcgaacaaccgtaaaaacctgctcgggtgaacagttttattaaattagccaactccctcaactctacttcacgcgaccctctgggacctcctattctggttcattgttcagccggtgttggtcgtacaggtgcttatatctccatcgcctctcttctccggctatatgcgaccttcaacccttcgagatatccttcgcctccggagagtgagctggggccacttcctgatctcgtgaaagacgaccctgtagccagagtgagcgccgttttcttctttttctccttgggcaggaaataatgcatgttctccattcgagattggtatgcatccaaagatgactgacaccacaagtcgatcaaaacctcgttggtgatagactattgattattgccgtgatcaacgaacaactatggtccaaactgtacgtctgtttgccttataccatcgcttcatgcatacgtcgtcaaggataactcattttattctcctatcggtacttgtgttcaatatcatattcggtcccaattgatatatatatataaaccccatcaaaataggctgagcaagttgacctcgtgtgcagggcatcggatttgatactgaaagacaggttatggaactgagctcggtatctgaagaggaaggcatatggaatcatacaaatacatggaggatatatcctttgttcctatcaatagagtctgtgtttgttctcgtctacgaacaaagccaacgaccgaaaaaatatagaaaaactcgtgtggttacaaccaatggactcgaaagtacagccagagaaagagggagggagacagagatgttaaaaagaagaaaaagaaaaaaagggagatacagagaagcatagaccttcaaagctatcctgtcatttcagacgtgaccgacgttacgggtgctctaaaacaaagaattgaacgaattcagatcgaattgatcactaaaccaatcaagatcagatccctgaacaattgaggctgataggtcactcatcgacaacggggagaatggtatcgggactgtagagaacaaattgtctgagctcagagtagccgagaagtcaatcggtagatggacatttagcggaggaaccggttcaatagatgtgttttctgatatttccggaggctcattgaggtggacagtcgcaaggggaccggaggaggaggatgagggtatcgatctacggagaactttgatggctctctccacctcggcatgtgtagaagcatccgtcgatgactttcgtttggaatatttggcatccgtcgggtgagcaggatacgaagtagagtggctgggattatattggttgaggctaggattattggcggaagtagcgagcggcgggcctctcttctgaatttgttcctcaatcaacgaggtgagaacggtaacgcccttagcggcgatacacgaatgggactgaattgaacgaaagatctcaatagcagacagaaccaggtcaagatttgacgcattggcagatgaggatggttgcgtgtcttgacggtaggcgtattccatgagaagaatgacccctgcagcaacactgtgcgcaagaacagtcctgttgaatgtgttttcaacatggcattgcaaatatcagcaaaaataaccaaaagggactgagaataaaatcctgagagaacaatacctaccaggattggcgaaatggctcaaaagtgtacctataaacccgtctcctttgtttagttggaagcatataaaccaaagagaagtagatatatgattctcttacattttgagtcgaaggataattcgggtcgcattacgaacacaagtctccctcgactgtttatatctcggatcccggaaagctcttcctaggaacggccggttcaagacaatcatcttgtgcgaagacgacatctgtcgcatcatatacacaggaaagagatgtctcgtaagcagagggaatgacgcagtttgtaaccagacttgacttaccagatatgttgaacgttgccactctagccaaggtgggctattaggtggcaacggcagtatgttgtcgtctgcatcgtatcgcatccatgaaggagctttagcctaacgacgataatagaacaacgttaggtcaaatgaccgaatcttcaggtctatcccagaattgatatcaagagagacgacacttacgagaatcgaatttgcctcatcgttgatctgtagaactcgggagtaggttatagtcttcaagccagtaccgtggccttcgaacagtctgatgaacaacgtcatatggagtcaaaaacacgttacgctaaatgaaaaaggacttggcaaccatgagtaatgacttgaaacagaattagcggcgcgtacttgtgtactagaatggcaactacatccgttgaataaaaaagcagtcaaaatacagatcagcagcgcaaagacaacatcgccgaaacataaatcatatgacaggaacatacgtcttgataattgaatcgaatgccaaaccataacaggcgcctcagaaggtgattcttctagagtagaaggattcatcagatccgcatcagagcagcgtagaggaggaggacaattgaactgtgaggttgacaaggctttgattaaatatgactttaggtgtcagcttccaatctgcaacgttattgcccgacgggcatacaatgaaggagaggagaataggtgtaaaaagggcgtaccacacgatctgttgaatggcaggtgaaagaaatcctgcatgagtaattgatagaacactcgcttgcaaacctctctagtgatgagtgcctgtcggtccatcggctgacgagactgattagaatttgtcggatgtttagaaagaggataggtatctgggccaagatggctgatgtttagcgtttgagcaattctacacaagaaaacaaggaaaagaggtcatcagctcggttcactttgcctatttggccagactaaagtccgctgggagggattgaaacaaacctgatggctgtggccaacatggtaaaatacaaatcggattttcctaggtggttggcaggagagacgatgattgcaacgcactggacagagtagagagagtgggagcctgcagatataaataatgaagaagcaagaaaaggacagatcaacacatgattggattagattagaaaataatatgaatccttacccatccaatctgcttcgtgcaactgaagaaaagcacaaaagagcaaagtatgagagatgcgaacaaggtatgagcgcggatcagttgaacattagtgagaacatacacaatttatgcaagtatcaaaccatcgtttcatgactgagtgaacgtgttctataagtagagtgaattgattgaatacacaaaataaacatatctatgagtctcaggaacagaaagacgcaagagcagcaacttgatagaatagacctggacaaaccttttggaatcatcaaggaaagtttttcttcaggcatgtggtgaagcgcggactttttcagccattaggcaggaagaggtggtcaatagaatgaacaatcaaaaccggtgtatgcttggtaattaccgaagcgcatagggttggagatgacaaccgagcagaacgagacttaccatcaatacgccataaaacagcgcgagccaagcggtgttaacttctacttcccccgtggcaccctctgcccaaaatgcatcgcattcagcggctatttcgatataaggattgttaaaagcatgtcaatacttcccaaaccctgacgcatcttctccaatgacaacctcttttaagactgttgaaggtcagatacgtaccaaatgtaggtgcatggtaggcgcaatgatgccaagcgaccatatccatatcccactgaacgagctttcgacctatctcctctgtgggcaaatatgtcattactccttgttttctctttcctgatgacccacgccggctggccgatggttctcttctcgtcgccgctgaggttgaagaacgagcggatgaagagccaggctgcatatgtgaggttgaagagaaaggggccgaagaacgtctgaattgagcggattggtctaatgaaggacctatcgatggcttgcgactagcaacgggattcaattgatcaagaggggtctgttccatagatgctcgcgccgataaacgattggatccggcttgttcagagggttcactgacgcttgaaacgcggtcgggatctccttgcacagaggaagaggtcgaggtcgatcgatcgtcatctgctccacctacgaacacgcctgtgtgttttgctctagatctacccatggcgagaaattccagggtgagagcagcatcggcctcggcatcgatctcaccatcttcctcttccactttgggtatagactgtgagttagtcgcctgaaagagttcccgagcagcgtaaggtaatgggaaagctgatgaggattgaaaagatgatgaggaagggtaaggagaagtgggaccgtggtattgcatgactgatctgatgatggtttcaagagtatcaattcggagggacagttgctgggtggtctgttcggtagtctgccgaagctcctcaatctgggcctgtgcttgtcggttgatcccacgtacagttctgagatcgacggcccataataaggattaacagagtcgaggaaaagttgtaaataggatctaaacttacatagggggttctttgacggtaatctctagtcggcactcggattccttacctctcttgatgctaatttgaattgattacagagcgaatgatcatgtgagtataactttatcgaaaacagttttttagatgtgaatgtctgaactgaccagttctcacaagggatagtcttgttgcatctgaaggagaaaaaaccatcagatggccgtcttggatgtgtgactatatcatcatggcagcgtggatgatttgcccactaaccttgtcttccttctatatttcagagtgaacaaatgaattcaaagtcaacatcgaaagttattgaaaagaagccaagcaagtagggatgcataccgggtacattcagtacaactacattagaaccaacagagattcaatctatcgtcagcaggcgaatgcctatgaggtatgtatcttgaacaaaaagatgcctgacctgagtgcctgtcgttgactctttcgtggtcctccgtctcgggagagccctgcagaaggctccctttgaactctggctggggggctttgagaacagagatccatcgatagattcacattatcttccatacgagagtgaaaagttgatgacgaataagacccggtcggcgactcggaggatacgaccttcccaacggaaagcaccgacgtccaacagaagaggattatcagacattgagtgagccggcgttgagtagatcagaacacacaacataccatgacttggggagacctgaggcttttccgacaacctgatacgaacgttaccaacaagagagggaacgacgataacagagaacaggagagctaccgacgagaggtataatcttgttcagtctctactcgtctctaccttctatcggggatgttctgtgtctgctgtctctatacccaggccggcagtatccgcttgaatcggagccgaccgaataatttcgttcgattatttaggctcaaactcacgtggggcctaggtcacgtgctgacacagctgctgtcacgtgattccgaattatcaactactttggttgctttcctctgatcttctcaacgcacacacgctcacacacatacattctcacacctatacctatggctcagcagcgacttttggtagtaggaggaaacggattccttggtacgtagtttcagcttcaattgaatctgtgaattgcccgtacccatcagatatcgcacattcaaacccgtaggatctgccgtctgcagagcggcgatctccagaggatgggatgttcatagtcttaggtccgtcctgcctcgttcgatagtctcgttcatgatccattaaggcttacaaggacatcctttaatctcacggacatccagtacatctgctcgagctcccaagatgccggacggagagactcctgcctggaccaataaggttggtttcatggatggcattgtttccttctttctagttattcttcgctctttctgtctttgcgattaatgtattatgatccgatccctcatttttcaacaggtcacctaccataaaggttccgctttcgaaccatctaccttttcccaccttttgccttctacaacagccgtcgttcacaccatgggcattcttttggagggcgactacaaaagtttggtaaatgagactagtctcggcggaatggccgccagactcataggatccgatcggtttttcaacggtaaccctctgaaacccggatcaaataataaaacaggaggaggatacgaagctatgaacagggactcaggtgggtcttgctctttttgcttctttccccttcatcctctccttctcacacgagactgttctgatccctcttcttatggctaacgaaacatgatctgcgcactaaatccggcacttcatagctatttcggtcctagacgctctgcttgcctcgcgtgctgccgagtcaatctctccttcctcatcttctccgtcatcagtgtcccgtatgactccgactgttttcacatatatctcggcagaagacatcttccggccgtttgtacctgacaaatacatcaacaccaagagagaagctgagcttctcatcaaccattatctttctgctcaaacgaatgaagtcgacgccgacaaagtgaaagggttgatcgttagaccgggagttatgacccatccttcgcttcgaccattgcttatgccgctcgcacctctcctcgctttatctgcctcgatcccaccagtattgccgaacatcctccgcgcgatgtctaggcgatcaaactctatccgatcggaggatgggtcgagtttggacagtatggctcggttgttggagtctagaacgatcgatgtggatgatgttggggaggctgtttgtgtagggatcgaaaaccagttagaaggaacactcgggcttgaaaatctgagagccatggcacagggtaaattaactatatgatcagcatgattcaattttctgtctttaattatcgtcttgcatgtcttgagcaacagtatccactttttgagagagacaatatcggcgaacatcacatgagtatatgttggagaacacatagttggttttgctacacagcctggagagggagatggtcgttgcgaaaacatgatcggacaaagacagcaagcagtatctggagcgaaaagggtaagtggattctctcgatcaaggagatgctgaatctttgtcgatcggactggtcggagatgaatcgatcataggatgaattcgttcggcgggtttttcagctgctcgatatcgcgcaatcaaagattctcgagcagccctgtctttgacttttaaccgatcgtcttcgatctggtagccaaatgtacaaaacaatcagtcgcatggcaacaatggtcagataggaaagagatgaaaggtaaaacgaacagaagccaaggcctgttttctcctttcttcctcttcctccttctttgacagagaatgaactttcgtcttctccgcgctatcgtttgatgaaacaaatcgatttagcttgttaaaaagaacgatgttcaagaagctgttctccaaaaatatgagcgaaccgattgtggatctcctggactttgcgctgcataatctcggttccgatctccaacacgttcaacaaagacaatggtgctgccgctctggaagctgggtcgaacgtccatgtttgtgtaaagtttatgacctttgttcggaatcctagctgaaggtgatcatacggtcgtttcaaaccgatggtcagatttgatcgtgctcgagacctagatgagaagatattagaattccaccaacggctacaagggcttcctgaccacctttgattccgaggacattgttagtaagaatcttactggtggatttgatagactgaaattgaacattcgtcggatcgtctaagatgtttttagtcagacgaaggagagtctgatatcgggaggttttccagtaaggctcggtttggaacacaaagaacaaacaaaagggttccgcgcttgaacgtagtctgaacactaacagtgataactttgtctgcctgatatatgaagagcacagaacatcaacaacgggttgagcatctttgtctcatcatcaacgtaatagtagacgccacaaaacgtacgtcgacataagtgttctttccgatcagattcctctcggcaagtctctcaaactcgatcgaccgaacccgtatggcttctgctttgccgtcatcaagactagaggactggttggtggtcgatgggttggtcgaggcaaggcgggcttcagctgctttgattatatccgatcttctctgatatggagacgatattggaagagaagccatttgagtctaatgtgttagtagatagatcagatacaaccgtagaatgtcgatgatcaagtaagatggtgagatggtgagacggtgagatgaaaggttaatgacgagagccaatttggtcacgtgccacaccgctcaaccgctggttcccccggttccagccggttcgttggctgaacccggacgcgacgaagaaaacacacgccagagaaaacaaacagactggattgatctttctagctttcatccgtctgctctctttctattcctctgtaccctcaagacgatcgtccaagtagaccgtttcaaggactgtccgcttgggtttaggaaaggtctaaaggttagtcaaggattatttgattttgtgttatctaggaacaggatcgcaccactctgaacatccctcatggttcaggatcttgtcgaccagtaaacatcaaacatattcgttcgctctagaaccgacatcgctcgttctttctgtctttctcctctttgttcccgtttggatcgttccatataccataggtgtcttttccctgctcctcttgaagcaatcttataccctgaatcacacacttaatttcaccacttgataaattatgagtctcagtaagtccttttctatcgatatacatgcactcacccatgccgagggttccttggttctttcgaaagctttctgactagctctgttcgctcttggcttgtacttcctggatttcatacaacatctcatccggctcagacggcaacgattcgttcgccgctcctcctaggacattctcgaccatcggccgtaggtcccaaagatctcactttgcagctcgacaggcttcagcaacttcttcagtagatgtcgcctctcccgatggcacttccgaccaaatatctcctacttccactgatgaaacaactgttcacggaggaaaagattccaagccggggagcgcgggtgcaatgcgtgcgcaggcaagtcattcacctgcagatctagatcaacatccagtctttatcattatggaattggattcacacgaatagtattaggtatattgatcagtttctgaccatgatcgggaaactttatgatccacagctcgagtccctgatcgaactgaagcaggctgaacttcttcgcgctggcctcctaggacaacagatcctttcccagcaggctgaactcgaagcacgagtgcgggaactttctgaggtcgaagctagatccactagaccggatcacccggacaatgcagcggacagcgacgaggaacagctgggagaggagatcagagttaagctcatggcgctgggtgaggcgatggatggatgggaaggagagaatgaaaggatctggcaaggtgtgcgagcggatagcatggttcgtttgtttttcctgaccacttgatgcatgaatcggtgaagagacgaggtttctcactctttcagctctccccgctaccgcctttcgatgaatcagacacctgcacaggacgaacctttgagctcggcatccgaccttacgaaaccatcctctcagcacgtccccgccaacgacgatattcctacatccacatcaacctttggactctaccaaacaggctcttcatcatcaaccgacctcatcagctcagacatacctctcgcaaaccaagctacctcatcactttccacagcttcccacaatagaagaaatagaaacacagccaacagaacgaaggatattgaatttgccacggagattggacaatctctaattgtcgaggtcagacgattacagacagtgctcgccgagaaggatagagccttacagacgctaaacagagaactcgaggaaggcaaagtcaaagaagatggtttgagagacatggtcaaagatttggaaagcaactgcggtaagtttaacattttgcttctctcttcttctccctatgggtctggtgtagtgagctttgtgctgaaaacttcatccgtctcggatcacatcttttagacaagttcaaagaagaaaattggaatcttgaagtaactatgcaggatatccgcacacaactcatcgaagttcaatcccagtctcaaaagacagactctgaactcaaacgtctcaccaaaagtcactccaccctgttgacgacctctgaaacccacaagactgaggctactcagctttcgacccagctagatgcgctcaagctcaagcatgacaccgagcttgctcagatgaggaagacgacggccagcttgcaaagggacaagagtgatcttcagcaaatgatggagaaagctcaaaaggcggcgatgagaggatacatgtctcctggaggaagcgcccggaaggtcggtggcgagcgtgggttgaagtacgctactcccgaacggaaatggagaagtggagtaggtcaggaagaggaaactgaggaggtcgatgagtttggggttggtggtctgggtggggggagtactaggcgacggggcgctggactcgaagctggaaacacactgggtcacgactttggaaggtaagcatggtcgccctcctttctttctcttatagtcaagtttgagttggaaagatcaatttaactgaaacatgcatcttattcatacttttatctacattctctcaaaaccccttgtcaaaaacacgagcagcgactttttggactctcctgatctttctccttcgaaaccttacagcgccgactcttctgaatctaatgtaccgtttgatttgagtgactcgcaactctccgagctcaatgatcttcgcgcgcaattggaggatgctcaacaggaacttgaacttctccggtctgagaaggaagaaggcgcctgggcggatgagtttggtcaggcaactagaggaacaggatccagaggaagaagaggcggtcgaggaggcagaggagtccgtggaggtagtatcgctgctcgatcagcccgacgaccggctggaaaaacatcccttgcggattctcttgccatcgcttcccaccccgatttcaatcaagagacttcccacgacgatcgggatgatggctccgagtcggaagaagtcgacgaatttgcttctttgtctccatctcgtccggagaccttatccatcaatgacactctactccaagcccatcgaaacacctcaggatcccttgctatggaccctgcgttcgcaaatatgtctcctgctgcaaacagatcctccggctcgctaggaacaatattctccaacggtcattctgatctaagttctcctattactcctcatcacgccaagatgatcattccaagagccggtcctgatggtcgtggattgcctagattatccagttatatctctccagcccaggcagtctccgacgagcttataggtggtgaatctctcactgttctcgatgcgctcagtacaaccactcctaaagctcccagaactcttccttctcaggatagatcttatgacgacgtcgaaaccgagactgagactgaaaccgatgtcgactacgaggacgcgagggagagcacgacttatgacaccgatgttgcttctcgacgtctcgatactgatacctctggcgccgaattccatagcatggctgatgactctagcgaggattctcatgattctgatggtagtataaaggcctcctccttcctgaagccaacgcctggcggcacgcttcgagctgttcgctctcgacagaggctcccgaccgatcaacctgtagttgagcgggttgtagagaaaattgtggaagtgccctttgaaaagatcgtctatgtcgacaagccggtcgaggtcatcgtcgagaaggaagtcgagaaggtcgtctatgtcgacaagccggtcgaggtcatcgtcgagaaggaggtcgagaaggaggtcgagaaggtcgtctatgtcgacaagccggtcgaggtcatcgtcgagaaggaagtcgagaaggtcgtctatgtcgacaaaacagtcgaggttccggtcgaagttcgaatcgaagtcccaatagagaaagaggtagagaagattgtcttcgttgacaaggtcattgaggtcccagtcgagaagatcgtcgaggtagagaggattgtcgaggtcgaaaagaccgtcgaggtacccatagacagaattgtctatgttgataaggttgccgagaagatagtcgaggttctcgtcgaaaaacctgtttacgtcgatagagaagtcgagaaaatcgtcgaagtaccggttgagaagattgtgtatgtcgataagattgtcgagatcgagaagcgcatcgaagtgccggtggaagtcgaaaagagagtggaggtgcctatcgaggtcgaggtcgaaaaaatcatctatgtagacaagatggtcgagattgagaagagggtcgaggttgaggtggaaaaactggtcgaggtgcctgtgcaaaagattgtggaggtggagaaagttgtagagaaggtggtcgaagtgccagtggaggtgattagagagatcgagaaacctattgaagtcatccgggaggtcgaggtgcttaaagaggttgaaaaaatcgttgaggtcatcaaggaggtcaaggtagaagtcccggtcgaacgtatcgtatatgtagacagggttgttgagaaggagttgatcatcgaggtccctgtggaaaagactgtccatgtcgaccgtccgtacgaggttgaaaagcgcgtcgaggttccagtggagaagatcgtgtacgtcgaccgactagtggagattgaaaaattcatcgagattcctaaggaggttattcgggaggtcgaaaggatcgtcgagatcccagtcgaccgcgtcgtcgaggtagaaaaggttatccaggtcgagattcccaagcgagtcgaggtcgagaggattgtctatgtcgaccgaattatggatcgaggggtctccatcggcagcagcgctcctgttgacgccgatcttccttctgttcttaaagatgctggcctgtaccggtttgattcttctccagatctgtctctccgacatggcagttcatcttccatcaacctcaatcgcgccctttctcccaactcactatcagaaccgatcaagaacgctcctgtgttcatagtgcctcctcctcccagcatggctccccctctagatatcccagccaaaaagatcgccattcctcaaccaccatcgcgcccctcttctcctcctcctgtcgagatttttactcgagccatgacacctactgggcgctcctcggctctcttaactccctctggctttgcatctgtccatactcaaggttccggtgcgccgtctgtttcagtcaacgaccgacagatgattaccgatcagttctctcctaactcttggtcagaattcagtcataagtcaactaacagcgcatcggctgctcgagacaatgtcaagaagagagctgatttcatcatcaacacccatcctcttccctcttcttcaccctacgcccaatcgtctcacacggacctagatgtgtcgatttcttctgctgagtctagcgaacatcaccttcctctccctccttctcagccgggtctatcccgtacggcaccttcgactgatccagagatcatctcggccattacgcagacaatgattggagaatatctgtacaaatacacaagaaagacgatgggcaaaggacattctgataagcgacaccgacggttcttctggattcatccctacacgaagacgatctactggagctcgaatgatcctggagctccaggaagtcagctcgaatcaaacactcgaagcggtaagtcctaagaatttgtatcttaccttggtctcatatgcttcttatgacatgctcggcttattcaatattcttatctctttcgctcattctagcatacataacttctgtcacagtcatagaagattcaaaccccatgcctcccggtatccatcacgagagtatggtgatcactactcctcaccgagagatgaagttcacagccaccacaaaggaacgacacgatatctggtgccgagtaagttttgataatgctctatcctttctatgataacattcggatctgagaaacactgtgctgacttgtttccggtggacaacctcaggctctgacgtacctattggctagaccagccccaagagaggccaacattctgggaacaaaccaagtcgagaacctcgaggcgacgcctacttttcaccagagagtactgaccgactctggtgcgctctccaaccgatcggcatacctaacgtccccaagttccgttcgatctaccaatctgggggtgccatttgactttacacccaaggcaaaacagtctgggtcggggatgtcgtctatgttctcaggttcggctagtaaacgaacaggtacaccagctcacgagttccttgccaacagggaagaacaacgacaattgtcggcgagtcttgataaaccgacggaaggaacaaatatgatcgggacggccgatagctttgagcatatcgatccggatgatgatgacgacgacgaagatgaatacgaagggttggataacgtaagagcttgctgtggtggggcgcacgatattggtagtctggccagtaggcatagccaccgtcaccatcaccctgaccaccgccaacgaactggtaccgctaatgcgtttaaagaaaacgggacaggttcgatcggcccatcatccgtcgatccgagcgcagaaaatctggacggattgaaccgatcgaagtcgccttctacgttctcgtttaggtctcgtgcatcgaggacatcgaaaggatccagaatgtcgatcgggtcgggtgttggtagatcgtagtcttgagtgtgtaggaggtgagtagacagaccgtcaaactctctctttgttttggtttgctctttttcggtcgttctccagttctgcttgaacacatgtttcctctccaatctctctcgtttgtttctttttgcatagataatattgcctggacaaatcgttcgttttatttgtctcgagctgaacactacttcatacctttctactctttggtttagtttggtttctttctcttttaatcttttctcagttggtgcttgatgcctgactttcgtgcatattcatgatgaacataagatctattgcaaagggaaaaaaaaaaactagaaaagggaacaaaaaaaaagttgtagtcttgtgcgaccgaaacaacgggatatgagatgacaatgcataaggagacaaaagaaggagaagaaacgaagaagacggaatgagagatcataatgggcatacaacaagatgtagtgactggaaagaaagaagaaaaaaaaaacagagataaaaatccaagagatgcaaaaagaagtatgatgagagaaaggaagatggaacgtatcaggtgtgattcatccgagatgacgggaatgttgggatgaatcttttggatggatgatatttaactgatcgaccgaacaagaaagaggaaggagaagaaatttagacctcgctctaagattaagaatcaccgacaagcgcgtcaaccgtcctagacttgcacgttttgaggaactgagcgagcgctgttccacccgttcctctgattggctcttccgtttctttttctgtgtcaatcaccttctctggttcagaggtagcaggaagagactggggaaagaaatgagcaggaggaggccgcctggcctgttgaatgatatacattgtcacgatgaccactacaaggtgtgaggggaaacgatgaaaaaacgttatcaatcagcgcttgtcgccaaagatggaagagggcggagggaaacaagaatgaaaggacttactgtgatagtccctgaacttgcccatagcgacgacggcaagatcgtagctcctggctagatcaccgttgtcaaacgactggttctggacaacaagctccctgaccgtggggtgggatgtctggagatgaagcaaaaacgtgcggtggggtccaggcatgtattgaagcatgcgctgcatgaatgtcgagtcccctcctgaaggtggtggtggggaagtgacggtcgacgacgatgtggtggttgagcttgttggcttgtgaggtgtatgatcgacacccaagaagatgtctagggcatgcactaaactggactggccagctgacggtccactaacaatctttcgttcgccttcagaatcttcatcctcaccgacaccttggaagagccagccgagaccgcctgggccatcgccatctgatcctttgaaccatggtcggatgagccagtagaactctgcggggtcacaaccggctctcatttgtttcatcacggaggtcaatgaatcgataacagtggcgagtgctctgagcgagctggcgatccgtctgagggcaagagtatcgccgacgaaggcttcgtccaaggcagatcgcatgatggtgagcgcgcggactccatgtagctcgaccaaagaggacaccaagtaaaagtgagcttctgaaggaagaccggtgaaggtgtggtagactctgtttggtgggttagccgtcgggtggaatgccttggtcggatcggaagggtagacgttgtagagaacagtggtggcataggtaaggattggtggaagaccgagcaggttcgacacttgatcgagcggcacagcaatcgacggtgggattgccaagtccgaggttgagccggaatgggagtgtacgtaaaaatggaggaggaaggcaagggtgacgctggcccgctgaaggatttgtgatgtcaaatgggcttgagggaggatttgtacttccatctagaggcgggaagaacgcgatcgggaattacgtgaacaagtttcctcccggtcagctcaagaaggatcgcggtcttcaagatgtgtaagcagtaataaagaggacaaacgttcttcacagtctgtcgccaacgatcgccactaccgccttcctcgtgggctccgttaatcttgacgacacctgctttcgcttgctcgaggagttcttcccagagcgcgtactcgtctggcagacgatcgatcccgggatgaccaggaaggaaaccggttctgacgtcgacatcgaaatcggccgaggccaaagtggttgtcggaggtgcgagcgagtcggacgcagggtgtgagagcgaggcctggccgaatgagggaggcaacgccaggaaatggtttgagggtaagccaaagttggccctcgctgggttcccactgtctgccatggcttgcttgtgtgtgtgtatgtgtgtgttgatgctgtcggtgctgttggtggtggtgaggaaagagaacgagcgggtcattttcttttttcggtaaggcggcagaagaaaaaaggcttgggagtttcgggaagagccgggaatggcgtgcgtgattatgtaatagtaggtcacgtgtaaagtatagatgataccctaggattcataaatgaatgtgatcgacgcgtctaaggaagctcgacgcgttcatacagacatgaaaacgtgtcaaagggtcacgtgcatgtgcacagctttcattcacgtgcacctcacgcgttgcccccaaactctacatgacgcgtctccctcggacgcgtcaggatggtcgacaccaaaagaaatcagaacgacgaaggcaacagtcgaaaggtgacctcggcctatcaaccagcatacagtatacagcacatcagtcagcacacttacacacatgccagaatctactgacatttcgctccctctgccagccgatacaatcgcctcgttggcgttctcgccagactcttctcgtttggccgtggctagttgggactctgtttgtttcctttcgttcttctcttcaaagccggcttctctttcctgatcgtaacctgattcgactgactcaattctgatcactcttcatcttgtgtcttcctacagacactcaccgtccatgaaatagatccctctggctcatcctcatcacaaatgtgagtgtctcatctctcgagatcattctgctcacatagtcgtttgctaaatcagggattctcgttcacgacccaccgtcagcttcaagcatgaagctcccgtcctcgcagcctgtttctcaacctcgaccgaagtgttttctggaggaatcgaccaccatctccgctcgttcgttcccggtcttctttcttgaattctggcataaccattctcctttcgaaaaaactcactttgtctcgtccgctttcaacgcctacaggtgggacttggagaccggctcgcctacagtgcttgatgtgacggaagcagagatcaaccagctctcctgggcttcttcctccagttcgttacctcttttctgtgctaaagtcagattgataagcttctctatccttatgctgatcagtcttccaccttagacgtcctcctggcaaccacactctcctcccaactcaacacgtacgaccctcgattgtccagtcctctactgtcctcgctcagactacctcagaaaacggtcgcgatggacacatccggcaataatctcgtccttgctctaggtgaacggatggtgtacgtgtatgacgttaggaaactcgggtcggctgtcagtaacacagagggtgagcccgaacaacggagggaaagcgcgctcaagttcttaaccagaagcttggcttgtatgaccgacggcaagggtgagtctctacctgatttttcttcccgtatcttcaattgggctggcgagcactgatcgttctctcttgcctcccatacccgcatcttgacaggctgggcgtcctcttcgatagacggacgtatagcggtcgagtactttgctccagaggatcaggcacaaaagtatgcgtacaaagcccatcgagtcacttcgtccgacaagacggatcatgcccatcctatatctgccctcgcattccatccaacgtgagacctgtcctttgatcttcatctagttcatttcttctctcctcttccaaccgctcatgaccttttctgtttatcaatctcacgaacaatagcctgaatacattcgcttcagccgggtcggatcatagtgtatccatctgggatcacgtttctaaacgacgggtcaagcagcttgcccatttcccaaacgcagtatcaagtctcgcattctcacctgacggctcttggcttgccgtaggatacggcgatggcttgggcgagaatatggacgagcagacttggtcagccaggcagagtgctcggacggaagagtcgtcttgtggggagagaggtgtaatcctcaagagacagtcgaatgagaaggagagggagaagaaacctagaccggtagcgcatcgagtaggagagtgatcatgatgagcacgttcaacagacacaacagagattggtttagcaaacatgaaagcaaagaaagaaaatatcagttgtggccgaaaggcgcttgtcgacattttggttcatttccatctccatctatcaatccgacatcacaaccacgaccaccatcaccaacagcagcagcatctattttgctcctccctcgtcaaagctttctcctaacaaatcttaacccttatcttactctgttgaccggtctttctcagaatccaatatggcagcagtagaccttttggatcccatgatggatctcacccgtcggcttccaccttccaagatcgaatccaccctagatgtgctttgtacggttttcgttctctccgtcttctctttgtcttgagtctcttccacttacagctactcgattgatattctcaaaatttgatgttgagaattcctcaggtgctcttgcccctgaatatgctgacgatctcttgggatccgtcgatcagccgctcaagatcttgagggatgagactcaaggaagagatttcttggcttgtgattacaaccgagatggtgaatcctttcggttagtcctgttctcgtttttcttcctcttagcttccccgcaagggcctatcatactgtcgtccaagtaggaattcctgttgtgttgacatacagctcggattgtttgcacttaaaatggaaacaacgtagatctccttggtcaaacgaataccaacctccaatcgaggaccctcagaagccagcagagagtcttcgacttttagaagtttctatgaatgaggcattcgatacttatcgagagatgtatgttttctagcgttgaagatggaccctttgggtgtgtgtgtgtgtattgatttggctctctctggacatgcaggtactttgaaggcggagtatcctcagttttcctttggaacgtggatgaggataaggacaagtttgctggtgtcgtcctcctcaagaaaggtgctgtcccagatcctctctctaatgttttatgatccctttttgaattttctctgataaagtcaatcgaactttgtgctgtagtccttccatcatcgccgacgactccttctggatcttgggactcgattcacgtatttgaagcacacgaaagaggtcgaacagtatcctacaagctcacgtcgaccgtgatgcttgagcttgtggccggaactgaagtcgatcctaaaggaggctcggtcgagttggcaggcagtctaacgagacaggtacatcgttgtctatctatcttgcgctcagatagacactatttctctcgatcgagattcactgatgccctttttttcacgaacatagaccgagcaagacaactgcccactttcttcgccgacgtcacatatccctaatgtcggtcgaatgatcgaagacatggagatcaaactccgaaatctccttggcgaagtctactttgtgcgtctcgaattttgctttgtttggatatcattgatcaagctgacgtttagtatgtttctttgagaactgtagggaaagacgaaagacgtggtgaatgatgtccggtcgttcgccggcttagtacgttcttctctgctcgatgtcaagtttcccaactctgatcctctaccagaattacatgtggaaaggatgaacgttgatctctttgtctgtttgtttgcgtaggaaatgaaacgaaatgaagatgctcttcgacgagaacttgtaagcctacctttggctgcctttcaatctacctatgaagtccctctctttaattctgaatcattcttgtcttatcctctttctcttccaacttctcaatcagatggccagcatgaggcgttaatagtgtactccttcccttgtccttgctcctacaactaacgatacatgacgtgtttttcccaatgtgcctcttcgtccggtctcagttcatcttcgtgaacatcatatctaactttaaaaactagcccactcaagactgtagaaatcaacctgatcggtcttctcgtcccacgaacaaatcaggtgagattttttggtcgcagttcctaatctgccccaagctacgatctccataggcgtgatcgtcgaatcaggggatggtaaggccgtcgtcacaaaatgggaatgatatctcagtggatcgcctgattttcgtgtacgcgcgcacccacatagatcaaggtcgtgaccgtcgatttgaattaatgataacaaaaagattgaaacgaaaggagatgagacacatcgttcgagaacgaagaaaagaacaatcgaggaacataggaaggaactgaccaggataagccatcagttcacccccgaattttattcctccacccataaagtaaccccgttcccaaagtttcttgaacactttgaccctggccatctcctttttatttctggggaacgaccagatccctgcttctcgagcagactcgatggtgtgatatgtgtgtgacgaggggtcgtagtaagaaagcgaactggacgtggaaggtgtgaagagttgatagggtgttgtcgatggtggtagtgacggtattgaggatgatgacgacggctgttggggtgccggtgttgatgttgatgttgatgttaatgtcgaagttggcgtctgagtcggtatagatgagaccggagatgtttctgacgacgactgatccacagcggcaatagcagcagcagcagcaaacacagactcttccccgccttcggcctccctcaaagccctcctcttttcctctttctctttcgctctcttttccctcttctctctctgagcgtccgtcaagccagctcctagagccttggttctcttctctttttcgatagaaacggcagttgcctgttgagatctgatatctgacagaaagtcggctgtctcggtcgatatctcggaagaagtaggcgtgcgaagggtctgggtatcatcgattatcgaggcgattcctgaagatttcaagatcaagagggatcacgtttccccctttgggacagttagctacctgatacagaatcggtacatgggtatcgttgagataagagaaaaggacgaaaccggcatcgacaagaaccacgacctcctcgcctgataacaacaagggtagtcctaagaacacgttttgctgggcgatagaaggcagagaaccgaccaggatgccgcatatatgatggttcacccggagagtctgtgcatcgtctgcagaccagatgtatgctctctgggcggatacatggatcgggatctttatcgacccaggcaaggtgtgtgtcgggggtgtcgtcatgatgggttggtcggttgatgatgatgatgatgatggtgtcgagtaaattgtttcgaaaatgttcccaaaaaataatataaagtaaaataaattaaaattgattagacaaggacttctcagaattaaacaatctttcttttcttcgtttcaaagcagataccctccagatatacacataagtagtttctcgtcagttctcttcctctctcttcgtctttgttcgcttaggcttgcatgcagccatcgatagacatggcagcgcttgtggacaccaaagaacacaggaccatggccgcaaggtttgagatgttttgtattatatatatgttgcactacttattcccaccgaccgtttttagagcccacctcctgactttggctctccatccatagtagccgccgttctcgctcatctctctctccctctcgtccttttctctcatcctcttcttctccctcgccgcgtcctgggcaggttgatgtcggtcgatatcgttcacgagatatacaaacggatggaacctagggttcgatcttctagcttcgaggtatctatccagaaccccaggaagtgatgaggccgggagatcgagacaaagaagtcctcggtcgcccagcgctttttgaaactcggagagagtgagtccggcggtgggaggtcgtcctatcagcaacttgtcatccgattcaagaaaactagagtcgtttgtggaaactcggtatcagtttcttctcgtcttcttctccttgtcttccaggaggatcgtgtgtgtgagagagaggaagagagagagagagaggagaagggaatcaaggtttctcacctgacgtggttgtacactcgactctcgagataagatctagagggtgatctcgttcccaggtcgtaagccctgaagaaggcaaaggcagtaggcatccaagaattgaacagacgagtcttgacaaagagatacaaagatgcagaaagagacgggttcgaggaaagaaaccttacctcagaagctttttcatatcctcatcctcccagttgacccagttgtttccgttccatcccaagtcaagagcgttcttgtccgacttgtcggccttgacttcttgcaaccgggcatagagaacggacctagcgtcatgccttcttgtctcctgcttttgacggacggaaaacgattgggtgggtagaagcacggtcgatggaatcaacgttggcgcgagcaagatcaagagcggcacgatctcttcaatcaccgctgctatcaccacgaacgggatcattcttgataagaaatttgcaacgcccggaatttttattgtcagtatccgttcgtcggttagacagagcacagagggaattgggaagaagacgattcgcttactttctccaatcactcctcacacggacctccataagagactccctccaatcatagggcaagcctccatgattgactcttctcctgacctcgttcaccaacttacgctcttgccatgatagggtgactccatagaacaagaagcgacagtagtaccatgcgtaaagtacagcctttgttatcgtaccctttgacggatcaggggtctcgatgtctctaatgggtggtgacggtgctaatgctaacaaaggagccgagcggttggcattgttggcggtggaagaggtagaggatggacgacggtgggtagagtctgtgctgaccagtcggaccgaatgagagattacagggagtttatatcctaggctgaacgttcgtatcgggttcaacgcaggtttcgggtacggagagatggtgaatgaacgaagaacgagaggtcgagtggatatgttggcgcgaatggatgaacaagaccgagctcggaaggcttgatataatctgatacgattgaaaaagatgcatggcatctgtcagccaacatgcatctcttttgtttctttgtattcctatcaacagatatggttgtgatcgcaaaagaggtagatgaagaagacgagaatacacccaaacggggaaaaaatagaggatagctttttggagaaaagacaaaacgaaacggagaaaaacacaagaactcacgggtttctccccaaagccaacgtactgccggacatgctgtttcgtcctttctttcttctgtatgccttgtgctacaaatacgacccaaacagagacagccgagcgagattctagagggaaggcagaggtgagaggtaagagagtcaaaaggtcgatggtcgatgaggaagagcagacggccggggcagacggaacacgcggttggttacaggcttcggccaagccgaggttacagctgggggtttgtgaccatgtgagtccctgtggtcatagatatggacgatcgttttttgttttgtttttaaagagggagcaagaaagtagctgatactgttggtggtgatccgtgcgctgttcttacaaagtgtctgtagaagccaggatgatgagaaaaattgaggaaaggagtggtgtggacagcattcggtacgctaggtgccatcgaagtatacataaaagctcaaacgatagaccagccgtgcaagcaaggtgaacgcgcgaacatgtacatcaaaagctagggactagagttcattgatagttataactagcagagagggttaagatacagactagcatcgtgagacgaagaggctctggacgatttccagaatactcaggtcgcagatttatggattagttctttcctccagaattgtcttggctccgttgatgacttcacagataaatttccacagacggctcaatcgacagataccataaacacatccagtctttcacggaagacttctcctccgacgagcggcctgcctcgctttggcttccgccctctcctttgcagcactccattgcctgccctcgaacctccttcggatttcggtctgggtcgctgaattgagcgtctgctttgtcggagtacagatcagctcgagttttccctggcagcttgggtcatttgaggttccatcgctcgtactgtatatgcaagtcttctcagctctatagaaagcaagggaaaaggtggcgtatcaaagttactgagagtcagtcatcaagagtaagaaccaaatatctgatgagacctgggcttacattgggtcataataaacacaagatatgtgaccgtttaagaacaagctgggctgggggacatatctgggcaggtaagagcaagcgtcttcgtttgtttccacagccgtaaagatggaacgagtcacacaaatcgagtatccgagaagaagttgccccggccgtcaatgatcatatccggcacaaagggatagtaagagcgagagagagagagatatagcgtgcgcgggcttacatgtacactcttgttcagcagacatcatcccctgtatcaatacttgtggctcttccggtgctatcggtgttgccgaaacaaccgacaggcagatcgatgtgagcacagttgagagaaagacagcacatgcgctttggaaaagcatgatgagatagatggagggcaggctataaaggcaggtaggtaggattcaagcgattaaatagagcaacgaggaagaagaaagccaggccatgctcggtggacccatgtcctttatacgttgatgtatgatcaggagtcattcgacaacgcacaaacctaatactacatagaaagaccgacagacagaacgtaaagaagaggaagccaaaggctgaaccagtgggtaccgttcagacagcatttgcgtcacagacaacctatacacgctcaaggattcaaatagaagagagatactatgatgtgcaataccaaagacggaaatagcaacgagatggatgaatctactcagtggccaacggcgacagcagagtacgcccgagtaaaagaattgcttacgccagccccggaatgcgccatgctcataccatggtataccatcatacctatgcattcataccatacactttccatgctgccatctgaatcaatttgtccgctgcgctctcagtgtgcgaaattactcatctgatttcgctgcttccttcctctgcccaagatggaccggccggcgtaattgagctgtgtcacatgcgatcaacatcaaagtcagctccaagattaatcctaaaacagtgctgatgcagacggaggcatatatgtcgttgtttttggcatgcttgcgcacctgaaggtgcactacatctttcatgacgagtgacaaactgtcttcccctttgcttctttcttttctcttttcgtgtaccataagctgttctctctgagtcaggttctgccttgatctgtacatataggtggttacatcgaacacgtctctttcctcgtatcatttaccaactattgtctatctgtccttgtcctcttgagacctagccgggatcaccgagatgggattgaatggacgcaccccaaccgcggcccaagttgatcctataaaacccccaaattaccccatggcataccgcgatctgggtccacacacgtgacgacattgctgtcacgtgacctgccgatcgatcgccggatatgaccgcttcccgagttatcgagagaaaacaaaagtgaaaaaaaaaaagaagagaatcgtccttcagcatacacaaccatctcgatcaacccatctaacaatgaccgtcgtgactgctaccgctccctttgcgcctccggtcaatggcgcatgggtagcgctatgtacaaagtcctcatatctgtctgtttcgtcacgtttacttcgcccgatttggctgctacctctcgaggctgattcatcatctacctaacttatttacgtgcttcgaaacagccagggtctccttgtactcaaccattctctgagctcgacatttcctccgacggcttacccactggttgccatgattaccgctcccttccctccggaagctagggaggtttgccgtcgggctgggatcttgctcaaagaggtagacagcctgcgacctactgggggaacacacgaattgaacgaacatgatcttagattcatggacacctggactaaattcaggttggctttcgattctatttcttgtgcttgcatttagttcattgatctaggctgatctgtgtgagacctcttcgatcggttctgattttaatgatagagcgttcgaatggacagaatacgaggtttgatgcagctccttttctttttcctttcatccacatcttacgctgcactcgggctgacattaatggatgggtacttttgtctttctaccaaatctatagagaatcatcacactggactgtgacatgcttgttcaaaagtaggcttcccatcctttctatctcaccttattcttcatcatctgattttttatcggtttcaaactcatatatattttctctctttgataattagaaatatggacgatctttttaccttacctcttccgggaccggattgggttgccggaacacatgtgtgcgcttgtaaccctcgtcggttgtcccactatcctaacgattggtctgttccttccttacttctccttcggcttcctaaatgtactcttgttctcggttttttttgggttctctttggactgatcacctcttttctgttgactaacccaaacaaaaacaaaaattaggattcctgagaactgcgcctatacagctcaacatcttccctctgctcttacccaccccccgctgaaaatccagccggacggacccagaccacacggccttatcaatggtggtcttatcgttcttacccctagcaagacggtgttcaaggatattgtcactttcctgaggacaagtccgttgataaagacgttcagctttgccgatcaggatctatatgccgcgtatgtctcctctcttctcttctatctttctttcttcattcaatggaaatatcgacgcgtctgaaagcctctcttgtcttccttctctattcgctgcgctcttataggttctttaagaaccattggcaaccagtcccgtacgtctacaacgcgctcaagacacttcgggtcattcatcccgacatttggtccgactcggatgtccgaaatatccattatatgtctgtcctcctcgtttttttttcctctcctttaaattcgtgtattttggtttctcttttcactatgtcatctcagttcatgtatctgacggacgatcgatcaatctctcttctctttttctactccgcttttgatcctcctccggctcagtctggacaagccttggcagcatcctcaaggaagcccatcaaaggcatcagcagatagatcaacagctttcctacatggcttgtggtgggttgcgtacgaggacatgttgagtcagatgaaacttgatccagagagtggttgggatgtggttgacgaatgggttgccaagtgatgagtgtcagaggtatttggatacgggcggtctcgcacgtgaaagagtatgcggatcttgagggaaatcttttgtgtatcatctttctttctttctttctttctttcttcctaattagctatataatcggtctgtttgtcttggcatcgctctagaatacggttgagaagatctatgtatgatccttgggccatccatcgatttgttcactctttctgggctgactattccactcgaatccatcggtagctacttctttctccaaagacctaaccagctgaccgataactccaccttttccatcctcacctgatttcatcaggtccactactccgctattctcttcttccggtccgaatgtccgtccgaatcggtccaccaaatcttgctcaacagaccgaacagtcctacttgacagacctttggaagtgaattcagaaagagaagtagctcgaatgaaattaggtagaccacaggcctcgattagatcgaaccatgggagaggatcaggaaggacgttcaaggaaaacccgtgtgaggttaggcgctgtctaatttgtattcccatcgaggaaatctaaggagtccgtatatgtatgtatttgggcgcatggtgggagatagaggaaaatcaatcggacggtgtacagatcagcgaccgacagatagaaaagactacccaacaaaaaaaaaagatgaagaaagtgaaacaacatcaaaactcaccttcgaatccaaagttggaaacacgccaacatgatcgtcaggatgaggagcaaacacttttttaccgtccagagtatgtgtgacatagtctgctaataatctctgagtcttgtcaacaaaacatttcgtcgacaactgttttcattatcatgattttgcgcagaaatcccaacctcaattcagtttcgacgacttgcgaaaaagaaaagagagactaaacacaaataccttcattcctcctagttcaaaaagacaatatccgacaacttggccaggaccgtggaaagtgacctgaccgcctcttctcgtcactgcccaatccgctcctgcatgtttcaatctttcctcctccctttgaatccgttcgagcgagctaggtagagaatctcttcgacctgtagtgaatgtcggtctgtgttctgcatccagccgatagcgcacacccaccaagataccgtcagacttcaatgaacgcatcaagccgacagagaaaagacaaagaacaaattacccaacaggagcaggatatcccgtctggccagctctgacatcggatctgtctttcgagcctgagacctagcctgaacgatagcttcctgaagctcgagcgttctcttgtatggcagtggttgcctgaacacatgggtggctatcggcagaggcgaagggatccctggaggaggcatcttgcttaagtgtacggtcgatgatgtatgatgtatgatgtccaatggatttccaccgagttgagaagggaatagtcaagtattagtcagcaactaccttatgtatcataatctaattgacatatatatttgattttctttgtacccttcctctcctcccgcctagtgtggatttacagacgtacgctttgcccaacgctcactcctttcactagcccaatcaccatcgcaaaagcaatgtccctctcgacatcgacaagggcgttcggctctctacttaccaggcctaagtctggattatcgactagatctttcgctgtcttttcagcagctcaggctccttacaggacgtccaccggagaggaagccgtcttacctgttcacgtgcctctgaagttgggaggaaagaagtcgaagaacccagcgtacaaatacgtggactgttagttcttttgtacctctggccttttcttattctccttgccttgtgagaatgaaagaggaggataggtggaccctatcgagctcaagagaggccgacggttggagccggtcgtcctttctttttcctctttgatcgaacgaaccgctcatcctttttctttgtcttcttccctctgtttcgtatgtttatcttcagaccgagatcgacagacgcttgcctacccgttctccaaagctgtccgagtgcctttcctcccgcctctacctgctcctagagatatcgtcaagccgccaagcgggacggacatggtcggacacgtcaacacctgcctcaaactctgcctggacacaaactctttctactacttattctcgaaacacaacaaggaccgaatcctgcctgggtcgattctgacggtgacctcctacacgacaagcgcaaagacccactcgaccacgttcaccggtgctttggtcgccgtcgtcaggaaagggatcaacaccagtttcaccttgaggaacgtcgtgcttaggacaggagtcgagatgaggttcgagtgcagtagtccgttggtgaaggatgtgaagttgctcgtccctgccgatggaaaggagggaaacatcaagaagcagaggctttcaaagttgtactactaccgagacgtcagtcttcttttctttttcctcccgctagagccctccttctctcgttccgatcgtttcgtacttgagattgatccgtccttcctttttttctgtctgtttgcccttcttgctttcacccgtctcggtcctctttcactacctccgaccaacagcaacccgaacgactggcagatgctgcaaagattctccgggcaaagaaccaggccggtggatccatggctggcacggtctttttgtagacgtccgagaagggactcatctaaaatgtcttctttcttattcacacgaagaggaccaaaacgagaccgccctcctcaggagatgcaacaatcagatatgtttatcggatagagggaaaaaacgagaagaagaagaaggaagcaagaactgcgaaaggataagggaacggaagagagacgaaaagaataaagaaaagtgagaacgatcatagaatgcatgaaatagaaaggatgcgctacccgtgagcggaagaaatttatataaccagagacaaatagatttttgaacatcaagaagaagaacaagcaacgggaatgaagacaagaaaaaaggaaaaggaaagatatggacgaaaagattccaaagaggttgaaagggacgaatgtttggcatacaagagagaaagaaaaaggccataagggaccaagcgaaacggacagaaaggaaacgacatcacccaaagaggaaagaagaagtaagagagcaaatataaagcgggagaaacgagacacatcaggaaagaaaagagactgttgaaaacataaagagaaacgcgtgcaggaaggaaccacaaaagaatatgataaatcaaacggaaaccaaagaaaagacaatatgatctagaacgagaggaaccgaaaggaaagagggaaaagaaagaaatgtatagagaaaaaagatgaaaagcaacacgatagagtaaggatagaagacggtactttacctagggtccgggatactcgcccatggagccaaacatactgttctgctttttttgtctaaacgggatttcctccatgatctgtttcagctgactctcatccaatactggacctgtaccatcacactttgcctatataaggagaatggttgacaaagaccccaaagcaaaccaaaaaaaaaaagtcagaaagctatcacgatcgactcgatgttctcagaagaaaagggggatgtttccgaaccttggacttcatttcgtggcacaggccgtccagatcaaagtcgggcgtaaagccaggcgctgcccggatcttatcccagacttcgtccaatttgtagttcttggccgtggggtcctgttttttccatcaaaccgaggaccacgtaaagagatgatgattagccacgcgcgttcaagggaggtcaaaagatgcggccaaaagacgagagaaagagaaatggggaagaaaaagaaagtgaatgaggacaaacagcagcaaccaagatacgccctctgaaaaacttgctcttctctttccacggaatgttctctatcgcttctaatccgggcagagccaaagtatcttcgtctgcggttccttctggctcgatctcgttatctggctcttcgtcatcgtcgtcggtcgagacggtggatgatctgagatcgaacgacctgccgacggcaacaacattctgtcctggcaaaagacacttttccgagcattctgatctgtcttttgtgctagtagcaacggtcgccgaggtattgctcgtaggttcgggcgagagtgacgattcaggggaaaggccaagtgggctagacgaaattcctcgatcaagagcctggatgtcagatgccttttgagacgatggttgttgactttgagatgtgtgagcgagagaagcgggtgatgagtctgaggacgaatttgagatcaggctatccagcatcgaggccgtattaggcgtgaaggcaggtgcaggtggttctccaaacgtcggctgggagaacgaaagaaaatcttcgaacccctgtccaccgaacaggtccggcaggcctgagacgttagacatgaagcttggtccaggaagataggaaccttcggctggagatcggtaagacgtgaacaaaggattggtcgccaacgtctggaagggaatcggcgaggctaatctgatcggcagggtcggaataacttctgaagagggtgtcggcaaagagatcccggctggttcgcccgacggagagaaaaagtctgaaggagagaatgcaaagactggcggttcgccttgctgaagttgtggctgaatgtctgaaggcgaggtcgtcaagggatcgttggacgagtgcgaccaaacaggttttggctgttgcagctgctgctgcgagatcgatgcctgagagccaattctggtcccttcggacagacgacgggcgatgtcggggtcttgaatgtcggatgaggcgaacgcgttgaagcccgagctcgaaaacgcagggatcaagggaggcgtgtcaggaccgacgatcgagttaaatacgctgtctggggaatcactcgaggagagcgaggcagttgacatggtccgtgggtgttccacactggaaggatcgtgctcaagagtcgaggacggacttgggcctgtgctgtggtttgctggggacaaagaaggagaagagatcgatcggccagaatttgaagatgatgtctgggcagacttgatggatgtcggtggcgacaacggtttggatgagttgaaaggcaaagcgttggggcctccagcctttggcacggagaacgtgaacgcttgttgtctcagctgtaaaaagacaaggatggggtcgtcagtgaatgaaccgaacgggagggttttggagcgtgtatgtataagaaacaggaaaggatgactgactcgaacgttctctgactgtagtggtcatagagatgtttacatcaggagccagtcgatcggttgatcagcgtgtatttcaaagatgtatcgcattccgctgatctgatgagtagagttgacttgcctgcagcctcgacaagaggtctctgaggttttcgttctcggacttttggccttcactcattgcggcaagtgctgctacctggtcttccaactgttaacggaaggcgataaaagtggtcgcgggtcagactcgacatttaggttcctgacagggtgacaaagtcactcacatccttgacgcgcctctccttccgctctctatgttgtgtggtcgatggatgaaaaagcatgacgagccattagcttcaaaactagtgaatgctgtcaacactccagcagaatagcacggcgcacctaaatgcacgttgggctgcccggttttgctcttttctctttgagagcttgccctcatcctgtgagaaagaaagtagagtgacgaggtcagagctgagtgcaagatggtgggacgccggcgagaggtgaactgactttgccttcggcagagttctttttctttgttcctttcttggtagattcttctgagtagacggaaaggatggagaacgagagggaaagagaaaaagagggatgagcgaacagcgagcttagtcgtggctctaaacttggcgaaagaaagaagcgacccgacgggagttcagagcacttaccttcgacggctgactctgctttctttcccttcttcccggtcgccccgctctgttttgtgctaccctttcgcttgtggtcgccatcgtggacggtatgtgaatcttgatcgtcagacgagaggtcttcggacgaggcatcgtcgtcctggaacgacgagtccttggtggaatctgaggcggatctgttggccatctgaggaggaaacgaatgggaagtcggtgggttgaagactgcggaataataggacaagtcgtcggtattcagagagctagaagaaacgggtagggtattcttatcgaggaaggaaagaatatcggcgtattcagtttgagagtcccattcctagatatgcatatagtcatatggatgggtggagggaggggtatgtatgtggaggcatgtggaggcatgtggaggtgagagtaagagatcgacgagaccaaaagaattagttgaatttcaatttggatcagtcagaccgaacgaatttgagaaacatacggtcgatagattaacagatccgttcatgttcggccacaaagaagacaaagacaaaacgattgggattgggttgcttcttgttgaccgaggagagatgtacgactagcaagggaaaaaaggcacggaaggcgatgaacgtgcagacgaaggaagagaggattatgcctcgctcggaggtcagcgtttgggttatgatagaatgaaccaaacccggactgactctgaatctttctgtatatgcgtgtgtatgcgtatgctatcacggacagatctgaacggatgtatctgtacgagacgggaacgacaagatcaagcaccgacaaggacggaagagaacgacgatggcgaaaccaagaagaaggccgggaaggaaggttggttggttgtcggtcggatcagaggggaacgaaagattgtggtcgaaacagacggaaggttagtaagcgttgtcaatagatgcggtctataaagctgtgctagccattgcggcagaggcggtgtggactggtgcacgtgctttgtagcgccacaggtctgcctgaaaccacctagatgactcggattctccccttcttttgcttccgttcggctcaaatgcgaacgtgttgatggtgttcgatcggatcagggaagcgatgtgttccgtgtgtgccgggtgtgttcagtgtgtccagtgtgctctgtgtggattgcattgcatggcaaagagatacacttacaaacacacccacacacacccaaggctgttggcatcatgctcagtttatcgcgatctcattcagtcgatcgcgatctcattcagtcgggatgcaagtgtcctgatgagcttcggttagagctctgaaagactcccgcgtgtgtgtgtgtgtgtgtgcgcgcgcgcattcttagacctgcatctacatgactcttcttctcttccttctctccatctacatgcaattctgtccaaacaatatgcgttcactagcgtgccaattaatatcctcgaccgtccgttgccgcattgccctgttacatcgtccgctggatatcgcaccctcgttcttgtatgcataaagggaggatgaataaaaggaggagggttgtgatggttacgctgcatcaccgcctacttcatcacgtgatagcaagtaaccagggttttttgggattccatctgctgtcactcaacaaacacgcgctcacagaagaaagaaggacatctcgttcggcctacctacaactcaatcgtgcactcccacactcccacagacatgtatcaaaactatgaacgtcggtcgacagcaggaccgatggactggcaaccactcgaagaaggcccctctcggaaacgtaagtgcttgtgtctgtgcgtactggccaagctcgttgttcccctcgactgatcgtctgctttccttgtctcgttcttcatgttcttgtcctcactctctcatgaacggcgcaatcatgaaccgtccatacacacatgcttcctctaggcccacactatgatccgttgactgcctcatcctcggcattcatctcccgcccgtccggctaccaagcaacccagccaatgtttccaccctccgcatcgacctcgaccctgtccccgtgccacactccgttcctgttccatacgccttctagtctctcaccaccagccccatcagtatcactaacgagctcaagctttacgtttgacccctcggcctttaatcctgtcaccgcgttcggtgtaccagacgtagagatggacgtagctggtagtggcggtagcggcggtgctgatggaggtggtgccggtgccagtgccagtaacgataccaatgtctctgcgtccaaacagaagacctcggtcaaagaagacgggtcgcaagagcagcctgattctgcaggagaggaagtcgtggttcctcgaaaggtcgcaggcggagcggtcaaacgagaactcaagaggagagaaaagacctcatccttcaggagacgacatggtcagagcgcgtacatctctgagaacgaggacgaggacaacagcgaatctgattcggtatgtttctcctctctcttctcttgtcgcttgtctctttactttctgtgttcttcttctcttcataatcgactgcatgtgcgcgcgctcacctttcggggctcatcctattcacaggacacatcttacaaccaaaagaaccgccgccgcgactcgaaacgatcttctaaatcgtcaggcgcgcttctccgtagagaagctacttctcaacgaccaacggatgtacattacaatctccacatgcccggacagactgtcagtcatggagaggtcccttacattcttctcgggtgagtctctctagtctgctctactctactctgccctatcttagacaaggaataacagaagaagaccctcgctgagctaaacgtttctcttctattttaacagttacctccaattcttcttcaacctttccctcgtccttatccttctctacctagctattcagttcattctgaccgtgcgagcagacatcaaccgaaaggtcgaagaagtttcgtatggttcgtttcggtcactctgctcctttccttttttcgtcttgtctcgtttgttcatccctttcttcttctcgtctctcctttcctttcctctcttttccttttccggctcacagagattctacaagaaattgcgggctgtacgagctcttatcttgcaaaccaatgcgagcctgaaagacgagtgccagccatgttagtaccttcttttttttcctctcgctctctattcatttcaaagcaccagagcttgaacatttaagcctcccggtttcgtcattcttctctttctctttctaaaacaacaggcaccaagcttgtacaaattgggagtattgtatgaatagggatccgacggtcgtcggaagggctcaagttggagcagagacgtttgcgggtgtcgtcaacagtttcgtcgatcctatcagttggaagactatggttcgttctctttctcttggcttttctttctcttgttcttttctacttccttcaccttcacctttcttcgtttcttccttcaaacccctcttgctttctcgtctttcgtatctccttctttctatcatctgaatcaaactgaatcatctttcgttttcttctatcaataacagggtttcaccttggtgactctatcatttctaacgatcctcctcaactctgcactctcgttctatcgatcatcccatcgaccatcctcccattcccatccctcgacacctccttcggcagggatccatcatccagcgtcctatcactcggtcggcgcgtcctccaaccagtggaaccattcacaatctcaatctatctcccaaggtccgggccaaggacaaggacgttatgaccagtggaacgaaggcccgaaactcgttcaatagatccgccatcgggaacaaagagaaggagaaagaaaagaaggaagagaaaaaaaagaaaataatatcggtcgatccggtctgtagacttccttcgtttgattgacgaatggacttttttctccttcctagctttgtctcttttcttcaattgtttcttccctaagcttcctctctgtgaaaagagagtgaaagaaagagaacaagagcatggaaatacaattatttgacaagtgtgaacaatgaaacgaaaaggaagcaatggagaagcagagcaaagagagatgagagaagacgaagaaagaagagggaaccgtcgagagaatgaatctttggtgttacatagtggcatgtttgagtttgaacaaatgtcgaaggaaagaatgaagtgaatgcatcttttgagaaggaatcgattgaacggaggttttttttcttttccttttttttccctttttttcaagttggaagagaggtttgggctgatgtgtatgtttggatttatatgatagtcgaatagacagagatcaccaaggagcatcgaaccgaccactgttttgacacaatccgatatgagtagcagcgtagaatctcaaaagtcagttgaacgcgcacagaagagcgtagggaagaaataggactaactctccatacggatcttcatcaacaccagccattcccttgtccctcccacctccagccatctgtctcttcgtccttgccttccttcccttgagcgctttgtattgatctcttgcctcatccttggacgtgatcgggccgaggggaccctggtagacgccagcggcagcggcgtcggccgcccatcgattgggggtcgacgtaccagaattgtacggtgaatcaacagggtcgtacggaaccagatgagagtccggatgagtggtcgtcaggatccaataggctcgtcgccagtcctctttgctctccttcctggaccatcgaccggcttgactgtcggcgaccccggtttcgttcggcttcctgatgctgacggtatcttctccatgggagaatttatactctttgaagtgtaaaaaccagactgaaacgaacaaagagaagaaaggaagaaaggaagaaagagaaaaaagaataatatttcctgggtgagtcatgcgggtttctctcttctctcgcagatgatggaaccggggaaatgtcgaatagacggagcgtaccatagttgattgtatgggattgagaccatcgtttggaaacgcgcgcacatctagccaacgacctgaaatctagttgtccaaaaatcttgatgcttagaaagaggtggaagaagattggagagagaaccaatgtcaggattctaaacactccatgatgccgatactcacgctcaagcttgaacatgacccggacacagaaacgtaccaatctgactaggaaaggctctaactggatctgtctttgatcccaggatcaatttcttgtcctttcctgtcaacgaagaccctcgttttcgatccgtcgactctagcgatgggctgacagcaccctctctatctctacctggggtgtagaccgccacagattcatcgtcatccgaccggatggaccctacggaggaagaacgttgatgggatgatccaacgtcgagcgagttaagcttggacgagaggagagcggtctgtagtagtgtatggtgttgaggatgaggatgggatatattgtgagacatggtgagttgtgtatactctatgagcgagtcggtccaaacgttcttgatcgatggaagaagacgagggaaaggaagaagaaaaagaaaggaaactcattggccgggtcattaggatcaaaatgagagatggttacggatgatgggtggttacagtaatatctgacgtcatgccgccgttttgactcacgtgctcgctgtgcttcgaccgtcctacacctactatctccatctatcaaggtccagagagtgagagagagaaaaggaagacagaaaagtctggagtatgagtcatcgagaatgggaatatggtacaggtatagacaagaacgaccgctcaccagttaaggcgagagagcgctgatatataactgcgctcatcatcctatcgaaggagttgtgggagagagaagtgaccttgtgttcaacgatacaacatcccttagagaaaccatgcgcgacattatcatcatcctcgacttccttgtcctcttctccactgacactgtggctcctgctctgccctgtactctcaacggtgtaaaggaaatggatgaatcagaggatccccaaggtcacataactgtaacccctactgccgctgataaccctaacatcttcgactggttacatcctcgagatctctcccacctatccaaacatctcccgcaagcacttcttttataacgccatcaccatcaccatcacgtttgatcatgatccgtcgtcgacctaatgctcctccgccaaactcggtgcctctctacccgacaggtcctagtacggccgcgcccaaacctacatatagctcgaatcgaacaccagcgtacctatcaaacccgagcgaagggtcgtcttatccttatcgatcaaacggaggccagtccgctggctttggatacagctcttcaagctcgatcagtcatagcgatagaaatggagtggctagagcagctgagcttagctccagatggatgcttagaggtcttagggatggaaccaacgtcgtcaaaggctgggaaatggtgatctcgtgagcttttcttttccttgtttgtccaagacgcgtcttctgtcctccctctctcttccttccttcactgacttgatgtattggcctgactagtgatgctcgattgagaggaagttgtgagtttccttgagcctgtctttttcttgttcttatttgtcttgtttgagacgatatctgactgaatcatgctcaattcgttgcaaaacgcgactggggtacaactcaaacccagtggtcaagactctgtatgtatcgactttattttattttatttcttctttctttgcttcgctattctttatcactgcttgcaagcaactgagagtttctttccttctcttctcaccttgtttctctacctcactcagtctgctcaacattcccctgctcctccttctactcttcatatcacacatcgtgcacccactggtctttccatcgatctctcagcgggcaacaaagtcagacccgaccgtgttttcctggatgttcaacaatgcgcagttttggcagatggccggaacgggcgctgtcgtcctagtcaacggcgcttggcagagtcaaattgcggagcgcgcctggggtcttaacggaggaggtggagctggcgtcgggggtagaaggggaggtagaggcgaaggactgtatgtctgtcaatctctcatctttctcttgttcaatcttgcaaggagtcttgtatgtgagaagaaagacaaggaggaagctgacataacatgcacactccctggttttctatgtggtttcaagggcgacgcggagtattcttctgctagattaccttttgataacttcgatcctacgaatccttcctggtggcctcggatggctcttgtcactcgtgtataccacttgggtcaacggatggtactgctttgagtaggtttttattttgctgaatccaccaaatatgtgtgtgtgtgtgtgttcaaaacaataacaaactgactgttcaaccatcataccttcttctgcagatacacatggtctgcccagggatggagctttgtggaaaagatcgactttgttcagacccgatgggcctactttttcggattcggccttcccattacctttctcacttgccttcccttcctgccacccttactgaacgcgacgatctttgcgctcctctatccgttctatctgattctctcgacgatctcgaacccggttcctctatcgacctcatcccttccgatgtcagctggtggaggcctcggcggaatggaagaaggagccggtggtggtggggccataggggagcgattcgaggatgagctcggctcggatatgggatggtggcctcggcggatatgggtgctcgaggccggcaaagccggtgtcagattgtgggacgtaggcagacgagtcggtctaagcaaactggccgacgtggcaaactctggacggtaggatgtactcgcatgcatgggtgcattccagatgaaaagagctagtatacaaatccgatacaaatgaatctacatatgctgcttcaactttgtgtgtgtgtgtgtgtgtgtgtacaagagtcgtcagtggccgattggctgtgtggcgtctgagtgagaccgtgaggaaaagctgtgcttaccgatcgtgtcccttccggcctgtgccttctgccatctttcctcttcccacctttccccaactgtaccctcagctcttacctcggctgccttgtccttatccgtcgctcacgtatacgacacagtcttcagacatctgttgttaaatgcttgctcctccgtcgctcatcgagctatcggccaaagaggaagaaggaagaaaaggagggattgatcaggaagatacgataggccgccaagacgccggccgagttacttcttcattgtctgacctgcttggatcattcaaagccagcctggttgataaccctgtggcttcttcctttgacggctctatgtatctgtctttgccgtcatcctcctcatcaagaacatcctcatcatcaccatcaagactggtatcagacatgacagcgacattctcacaatcgtcgtcatcatcattaccacacccggccctatcggacgactcacagtccggcgaatacgactacgataagggcgagcagacagagaatggggaatacgatggaatttctatacgtataaaaccagacgtcatccgaccatgggttctcttcaatcgacccaccgtttcttcagacatcacatcaaacccaatatcaacatcgatcccaccgacggtgatcaccacggacgcgttcatgatcaccgtacaatctgggacagatccatccggaccgtcacaggccgaagagaatatgttgctggtgttgctgccgatgctgatcgtgctgagcacgctcctgttcttcgttcttgtgttcctgatcttcgttctcgtgctcaggaaacggaaaggtgttaggtgaggtcttctttctccttccctccttcttttcttccttctgttatcagggctccttgtcggtggagccgttctgctcagttgattcgtcagcgaagcgatccacacgagcacgcatatgggatagagattggagagctgacatgatggatttctctctctctctctttcatttatcggaacaactccaacaactccttcttcggtctctcgaaacagacttggagatgattctgggccgatcgatctcagcagaggcgacggcgtgatcggtgaaggtggagtggatggaattgaggcccgctggttagaggatcaagaagaagacgtacagagagggtacaagagagctaaaggtctgtcgtcccgtttcttgtatcttcccgcggccacgtctcctatcaaaggaggcggtgcctctcatgaagtgtctttgggggggatggggaaagccaagaaggacaaaaagaacgaatcactgactctcaaactcatctcgatcatcagactggcaactgcactatcccccttcatccattcctaccgatatcactctccctcagtttctctccattcaagaaaaaggagtttccgcctggtcgttcgaacccgattacgagtccaacccatcgttatttgttcagtcccgaacagagatcacgttctttgctgacggaccgggtatgtctcctgaagaaggaggcggcaactctgtgatggccaatctaccactacccaaattgaacgaggtctactattgggaatgcaagatattcgaaaaggatccaggaaccaaagtcgcaatcgggctagcgacgaaaccgtacccttcgttcaggatgcctggtgagcaggactttgttctcttcttccacccttgaacaaggatagaaagactagttactgatcttcgaccgtcactcggcacggttacatcaaataaaaggcctgaaccgaaattcgatcgcctacttttcagatggcttcaagtcacacaactatccgttcactgctgcctcctacggacctcctctagccgaaggagacgtcctcggtgttggataccgtcctcggacaggaacggtgttcttcacccgaaacggccgaaagcatgaagacgcattcatcggtctacaacgattcaacttattcccttccgtcggtgccagcggaccggccaccgtccatgtcaaccttggccaggctggctttgtgttcattgaggcaaacgtgaagaaatggggcttggcaccgagcgtgggcactctggctcccccaccgccctatgggagtgagagaggaagtatcctcttggagtctggatttgggagccccgcaggttctcaaacccgcgatcgggagttgatgggcgaaggtagctcagggcgaaccagatcaagaagagccaacccttattcgacagccttagcctcttcgtccgcttcgactaacacaaacactatgccgaccacaacgccggccagatcatcccctctacgaccgacctcatcttcagcagcgacgacgtctagaccgaaaacattgtggacgagttctgctccgttctcgatcccgagaggttcatccgtaggcgaagaagacatctcgccctacgtctcacccgtcgatagggagtcaatcaccagagttcttccacctcttgagccttcttctgaaggctccggatccagatctagtgggtcctcagacgaagacgaagcggatgaggacgacgtgtttctctcacctcagtcgcctaggtcccgctcggcttcaggatcggcctccgaggatgaaacagacgacaatgacgatgtcgatggtgaggatgagtatggtgaggaccgttctagattcacaaaccaaaaccatactggcgcagatggcagccgtcgtcggattccgatgatgtttgagactcaatcgagctcaccaactcgatcaccgagtccgccgacgccaaatctgttggacatcaggcttaatacgctgagagatcgacaagcgattcatgacttcttcggaaacgttgctcatcaagaacacgtttcgccggcgacgttgtcagcagcagccgccaacgcttctgcttccgcctctgcatctgtctcgaactcaacacaggattctccacgaaagaaactaaagaaaaagtcaacgacgcggtcgacgaataagcagaaggctcgttcggatggcacgtccacgtccacttctactctatcatcccagcctatagcatccggaagcggtgcccgtcacggttatggttctgggtcgaatcctaggtctggattgtcgacatcgccgacagctactgccggtgctagctcatccagacctgaacgatctcccccttcatactcgcccttggatcctgtagtgtacgcgaatggcgttccgacagacctacctgcttcagtgatcagtgccgcgttcgaggcggccgagaggggagaggccggtccggcaggacacaccagacctggccttggcggcgtctcgggggatgacggaagggagagaggatggaggaggtgggtttcgggtagtggggctggatggttcggtcagagtaccggtactcaaggaagtggttaaaaacataagaactcctcccttcactactcatgcctttcttccttctcctttttgtttgtttttgttttctgtttctgtttctttatgttttggttgattggctatttggttatcattcgttctttccagactacctcatgcctcgtctcgattttcattccactcgttcatgtcgattcttcttttctcttttcttccctattttgtattcaattcccgcatttattctgtccattcatacctttatccttattctgctttgttatcgtctttgttttgttctgactttaccctctctttatatttccttaccgttgcggtttgtgattgtgcacatatataaccatatcaaccttcttctctctttccttgtccttctgttctcacttacaaactctgttcactagtgtcctggcatctcatgttattcgacaacccaacccctactctatctgacaacgtgtttactagccccttctccttcctgtgcttatcggtccatcttccttttgttctctattcttattttgttttgtttacatgtccttattcatatcttaatcgtttcccacccaagagaaaaaaaaaagaaaaaggaaaagaaaaatttgggagacgtcgggagtttatagatcatacgcatacaaatttctcaacccacagtacaacgatcctgacgacttcaacccttcaagtgatacacaagatatacaaacagagctcatagggaattctaggctttgccggcgctctacgagcaagaatggaagaaacaagaaaaaagatgccacaggaatgagaggaagagtgttggtagtcaattacgaatgtcccaacatgtgtgtataaagggggaaggg

SEQ ID NO: 2658 - DNA, 10897 bp, Xanthophyllomyces dendrorhous
gggaagaccaaagggacgtacgccgaggaggttcatgaatctttcaacggcacctgcatacgtgttggaagcaccttcgtatagatcgggcatgcccaactctccagcgaggattccttctgccagatacttgttcgtcggatctcgtgcccatgcttatgtgtgtaaatagatatgtgggcagagaggcagatatcgtgtcggtcagagtgcgtaggtgaacgaggctgtcgagtcgggatttgagagaaagaggaaagagaagcgaatggcacgtacagttgatgttgaacttgagtgcagacaagccattggtttcttttcagacaaacagttccactcgaagcagaaacatatctaggactgtgaggaaagagagaagcgctcttacctttcgagctccagcggcgatgcagtttaaccagatttgatcttcaagatcgtccgtaccgtgcatgacgagataatgtccagccggtcggcagatcccttccaacttcttcaatctgtacgatgggtaggtgtttcaattgtcagagaccagttgtgaaagatagtatagatgagtatacaaggaggaggagaaaactccttacaggtcgaaccggagtttgggctgggagaggtatcgaccgtgaaggttaccaatacagggagccagaagcgtagcgcccgtctctcgcatgaatcgttcggcctgttgagcatgggtgttgcagaatcggacacatggaaagaggtgaacgagatgggcagaaacatgtaattgacacaaggtagagaacttgccttggcaggatccgttagttgccttgaaattggaaggaacatcagcattggcatcaaggcatgatttaagggtgataagaaaaggtgctcacccatctgcaatcactctcaacccggcttctccgccctctgtggaccgtatgggtttaggcagccaaggaagtgagtacccatgtctgattcaacttgatgagacggcccaaatgacgtacctagtcgaccgagttcaacttcacaggcgattcctaggccagtagcccgttcgatatgcttcctagactggagtaccaagggtttgtaggatatgtgagcgcttagctcgaagtgcgcaagtcgaaagtcgaacgaagcagccgatacaagatagaggacatgaaagacgaacgatctcgatattttcttcgtcagtatctgcatgagacgaatcgaccatgatactatcaaacttgacaccttgttcggcaaaggcgagagcagtatctatatcgtgatcggtcgtggcgtggtccagatgaatggcgatgggaactttggcttcctttgccagggagagaagacattctatgtttggccgagtattgggcaaggccggaggaggagaggataagaaagatcagaaatcgagacttgagctctcagcaaggcaaaccaagtgaaactagacaaacggagtcctggcttcccaagatagtgaagagtcactgggaagatctagagtacgagaaaagtatgctcagtatgcctaagggacgttcgatgagagcgcgaacgaacctcgatgatcgcaggtgagttggttcgttcagccgctcggatggttcctatagccgactggatatcgtacacattcatcgcaacgacctgaagagagagatgaggtttccgacgtagaatggtctcgtcgattagctgatggattgttcaaggatcggagagaagaagccttgctgtacaacacttacaccataagatccttcgtctgctttcctaagaatctcgagcgttctgttatttctcaatgtttctgggagggtagataccatggtgtgtgtattttctttggggtgagtgtttggggtgaatgcctgagttgaatgtctagaataaacgtctggaatgaacgtctggggtggatgcttgagatgaatgtcccggacaaatacaggtatattaaactccagaaaagatcgtatgccggtccgacgggccgtagagccggccggagggatgttgtcccggagcagtataacgtattcttaaacttgtttcattcgtctcctcgttcgtctctccccatcgatttccccatttccccatctctcatcaactgtctactcacacacactcacaatggcaccctcagctaggaaagaaagcgcgctctcgaagcaggagaagttggagttggtagcagacatggtgggttcacttttactgatatctactcgtcgctacctcacttacacctactttttctctctctctctccccgatgatagctcgagatcaatcacacgaccacagtgatcgaagccttttctcttgcttccaagaccggtcttgacctcaggatgctctatgatatcattgtcggggcggctggaaactcgaccgcgtttcagcagattggcgctcgtttgttaagtgttgactcggccagcactacgccatcctcctccatggcctcccttcaggagcttgtccgtccattttcttgtttccatacacatcttcctgtaaagggatgcctgaaggactgaagcgattgatgtttattttactacaggaaagaaaggtgcagaaggtgctggcagagtcggtgactcttggcctgcctcttccattgacgaaccagtcggcccagttgcttcttgcgtctaagaaatatagctccggtccggatgagctggctatgaacgctcttgccaaaacttttgagacccttggatccgacaagattgaaggaaaacagaaaggactttccgaagttactctcagcgacggaagtcaggaggagaagccaagctctctggaaaaggttgccttcgtcggattaggaggtcagtcactgtctcctttcattcattcattcatagtgtccatcggacgtagaactcacataactatcatcatttgcaccactcatcatcagccatgggattgggaatggcgacttcacttatcaaagcgaacgtccctgtggttgggtacgatgtatacccgccctccctccaaaagttccaagacgttggcgggaaatgcgcaaagagtctggaagatgccgtccaaggcgcacagtgcttagttctcatggtcgttaggtacgtcgttactgtgtctttcatctctattcttcacgccttgatgaccgatgttgtctctgttgtgttgaaatgtatatatacagtatccagcaggctgcggacatcatcttgggaacgtcttcttctcctggaattggcgaccgtgagtgttctgaccacaagagaacagacagaccgcatggaattctgatttgcccattcgaaccaacctaattctttgtagttctctccccatcgacgccaatcctacttcattcgaccgttcctccgtccgagattgtccaactccagtcgtcactctcgaagcttccgagcaaacctatcttgatcgatgcacccgtctcagggggtacgatccgagctgcccaaggtgacttgacgatcatcgtctcagcagatgatcacaccggttctgtcatcaagagcatcagaccagtcttggatggtatgaccggtgggctgaacataaaaggaaggttgagagtgctcgatgggggacttggccaagcttcattcgtcaaggtgcgcctttttcttttttctccctccttcccctctgtgtcatacattggatcaaaacgattaacgtttcaacaacgtatgaaacaaaaccccccaaagctggtcaaccaacaccttgcaggcgtccacgtcgctctagccgctgaatccctcgcactatcaaccagactaggccttcatgctccagacttgttcgaatatatctcgaaaggagcaggtcaaagaggaacgagctggatgttcgagaacagggtacctcatatgttgaccggcgatcttactcctctttcggccggagcaatctttgtcaaagatcttgttcgtcccttcctttttgcgggtttaccttactggattgaaccctagagtttttccagtttctttttttactttattttaaaagagacaaactaatagactctctacgcctatgcggttgctgtttttattgggaatctgcagacgatagtaggatcggaagcatcaaacttaggtatccccgtgttcttggcgtccagcgctctccagctatacatctacggcgtcggtgccggctggggcggagacgatgattcgggaatcgtcagaatgtgggaacctctgggcatcaaagctcatcagaagtggtagatcccggagtcccagtcgagatagggatgagtttctgatgagagaaccgtggagagtcaaggcggaatcatgtatcatatgagaaagagaaaagagggaaggagctcctaatagttatgtagcaaccatttatttaaatgtctatttgtcgcacccaaagacaagagagatcggagaaagacagaacgttggagcaaacccccaaaagatgaaagcgagcctcgtctgctccatccttgacagctctgatgagaagtagatggtacgaaatatgaatcctgttaagtctactcataatatcctccctgttactcataggcgagagggtgagtggtagaattagcctctcctctccgtcttgaccgttctcctcgttcgcaaaagtttccttccgtcagcacatgagccgttagcgtctgtccatcgttagtactcctgctgttgtgactgaagaatgtgaagtatccgatctaactgctgaccccagttcttcaggaacgaccatgcactgtacagcaagcgatggaaacaaagagaacgacatccatcctcttcccatcctcatgttggaccccaaaggctccaccgaattcactcaaagaaagaaaggcgaagatgtgtctttagaaatcccaaacacatgcacatgcaaacacacacacacacatcattccatatcaagcaaaaaagcgggcctgttttagaacttgagggcgtggggtcggtctcccttggaaagaccgaaggaagccttaaggtacttggcgaggtgctcggtcttcttgacggaggcgatgatggcggcgtcaatggactacgaggaaagaaagaagcggaaagaatgaagcagaggtaagaacgactacacgaggcgaacgaaaaaaaaaggcaagtgaatcaaacaaaccttctgctcctccttcctctcggcgctcaaaccctcaccacccttcttcttctcctggaagaactcttcctccttgtcggcggacttggcagccttggccttgacgaagtaagcgtcgttgacgttctcggagacctaaccgatcaagaaagttaaccagaccaaacgataagccaaccgaactgaagtattcagtgggcaagagattcgagggcacataccttgacaccggagatgtcaaccttggtggaggtggcaatggtgtaagactgggcgactcgtcggaggggaactccgttgatgagtcggggaccagtcacaagcaaaagaccggagtcgagctgcttgaggaagacaactcgctttcctcggtatcgtccggcgaggaggatgaggacggttccgggggtgatggaagatcgaagagcggtgggctaagagtgaaaggtttaaaatttcaagacaagagccgtcaaggtttgttctattcgtatgctatggtcattcaaatttgatttcccgatttgggagaataaaaaaacccaccttgggggactttcggctcttcttggcgaccttgacatcctcggaggggtagtacttggaagccttggaggtaggaacgagtcgggtctctccgttctttccaccgccgatcttcttctcgacgtgggcgggcttctcctcagaggcagaaggagtaaccttcttgggacctgatggatacatcgtgaagagagttgaaggagtcgttgtttcgacaggaacgtgcatgtgtggatgggaggtgaccgaatattgaacggatgaaggagaaatttgtgagatgtttgaaaagtttttttccaagggaggtttcgatgagaattgaagagaggacgagcgaggcaagtagacaccttttagtagtctgatccgtttacgactcgacactctgagcacactgaaagcactaacccttgtagagtcctcgcttggaggcgacctccgacctggagtagcggccgatgtgcggggcaatgaatccggatcgagccattctgtggatggagaacagtaggaacaagaccaggggaaggtcagcattttgtgtttcaataaaccttgggcgtacagagtttttctctctggttctcctgtccgtgctcgtctgtttgcttgttctttgtgagaaagagaactctcgcccagtcccatcgtctcatgttcttctagcatgttgttctgttctgttcttctcttttctgacgtgacaggcttcgtgtcctccactactagtctcacggtctttctccgacgacgacccttcctcagggtctccgttcttcccctccagccacccgaaaacctccacaaaaaaacccagcgacagacgagcgagagcacaaggcgtagggaaggggagaggacctgctgactggacgagttctcaaggacggacgaaggaagggcgatatttactttgtggtttgcttgacgatagggacggcagagaaaaaaagtttcgtcgactacagtagacgacgattagcgaaggcccgtgcgtgagttcttcataaaccgacccttatgatttatatttgatgagtttcaagtattcggtcgtctaagtgccttaggtaagtcagggctcaggcacgccgcctggtttggctggccagcaactcttccgccgcgacttttcgtcacactgtcgattcggtgtactttcttttatgtagaatgaaaagcccatgggattgataaataacagagagaacagaaggaaggagagacagagaaaaagaagtatacaagtgtgtggatgcaaacggaggggaggataaagacatattaacagacagacagacagacagacagacagaaacactagcacttataaggtatgtatatttttgattggacagatggaaacagtagaggcaatggggaaagacaaggaaaagagagaaagaaaaagaagaatgatacacagtgacaggatcaaaagtaggggatccagctctctggcaacctagcaaggttatgacgattggtagccttgttgatcaaagaaatcaccgactgggtcactggaacgtcgccctttgtctgttggaacgataaagcgaggcctgttcaatttcttgccagaatagcaatctctccgtccgacagaacaaaagaaagcacaaaccttctctctttcgtactggcaagagatcatcttgactttgttgccaaagacctcaacgttctgggcgaccaactgtcggaaagacaggtcatctaacggtcgacgtttcaggacgttactgaacaagaaagaacactcgtttagacatgtattcctattcagacacccaagaaagagagaaaactcgacaactcacatcatatggtaaacttcatccttcatgaacaatgaaagttgctcctccagatcaaactgttgagtagcacaaaacacaggcgcaaggtcagcaaacgggttacaacaaagcatagtgcgccgactacagacagggaagagaagccgtacttctggttgacaaagtccacgaccaatcgcgactagcgaagccgtcaggataccctcaattccagtcagagtgataaagtgctggatgttgggtgtcagacggaagtcaaccggatcgtcattctgtagaagcggcgaagactctggcttgatcgagaaagctacaaagcaaggtaaaatagcaagggtcagctttcaaagcacattaaacactcttcatctaacacaagaggagaaaggatacgaacaagctgtgtggatgatttaaggaagagataggcctctggtaagcatatgcacatccaatctctatatcataaaccttaacacagaactcacgaagaagctcgctcatgtatatcattcccgtagtcctcgagatctggaatcggggcagtgttcgctgttggagagcggcaacaaacgtgatgaacgtaacagatgcgatctgcagagtgaactgtttcctcatcaagaacagatcactcggcgtcttcatcaaacgaatcatgtactggcagaaaccgcgcgacgtaaaagagaagatccatccgttagatgtctcatctcgaagtatcaccgaatcagagctagtcatatgtactcacgtcgctcagaacgttctttggaatgaacttggtctcgatctcatccatcaactccagccgcaggttcacgtactctggcgagccgacaacttggttcgcaggatcgaatagctctcggaaccgatcagtgaaatgcaagaccggatcttctttggaccatcctttgtctcgacaatgagcatcgtaaatgtcctggaaagagctgtaagaactatcgagctcgatcagtcgaagagcaggcgcaagagggatagcggccggtaggtggaacgaaaggtttcgttttctgctctcctttcggctctgtagaacagtcgagagcgttcggaacacctggctcatccgatcctcccgtcgggtatgtctcgcagcgggtaactgaacggagaacgaatgggtagtaccattatgtccaatcatagtgatccgcctgaagcagaatccgtgacctcggccaagttcgacgagaggtacgaatcgagcaatcttggcaaagtcgttgttgttgtcaacgtgcttgagtaacagagagaacgaatgttcatcaatctctattaaacttaacatcagaagtcaacagacagaaagaaggttgccatcgacttacctgaaggtactgtccgggaacttctacctcgtcaaacttgccgtgatggaactctgccagataacagttggcttggtcgagaggttgcttccggggtcgtcgatctagtgacacctcgtacttatctcgcaacttttggagctttcggacgtagtctcggagagcgctttcttggataagatcaccttccaaggacgcctaaattcgagagagaaagaaagacaaagatctcagtacagtccgacagtgtactgaggatgatctctccgacgcagaaacgtaccttcagagaactcgatagattcgatacgctttgagcgaatcgaagaacgctctccttagtcgctgcgctgagctttccatcatctcctggtttgtcactcctttggatatattgctatagagaaatagagaagggagtatgaataaaacacagcgccgacggaactatcacggtccattgaaaaatacttacagcgacaccgtccaacagcaaagcggtgatgaatcgatagatgtcttcttcggcaggtggtttgcccctggtctggatttgatccaccatcttctccatcgaaagagccaagagagggaaggcggtcttgaggatattcagaatctcttcaacaagctcccaaggctgtcggggttgagcaacgccattgttaggaggaagaggaggagcaggagcaggaagagcattaacaggaggtggcgccgcaggaggggcaccgttagccgattctgttgtcgacgacgaggcaggagctgtgacagccactgtaggagcggtcgtgccgttagtagcaggagtggaagcggaagtatcagtagttctaggcgaatctgtcgtagattcggtcttcacagctggagtggtcgagtctgtgtttccatccccgtttgcggttggtgtggggacagaagtgggagttggattagtggccggagtgagagcctccgtgctctgtcgactagccatctttgcaagctgagagatatgttgacgtttgatagctccaaagtcttctttagaagtacggagttgatagaagagagcctataatacaagaaacgatcgaaacgtgcatgtcagtattaggtttacatagattgtttttgggaataacttgcacttacttgtggataggtctttgcaatcttcatcaagatagctctcgcatgccgagcctcacggtgagacaacgaaagcagaagttgaggaacgagcgtgatccagtaccaggccggcatatcacccttgtacgattcgaatgctttcgagatggccgaggtggaagagtcgtccaaactgaggagccaaagaactcgaacaagaagttttcgagtctttcgactcttgtatagaccagcggcctggaggtaacaagaaacggcgttggcggcaaggtttgagtcgtgaggcttctccttgaagattcggtcattgaatcgaccccattcggcccatgctttgggtaagttgagatccatctgaacggcctgagcaaaagcgtggttggcatcttccgaatggccgagcttggcgataaacattcccttgagagtaaggaactccgccttctgagcgggagcaaagtacatgaggttcgttgtactgatactttccaatccttcggcaagtcgatctggcttctggtaatggcacatcgcttgttctcgaagtttgaggaaagcttccgagatttcaatgttgggaagggcgtagatcttgttgagagcgttgctgcaaacttcgtgtagctgatgctttctggcgacatgtccgaatcgattgatcatccaggccgtctcgtgataacctcggtacccgaacgtagaagtctccccttgaggaatgagaggaacgtagaccttagtgacagcagagaagacgtgttgtctccaggccagaagatctgaccaaacactgatgtcatcccaaaagttgggcaatctttctctccaggtagtgaaaattcctttgag

SEQ ID NO: 2659 - DNA, 25649 bp, Xanthophyllomyces dendrorhous
gatcatgacccactctaaactccaagttttgcgcattcgtcatagcaagactttcaaagaccaaagacgcctcttgaagttcaacgaattgctggaaaagttggagaagagggacatgggccatggttatcgcttttggaagggaaatccacttccggatagagagctggaaagcttcgtcgaggatcttgacaaaatctccattcttctctgtactgttctgagtcttgatcaagcaggtgtacgcctcgaagacttttcgacgaggagtagctacgtccgagacagcagccaaagtagactcgatggtgtcacggtcaaaggatccccaatcagacaacctccaagcacactcgaggagtaaatcgtggttattttccgcacgagccaggtcggagagaatatcccattgctggagcttctgagcagaagttatccaatgatcttcccataagcagtactcctgctcggtgaacggaaggactcccgttcgagctttgatttgagcagcctcatagaacacctgagcgacaggccacatcccattctgctcgtacgaaagagcagcattggtctcggcgtagatagatcttcgccgccagaggccatagaacatgtcgtcctcgcatagatcagcaaagagctctgcgagtccatccctagtactttctcgaaggccgtcatccgaacgaactggttccagagttaaggagttgttcatgagctcaatagcagtgtgccaggcatcgaacgtcttcccaagatacttgacgacaaaggggggaagcacaatagcgggggaacaagcaagcactccttcgaggatggtctggacgacgttaggccgcatgtcgacctggttgagatggtgctcttttgcaagcagagcaacgagatggcgagtggcatccgactgctgagacttggaaagggtagaccaacaaatcttgaatacagatacccaaacttgatgggatatctctgcatctctatgaagcaatcgacgagcagggagaaggtagcttccgacggtcgcctgagccattaagctttgaagaaggctgctgttctcattagaaacaaaacctggtatcaacgcttcatcagagttaacacaacctagaagaaggtcaagagcttggtgaatccaatagcctccagccaaagcctcccaactttgtgatgctaggacgtattgcaatcttccagccaatgttgaagggaggttctgatcaaataggtcaatgaatttgcttcgtaagactggatcggcatttcgagttccgagaaggaaggcaggttctagcctggttgtaagatccgtacgcttgagagacggttccgaatagatgtctagaacaagttgaaggaacttcccaagaagggcaggatcatcccttttttcgaatgccatcatcttgagaagtaagccggctttctccttatgagtcggtagagcttccttgggatcaagaacccagtctctcatgatctctaacaaatattgacagagacgagtactcgaggatttttcgatcagctgaaccaatccgctaaggagccatcgtcggtgatccttaagctcggttactcgaggtcgacagaggttcagaacgataataatatgatcgacgttggcttcagcgagagcagccggagtggcgcttgaggtcgtagtaggaggagggggagggggagagacatgatccttgcaaagcttggtgagaactttaatgagatgaggagcaaaaacatgctcgatcttgtctggtctagtgacagtccaacattgaaggatgaacagggttcccttgagactggttccattcttgaggccctctgcgatgctgttttcggcccaatcctggaaggtctgcatatcggtctccagcttaacgtcctctgcagggagaggaatgacttcaaacatcctctcaaggataggtcgcatactgtcatgaagaaccaactcgtcactcgtcacgctcttctcgataagcttatggagaacaccgatttgagacacgaagaattggtcaggcttgttagaggcaactaatgagagaaccctggcagagttactgattacagccagagtctgttcagtgagctcgagctgcgaacgagagtaaggtgatagttggtacaatcagcacagagtaaatgtttgcaaatggcgatggcttaaagctattttgactcacagtaaccaacgtccgctggaagaaaccaagtttgacagaaaccggactccaaggtgtgggacccaggagttccttgagcaactcaaaagatcgtttgcaaagtccgttggcagccataagctccggagacatggaaacaaacctaaccagatagctaacgatggcttcacgaagaggaggaggaggggcccatcctccagaacttccgctcgaaacagccgttccggctcgatcgacacgggatcgctttggagatggaatttcaccctccgaagctctcttattagtctcggtgtcttctttcgaaggaccagttcctgtacggcgtctctcccaggttagaacaaggtctacaatatcgatgcttaactgaaaccccgtttgaaaacgttgatattcagcttgaagtatcctttcggtcacatctgacagaagacacaaaagagtcaaagactgaccttcttcatttccggagtagcggcaggggctgaaccaagacgggtaagagagttgaccatttgtggtacaaacaactctctactctcatagaacagatcgggatggccaacgatgagctcaaagatgcttaacagctgaggggtactatgtccttcctcgatcaagatttttcgaacgactccagcccatggagggtgtacggcattagcagctcgctgaactcgttgaggaagaacctaaagaagaacagcaaagggggttataagacaaaacaaaaagggataatgataaaaagagccaagaaaggaaaacgtacgggagcgatgatatcaatagcctgtctaactaacgctcgtccttccgagggagaaagtttaagaagcccagaccagacctgcataacaatcttcatcgggcagtcgttgctctcaatgaatcgagcaataagcagatatgcagtatgttttactgtcgggtctgcatcccttatgtaaagccaacccatcttaatgacgtccttcctgacttcgctaataacttcagagcaatgtcgaacgagcagagtcgacatttggagaagctcaatcttgagggcatccccaccagcggcgatgagtttatcgtccgatacggttttctgccagatgagagcgtgagcgctagcggcaaactgagcgtcgatcaagtcattcccgtgatccttgtcagagaagaagacaacgaggatagggttaaccaggagacgaagacagtgcatcttgaaatcccaagagacgttaggatctccgaaaactcccaggaaatgattaaggacttctcttttgacggcggtagtcgatccgacagctacgttctcatagaggaaggcggtcactctagaaagatcggcattggtgttcatggtgtagatccggatgacatcgaagagcagaggaacatgttgctggaatgtgaggtagctgatgaacatctcgacgatgagcagaggttccctctgagacgccgacggtgcagttcctccactggcgggagagagtctctgtggagaagctctccagagcttcagtagagaatccaagatggacgatcgagtgacgagccatctcggatcggaagcgataagctctcgaacaaggagtaaaccaggagtgatcaaatccggtgcggcatcgtctaagaagcagacctcccctagcttctttgcttcggctgaaagttcggagatgaagttcggtgcatgcccagaggcgatgacgtttcggaacgtacggatcacatctggattccttagattctcgaacaagaacgggaccgcatccgtcttataacgatcaagatatttggccaagttctccgtaaacggtcccggtgacgattgatgtagattcgtctcggcttcaacgacgaggttagtaagcgtcttgaggaacatgttggcagtgggaggtaaaagccggaagacgttaatcaaccggaccattcgagcgatatcttggttgtcctctaatggagagaacgcagcggattggagcatgttgggctcctcagagagcgtcctgaaatgttccaagagcttgtgaccgatctcgaccttgaagtagtttgttaaaagttcaaggaaccgagctagaccttctaatccggaaacagagagtcgtttggcgtccgcaagattgacgaggatcgggcgaagaccagattgaagaacctctttgggaagcttgttttggtgagccaacacgtgcttcaatccttcgtgggctacactcatgatttcctttgtcggagagtagacatgcttgaagtaaaccgcgatgactctgcgcagcccaaaaaaaaaaggaattagatacccaaacccaccatcgtggctgtcgtcgtctagagttcaaacgtaaagagaacttacctcgatcgtacgtgattctgcttcgcaaaaaactctgtacaagccatcgcagccgacaacaatttcaaacaggatatccttagattctttaggctgacttcatgccgatgttgagcctgtctaccgataagagcctggtcctccgcgtctgctaatgcaatcgcttcgtgaagaagtctgacgagctcctcgttgacttccggaagagacggtcggagattcaaacagtaggtaattgcctcgatgtttccgatttgcatggcgaaaggcaacgcccgtaaaggcttgtcgaatattggattgagaagttgactcttgacgggtagaagaagatcatggacagtggtggacgtcaactcagacaagagttcaatacatgactgagaagtcactctgacaactgaatttgtgctagcaagctccttgatgagtaattggatgagtttcgctcgttgagatgatccagtagttgcgtctacgttacacgtccttaggatgtgtttgatcgtatctaccacgaatgatactgaccgaggaggatcattaggcatgtctttgagaatgaatagtaacgggcggaggaagtcgagctgtcgatctacgatccactgaatcccaacccctggtttcgacgtaaggactgataaaccagtacatcccgccagtttcctgttccacggttcttcaaagcataatgatgagagtttccaacccagagcatccagaatcggagcggggtcaattctgtcctccatggcgtcttcacttgggggatcatccgactgggagatgatatcatccaccacgagagagataatctcttttccttcctcggctttgtcagacggaagaccggcgagcgcgacggcgactccttcgaggtaacaacttactaaagttgaggcggctggatgtcgttctcttccgtgtcgatgattttctgtcggtggctcccttctagtttcagagttgagtaggtgccgggaaagttttcgtaggaatgccagggcagactctttcagttctggatgttggtaggcaaagaagagtccttggacacattggtggaatgtctgttcctgttcagatcctctcacaccctagaatgagttcgatacaatttctcagttagtactcgaaagaaatcagaaaagaaagaggaagataaaagaacgctagatctcacttgagcaacggagacaagagcagactgtttgaaaaactcaaaggcctgagctctatagaactcattcggatcttgaatggacttcaaggccaactcgcttagcacagccactccgaactttctctggtgaccatcaaagtttatcggcattgtggctgctggtgatgggaaatttgattccaggagatgtgggacctgttggaaccttctatttcgtccgcctaatttaccgaggatcttaacagtagcatgtgaatgatggtggttgaacggaacaggtcgaagaagatcgtgcaaggcgcccataagatctcttaagactggtccgagagtgggatcaaggaattcagatgtgagattatcgatacacagctcaagcgtcctcaggccttgactgactagctctggacctgcccgaagagcatgaaccaaaggcttcatcaagtaacctaaatggggaagcaagtttgtcaacctgacgggtaccgtcaaacaaagttcgacaaacagatcccgcttgtccggttcggcgtgtaggagaagataatttaacgtgtcaagcatctcctgaagaattggcaagacctccttatagagcgcctcaaatcttccgccgccgatcgatcggaaaagagctcgaagaattgtgtaatatatcgtcggttctgtcgctttggcggcgtaggagaatgaattggtgataagcttggcgaggtatggaaccaagatggactcgttgtgttccgggaatgagtttacagccaggaaagcgagtttgaagagtttcagtgtgagcggtcctcgcttcttatcttgctctccaaacgcctcgagttggcccattagatactttagtatgatggccaccaactgatgggacacgtcttgtagatgaggtacctgtgaatttgtcggtacgagtagatactgaggaatcgtgagcagatggccgttggccaatgcttgattgacaaagaagtccatctttgtgatccagacctctgcaaacacatgagggtcaaagtggagaaggatctgaacgaacagatccaacgcttctttttcttctctagcatcttttaacggatcatagtacgccaacagacggcattcagattcgaaaaactttccgagaagcgtcccattaggggcgggagcaccgataatccggagttgattcaagagtgctcggactccgtggaggagggttttcatcagatatcgcgcgtcaaccaagaagtatagatctgttgcacatcacgttcacaagaaagcgatcaggatgagctctgggagaggagaaagagtaaacgatcaagactgacctcgactgtaggcctctgaaccatcaacggcataagaaactgcatgaactggcttggctctctctacgaccaaccatttaggtagatcttcttccttcgatctccccatttccttccgcttctccaccgcttccttcccgtaaactgtcttgagctgagcgtgaatcacgtcgatcgctgccagtttgtcaatacaactctccaggatggccaacaggaattttggagcttccgccttgtcggttttcgaacagatcgtctcgattagattcagcagaagcttggcgcacatcgtttggataccaaacgtgaatgccggttcatggagacagcaggaatagatatggacgattcgggaaagttgggcagctgtcaattcgtttcggacatgatgaacaagatcggccagcattgaatatgccagtggtcttagagcttcttggctggtgattccggttccgaccaaaactcgttcgtccaacatgacatcgatctgggagacaaacatggctctgaagtcggtcgaaagaatatgtcgagtcgctacgagaagttcctgtagatagaatttgtttttaataagcctctttccgcctgaggagtcctgtccgaatgcaatgaaagacgaaccttccgactagcgactgcttccggtggacaatctcttaacaacctgatactcgctcctgccatcgtttctgcgtgttttctgatatcctccgttgctgttcggaggacgtacgccaagaaagacattgtctgaaggaaagagttacggttgcgcgtgcacatatacacacatataggtgaatgagccaaactaattgaggtatgaacggaaggaggagagaagacaatgttagatatttaccttgacttgagcgacgataaactcctggtagagctctctgttagtgatcccctcggcgacaccgacgaagatttcacccttttctgccgacgcgaggtaggcccttctttgaggttccgcctgaagggtgagacattccatgacgagtggaaagtaatccttgatgtaaggaaacacaatctgcctccaagtttgaaacacgagaaccacggcgataggacactctgtgagcactttgaatgatcgcaaggatggtcttagcgtttttgttggatcgtccggattcgtgggcgacgccgcgagctattttacgcgatagatcacggttcgtcagtcacgcgatgaggggaaggaaaggacgagaacacaaagaaaaagaaggacagacctctccctcgacaccgaactcctctttgaccacagctctgagattaccgtacatgactttgactaagtcaaggaattctttgacgtgtttctcaacttcgtccttgaacgttcggttatggtcgatcatgatcttgatgcagatcactccgttatcttcattctcgacccgaagaaggtgaagcatcagtgacataagagagtccgcgaagggtcgcatgtattcgttgtgtggtaaacgttgtattatctctagaagagtatggcgaagtttctatattgtccatagtataagccaggaggattgagtcagctgtccagaccggattgctcggcgaggaaacgcgctggacgtgtgcgcaaagataacaagttaagcttacgtgttcgcccatctctttcccgaacacgggcgttccgtttcgaagaacttcagtaaaggcagggagaagaatgtcgaggtatcgggcgtagtcgacgtctcgaaattgttcgaccgattcccggagttccgtcgcgatcgccagtttcgtcttgacatctggaaggtaatggttttaacaaggtcaatcgttagcctttccggcaagggaagagagaagatcaagtaaggaagagaaagaaagcagaatgaaatggcgcataccagatccaggatccattaatctggctgcgaacgtctcgcagtctgcaacgctgactattccggcctgagcactagcgttcgagccagctgtcggtgctgctgagatggttgagctctgaccgacaggcctcctgagctctgctaccaagccgctggcgggcttagagcctccattggctgttgagcctgtcgatggtggctcgtctggattggtaggggtcgaagaagctgaagccggtattctcctcggttggttcgtgttcgacggaggttgtgacgaggcaagtggttgaggagaagggttggacatgtggaggcgctgcagtgaagagggggcggagaagaagaggagatagaagagagaggaagaaaggaagagagagagagatcacaagcgaatatgaaggcgaaatatgagtatgtgatctctggagattgaacagacaaggcaaggaggaacgtactttgggtgaggctactcaaagccgtttacctcgcccaaggagaaatggatggacccgactgaaatagattgggatatatatgcgtaggaatatgtttaatgagacaatctgaacccaagagaatagagaaagaaaggaaaagaaggaagaaaagagtgatggatgctgcacttgctgaaggcaagaagctgagaaagaggaaaagaaggaagaaaggaaagactgagaaatcgagttggtcgccaaaaccaaagccttttttgattgtcgacaatcaaattcatcaggaacgtatacccttaatcgcgttcctacgcgactaagtgcgcgtcaagctgctttgcttagtcattgtaaccctaactagctcttctctcagatatgtttgcccatcgcaaaggaagcagctaagtcttcaacaacgatagcttggagctgtaggacaccggtgagaccatgtgagagaagagagaaccgctctgtttccatcgtctggtatctcttggtacacttgtagatcgttcttaggatcaccgttttcaagttgtacatatatcttgtgatccatactctttgcttgcagtctgattctgtcatctatacgcgtagattgctcgcttggccaggaagttcctttggatgcatcttgtttcgattggagatagcgaaatagtcagcattcgtctcgtataggaaaccatgctggcttgacgcaagacggataggggacgatccagtcaaacaaagagagccatgcttctctaaacccacttacggagatctccgttggaaacccctcatgttgcactttcgtaccttcctcctttctttcccctccctcccttttctcctccagacacaaccatctactgagtaacaatgcttggctgtctcctaccccaattgaacaaatcagaaacggccgaatggaccgagaaagatcgatcttcctgcatccatcatctgggcagccagaaagaggtggccgacgcgacggaacgaacagacgcgttgatccggctcaagatgctaatctcggattctaaggtggatgcctagttgagttcctatatctcttcgtctcttggtcgtccttgtttttgtttgggaagtgtgctgaacgtatgcttcttgtcggcaacgaacagtgtggtcccttcagaggacgaacatctctcagagactccagccgattccgaacacagactcgcgttcatcaccgggtaggtgtcttgcccgttagactcctactcattcatccagtcattatcaaatcggccgtcttttacgtgttcgatcaatttggtcccatgcttctactaacactcgtttggatttggatacggaccaaactggcggactcttttcttgacgcatacataggtttaccggctcggcaggtacggcagtcatcaccaacgaggacaactggctctatgtcgattcgagatagtaagtcgtcttccttgtcatgatagagcaagagctactacaagtaagagagagtgctgacgtgcagccgggctgtttagctggatccaggcttccagacaagtgtcttcttcatggaaagtcaagcgagttggcaaagatggacagaagaactgggctgaagatctgatcgaggtgtgtacccaccgggttaaacatatccctttctctattctactgatcatttggtctcgtctcatgtcgcttcggttgagatagaatgctatgcctgtacttcgattaggaattgatcccaaactcattaccgccggctctagcgcaggagctcattctggttcgtactctgagatccctttcctcggtgtccctaaatatatgcgcctttaaacaaacacccttcaccttctctacgcagcctcagtcggatcgcttttagaagcttcgaatatccacgtcattcctctctccgagaatctcgtggacagagtctggggagattctagacctgcccgatcaaagggcctcattggtatccatcccttcaagttcgccggcaagtcctcggtctctaaacttcaggaactcttatcgagtaagtatctcgagccgagcaagactattgggctcttggtttccagcttggacgagatcgcctggctattgaaccttcgatgtgaaggcgatgtgaagcatcttcctgtgttctactcttatctgtacgtcgcgtccttcgtttcatcttggtttctctttttctttcgatctgtcactcaatcctatcaccaattctgtagatggatttctacttcatccgatacatcccggacactctttgtcgatccttctaaggtttcagagcccgtcagagagtacctccgaaagctaaacgtcgtggtgaaaccgtatgagcaggtttgggctttcctcaaatggattaaggctgggctgagtcctcgagtagaagatctaaaagagaaaaacgatgataagaggaaggttgtcaccggtctatcggtcagttgggaggtagagttgtctatcggcaaggttggtttctttcgaaacaatatgcctttccactatgtatgttgcgagtgtcgatagcttgtatcaaatactcttgatcaaacaggaaaatctccaaacgatcttgtctcccatcaaagaagccagggcgatcaagaacccgattgagattcaaggtctcaaggctgcctatctccgagatggacgagcctccattaggtttgtctttgcctacgcttggtctattgttcctctgcggcctgattgcttgcttgcctgcctgcttgacgagttaagctgacaaacccttgggagggcctaggtggatggcagagatggacaggtcgattaggaaggaaaagaaagctgtcgatgaatgggaagctgcgttcgttccaccatacctttattctcctccctttcgttgtctcagggtcgggtaaggagaaagactgactctacgtggctcacattgactcagtgatttgctgactactttccggtcgaaagaaaagtacttcaagtacgttcatctcctgtttaaggaagacgctgtatacaaagatatgagactgacatcgtcgatctgcttgggataaaaaaaagagggctagcgtatgataatatctctggatctggaccaaacggagcgctacctcactatagtcccgaaaagagagcttgtcgggtcattgatcgagataccttctatgtcaagtaagttttcatctttcttctaccaacaagaaaaccgagggctgatcaacttctccctctcggggcgcgtggttttataaacagtgattctggagctcagtatctagatggaacgattgataccacacggacatttcattttggaacacccacacaggaaatgagacgagcatttacgagggtcttgcaaggtcatgtatggcccttctctttttcttctgattgaagcccagctcagaatcacgccgaggagtgtaattcgacggctgatttctttcttatctgttcggtcgaggatggcagatcgcggtggctaattctatctttccggagggaacgacaggtgtgccgatgaatatcttggctaggtccgtcttgtcatctttatgttctcatcagatgtttggaagaatagggattgagataaatgtcgactggtctttttagaggtccgctttggaaagaccatcttgatttcggacacggtgttggtcgtacgtttttccactcaagtcatcgcttgatatgtgctccttgattgactttgttccgactcatttgtgttgatcgtttagatggtgtacgtacgccagaaaaccaaggactgaactgaattaaaacatcgcctttagcccaagagtgctcaacgtttttaaattacaccctggggtttgtcacagatcggatcctacctcgctgtccacgaaggtactccttctattgatctcgttccctctctatcctcacatatttacctatctttgaaaaatcttctcttctcaaatgcaggcccgcaagggattccaacatcttaccccttcaaaccaggtcacatcatatcagatgaaccggggtattacaaagaaggccattggggtataaggatcgagagtgtgattctctgtgtggaacaacccgttcgcttttttttcctttccttcccttcctgttcggtgcatgatgacaaaagaaacgtatcaactgatttggcgcgcatgtatgatttgactatacgatagagcaaagcggcgcatgaaggaacctggctaggatgggacctcatcactcgagtacgtcttctctctttctctttcatcctcaagatctgcaatatgtttctgacatcagacaaaacccaatgaaaatgaatgaaggtcccgatcctacctagtctggtcgataaatcactcctctctttggcagaaaagcagtggctgaagaaccataatgagttatgcaagaaggatctgatgcctttgttgactgacgagggtgatgggcttgcgagaaaatttttgggaaagatctaagaatgaggagatggccgctgatctagtgagttttgtgtgtatgataagatatatgacggcgttccttgttgtcaacaggtgttgatcaccaaggaagacacttataaaacattttgacggggctcttcaagatacaaagggtagcatgtattgaggtacagataagggaatcatagagaaggtgaacatgcgaagaatcgctgatcacaagagtacagtttttttaatatagtctaagaggagcccaggcgaacaggtaatgtccatatcgatgacgagagacagagaaatactatgaacctagcggatgggtttcattggggtttccagaaatagaggtcgatacaaacaaagacaaaaacgtacagtcaaggaagggattcaaaaacaaggagaaaactgattgagaaaaccctgggaagtactcgttaaagagccataccgccgagccctctgttgattttgtcatactcttcttctccaggcggcctcggtcttacccaaccttgtctcgttctacctgcgtctgttcctacatttatctctgcgctcggtgaccgatcgggcaaaggaacatccgttcgaggacgatggtgtggcggtggtggcggaggcgagctcaacttcagatgacgaggtggtgggggtgataagtttctagaagctgtactcatactctgttgggaacggctgaaaggggcgggcgtatgagaaggcggtgatgagatgtttgattggggagtggctgatgataagggctttctgtgaggaagaggcggcggaggacttggcactgctcctactgctcttgagttcagatgagagggtaagctatagcctggcggagaaggagatggccgggacgcaagcggtagaggcggtggcggtggtggtgaaggcgttggggcatgtccgtattgaaggattcgaggtttcaggtgatcatcattcaaatgctccaccaacactgcttggtgtttttgctctttatcaagcttttcactgagatcgccaaatccaaattcagattggttctgactttgagtttcttttgaatccaattccgcgccgtcggagtagtctttggtgcgttcctgatgcatccgagatttaataaatcctttgcctgctcctttgacaagagcttttctaccgattcctctacataggcaaggcaaatagacaaaggtgtgagcaaagacgagtcaaaatgccgtcaagaggaaagggagcagagaaagaaagaaagaaagaaggaaggaaataaagggcagctaacttgacatcaatgaaggcagccgagacattgacgacactgcctgccgccaatctactggcttcaccagcttgtttcccgtacttatgttcaatcgcaccactcgagtttgaacctgcgctctggatcaaagttacgctcgagctctcgaatgaggtaataacaacgtcacctgctaacaaaactcttgacaacggtctttgtactttggaatttgaaagaaagcctggtttggccggaatcggaggtggcgatgtcgagggggagatgctaccaggagatttggaagcttctcgtttagcttgggcattgctgatttcagtggatcctttggtgatcgtgtattcaacacctcgttgaatgtttcggttgataactggatgagtttacaagggtacgcgcacattagccgcaagaggctgcgaagagggagctcagtgagttacgatttgacagagcggggtgaaagaaaaggcataggcgagcttacacgaagttcctttcttgattgtggtctttcccgacaaagcggccccacttgattgaagagtttgtgacacaagacgagatcaagaagatcagccgagttcacaagttgagaaaagatgaccaagaacctacttgactcgttcgagctgtcttctagttgaatcgctcacaacgactggttcttctctaggtgttgctcgctggatgtaagcattactcgcggcctgcatcttgttcgataagatattcgccccgttcaacatgtgttttcttcgatgcatacgtcccgaatggcttgccaggtcagtatcacagacaatctcagtgtaggattcaacgataggttgataatacgaacgagataaagcttgcgccccttagcagaggatcgtccatttcttctgcgggcacttctgtgacaacgatgccgttccccttcgttatgccttctacatccacaacgactgggccggttccatcaccgagagaatttgcgctgaggacgccgtcctgactgatgtccatctccccgacgacctgacctgtgctctcatcaatcaacacgaccttccctttgagaccatcttggttctgttcaatcacgctcaggtacgactcgagcagcgtgtgaaacgttagggtgtcttcctcctcagcatggttcgagggaaagggcaagaccagagtgataggagacgggtacgctggaggcgcagagggaagaatgtaggtattaagtgctggagagtacgatatcgtcaagtgaggatacaatcgatagtgctgtcgcgcaggaagtatacgtttttgtagatagcaagaaaagcccgagctctcgggaaggtcagttctcgggttcaatataatatagacgagtaggagctcacgaatttgtcgatgctaagcaacagaacacgttccgatccctgagaggagcttgccgttgccagactgggagaagttaagagacgcgacccgccgatagaaagacgaaagcaaagaaggaggaaaagccaagatcagcgaaggtatgaacaatcgatctgataacgtccaagtcaccaagtcctggtagaaaggaaggctgaaactcttacatcagtcgaccctgagcgataggaaccggcggggagactccctggtctgccgggttgaccgataccgaagctgaagcaagttctaacaggatagccatggccgacgtcgatacaagcgtcttggctggctcgtcgttcaatgttgccacagataaagtgggaggtgaagttgacgaagagcccagcaggcgattagtcatttgcacagccttgacgcacatgacttgacgccacattatgaacatccctccatcaacctcacctccccttacatcatcctttccttcagccatcatctctctggccaggatctcttcagccaccgatccatcaggaggacctagcaatgtccattcagtcaatccttataccggcaacacagacacgccagtctcctgcacctcacaccgtttatcaggttcgtatcaccaccggcgtcagatcgtgggacgtctacagaaggtactcagactttgaaagtctcgtccaagaactccggagtgagaccggtaaagatgttgacggcgaaaagatccctcccaagcgagtgtggagcctcaagaagagtataaacgatcaaaaggtctgtgcttgggaattgccttgaagacctgcttcgttgcttttggtattcaccggttgaacgtgccctccttttgcaaaacaaacatagctgatcgaagaacgacgggtcgggctcgagtcttaccttcgtcatattctctcccacaggaatcctgtttggcgaacatcccacgcgtttcttgactttctctccgctcctcctcttccttctgccaactcgtcacattctaaagctaatggacccgacccatcagcgactcctggctcttcactcgcccccgccccttcgtcgatcacgacatcacccgcgtggctagccgaacatgtcacgctatcctcgctcgttcgcaccatccgatcgtcactgtccaaacgagacgcccttctccaatcaggaaatccatccggaggtcacattgcccatatacaagccaagaaggacctgaccgtcttggtgaacaggctcagcactctcgttgtctcactcgatatcgtcgcaaagacagagcgattaggagatggtgagattaaacgacgggccgagcttctaggaagactacaggatgaatgcttgacattggggaaagcagttgagaacgcgaggaaaccaccggtaattggcaatggattccaagcaggctctctcagctccggcgcaacaggccgtcaagatgatttggtcgacggtgagagtaggagagcacttctcggaccgggcccatcagctgtgaagacagtgagaacactaggtggagcgccgccaggccaagaaacagaagagaccagaccgctggatgggggtgggttgatgcatcttcagcaaacgaagatcaaccaacaggactccatgctgacccaactttcggtaggttttcttttgccatctctactctgtacgtttggtgtgttcattaaaggcgctcatcgatcacatctctatcgatagtcaatattacaacgccaacgagttattggagaagccatcgggcaagagatcacagagcaaaatgagttgctcgacaagctggattcagaagtggatgtaacaggagcaaagttgggcaaggcgaaacgaacaatggtctgtctttcctctctccctattctcctgtgaccaacagtgaaaatagttttaacctcatactttgtcgtttctcgatttggattgatgcatgtaaacatcttctcagaatcgactaaactagttatctgtcaccaccaactttgtctcggctcttcgttctcctttcaaccatcattctgcgctatcatcccttctcgtttcatcttccaatccttttctttcaacttttggttccttgttctttgattcttgatacgacttttatgatactcacatacacatatacacatacgtacacaaatatacacccttttcctactgcttgttgatgtgcttggtgtttcaaccttctgatttatccacggaggatccatccactctacttgaccttctctctgccgtttaatctatttcttactcctctcttgccctttgttttgatcatacagtgctccctctccttctttccctctctcggtcactcgttgggcgtgcgcgaaagagacagatggaagaaatcaacacatctcgagccaagattaggctcaagcatcataatcatcatcgacctcttctaaccttctcttcactcctccagttcctgccgtacccagtctggatgccgacccgttctgctgagagtcatcttccatatcaacctcgtcttccaagtcaaggtcctgatctctggcagcagaaccagacgggaggtgatgtgtgttgttttcagctagaaggtcctggtctgatgtaggtgacgaagatcgcgaccgagacgacgtgggtgatgaaggagcagaggaagaatgtgaatgggatgaagacgacgagtgggaatctgaagaaggggatgaggggggtggatatcctggcggcggctgttcgcgttttattatgcaggaagagaacacggtcgtttcggatcgagcaggatacgttcaagcaaggtcagaccgagagaaagcagacaggtagcatcaaaagcagaaacaacaagagtaaaagcgcgggaagacgaactttgttagggatcaggttgaaattaggagcagtgaacagatggcgcgggtgagggagtcggatgaatgctgtttctggaacaggaggcaaaggatgagagtttaacgattgagctatcggggtgaggaacttgcgtatcccattttttcgtttgaatagaaagcaaagagagcaggacgtcagtatgagatggtcttgagaagagagaaggaaagaagagggattgagaagataggacgcacatcgcgttcgcctccctctctaaatccatagttgacctttccctggacggccaacgagacgtcgtcgacgtcaagtttgcctcctttaccagaatgctctgagaacgtcaacgcatccagtaggacatccgtcgtataaccttaggatataccagtatacatagagagaaaatcggtcagatccttcaggcgttcgtagaacgaagtagaagcaaagacgaacgatgtgcaaattccatcagctggagcaacacttgaggagtagtatcctcaattccctgtttagcgcgttcagagacaagcaaggagatgttccatcagatctacacacaccttctgaacaagagccagtcatcagagaaggtcaggacaacatactttggaggcgagaataagagcgataatccttgcatccctcggaagatgctcaaaggagaaattatcgtctgatgctcctgatgcttgttgagatacccctgatgctggtgctgatgccgaagttggacctgccgaagaagaagctatcggttgaacgggtcgagacattgttggatttgacggtgctgatggaagttgaaggttcaaggtgattgatcgagactagaaacagcttgtagtcggttcattacaaatgcgcagttggttcattaggaaattcatctggccttcctccacgcatagatcgatccttccatcaacactcccatcaaccgtccatcatcatcaacacccttcctgctattctgatactatggcttccctaggtgcgtgttgtttgtgcccatgatcccggtctgtggaggaaacttgcttgaaagacactgacctgagagatttatcgaacagtggccatcttggacctcaaaggcaaggttagtccagtcgtcttttgctttcatttcgttaggtctatgttctttgagaaacggtcgcttatccgtcatctcctgttcgttcaacgttgcactccagtctctcattcaaaggtcctaccgggacgatgtccctgcttcccagatcgagcgtttcctgcctttgattctcgatatggaggaggaaggtgtccaggtgacgccttgtttcacaagcgatggaatcaactttatgcatattcggatcagtaatttgtatagtatgttcacccattctcgtctgaactgagcttatcagaagtagccaaagcagaagaggaaagctgggtttgtgttttcgagctcatatcctggtatcttctctagtcctagccctctcgaatcgaaattcaaatgcttctgagattatcatcttccttcatcgcctggcttccgtcctgaccgaatacttcaaagagctcgaggaagaatccatcagggataacttcgtgatcgtctatgagcttttggatgagatgatggatttcgggtttccccagacgacagagtcgaagatccttcaagagtgcgtcccttctatttctctcttctttcttaagcgtcgggccaatatgttgagcgtatacgggcgagtgatgttgatacacgactttttatgatagatacattacccaagaatcacacaagctggaagctcaagttcgaccgcctatggcagtcaccaatgcggtctcttggcgatcagaaggaattcgttatcgaaagaacgaggtcttcctcgacgtgattgaatccgtcaacctactcgtacgtctcggtcatctcctctccaagtttgcccatcaattggagacctataccttacgtggaacaatgtgtgaacgtcaaattctcttcttatctggttaggtaaacgcgaatggagatgtcattagatcagaaatcttaggaagtgtaaagatgaagtgttatctctcgggtatgccagagctgaggcttggcttgaacgacaaagtaatgttcgagagtacgggccgcagtaagttctttcctcgtcgagttcttgttcttccttctctacctgatcactcaaacttttgaatataatctctatcttgatgttttgtagcatcaagaggaaagtcaatcgagatggaagatgtcaagtttcatcaatgcgtcagattagccagattcgaaaatgatcgcacgatctcatttatcccgccggacggagagttcgagttgatgagctaccggctgaacaccccggtgaagcctctcgtctgggtcgaaggttagcttttacttctcccctctggcagcatctcgatctatgctcttcctcattgtctaacgcgttgttcttttctacatctacagctgcggtggagaaccacagagggtcaagggtcgagtacatcgttaaggttcgagctcagttcaaacgccggagtacagcaaataatgtagagatttatgtgcctgtaccggacgatgcagacagtccaaagtttagagtatgttcttgatactctccttgacttttccttctgatgaagcttcttcatctaaccacatcctttcaaaccctcttactcatacactataacgaacaggctgcaacgggctcggtccactatgcacccgagaaagcgtgtttcgtgtggaagatcaagacgttggccggtggaaaagactacttgatgcgcgctcatttcggtcttccttccgtcaagactggtgcgtcttctcctttttctattctttgtggattctcagatacctcggaaaacactaagcttgccccatacgccttcttacaacgagaacagaggaagcacccgttagaattccgatctctgtcaagtttgagattccatatttcaccgtatcgggtattcaggtcaggtacctcaagatcgtagagaagagcggataccaagctttgccttgggttcgggtaagtaccctgcttctgttctatatccttgattttgagcgaatgtgtgtggactcattaaaaaatcactttgggttgataacatgttgggtagtatataacgcaacacggagatgactactcccttcgaacagtacgttcctccttccttctgtttctctcgcttttggaattctagatctgacatttgaaacaaaaacacgaaccgatcaacagttatccgactcgaagcaaaactccatcatcactcctctctaacgatctgtctaccttcctgtcttttttctttcacacccgttctctttgttcactctttttagaacaacattttctggttcttctctcgagggcttctctttaccgtcaccccaatccctctttttcctcttggcataccggagagtttgatcatcctttctctgatgaaattcctctattgaattaaaatattcaatagatggcattaaactattaaaactggtaatctagctctcagactactgtttcctcaccccttaaatccacacacatataagagacataacgagacgcaaacacgaatacaaattaaacaaataatacatcacgacgtctcggcaaccgaggcaatcttccctagcaactctctaaggccgaccagaagagggaaaagagagcccaagatgaatggatagatggacagacgagtacatgaacgatggtattatgtatatatagaaaggtcagtctagaagttacaaatggcagaaatcttctgtgtagaggtgaatctaattgcacttacgtgtagcgacgtttgagctgctcaggatcatcataagcggagaaggaacaatacaatggagcaagggttcttgaataaaagtaccatgctaggattgactagtgtagtgacgagtctgctcaccttctgcgccctcgcttcgttgaccgaggcgaacggtatcaaactcatacaagcttcgagccatctcttagccctttcgagcattgatgtgctggacgaagaacaatatcgtaccaacacgaagtcaagttttccaatcgttagcttctcaagaacatgcggcgagtatagactcttcttaaatcgactttacacataatcttcatttcctttgttccaggcaacggcaagcaactagccgaatcccaacagaaaacgcaggaagattagaatcacgatgcgtcatgactaccaaagcgaaagccagatagactcacccattcaacctcatcctccggatactttcatcaggatttccaaaagtcaaacttcgtacgttagtatggcatctgatatgtagatcacctgtttatactcaccgattgagacaaacttcctgcattggctttcaaaagatcaattccttgatttaatagacctgtttccattgattagttcgaatcttatcagaccgactaaactatcaatcagttcaaaagataaaggaggcgcaacggcttactcaaggattcttcaatgtcactcgctcttcctcgggcatttagaatgctaattaatgtccgcaaccatctagacagcttgtcaagggaagggattaaatccaaatccaagctactgaagagaatcctctgtcaaaataaaaaccaagcatgactcaggtcttggttgtgttgaagggaactagatactgcctcacacgtagtattgtatagacgactaagccgttccagatgcagaacatcagttatcagtccagaatcagagtggagagtagaaaatgagttaacacaactataaaacttaccgtcagtaggacatccatcctgcctccatatgatgttggcaaggctatatgtcaccaaagatcagtagtaaactgtaagtcatcaacaaaacggcgccgtatcaagcatgcacttacgattcgaacagctgaacagatgcctctttcttcgccataaattcctggattaaaatgcatagcagtgtattctatcgtcagctattgatcaaatcgatctaaagtgaatgaggccttacttcaactatagtttctgccttcttccattcttgcagcgcacaggaggcttcgacctagagagtgaagtaggttagccctttgtacattacgtactctgaacaacgctgatactaacctgaaaggctatcaaaaccatgatcatctctttaatcttgtcagacctaggggagtcactctgaggatccacaacttgtcggcatgtcttgagacaagtttcaatgttacgtccaagaatctgtagagaggatttctgtttcaatttgctcaaaacaaagaacagattaaacctctcagtttcatgcgttcataaggtaaatagtgaattgattctcaccttggcttccccatcttgttctcttgcctccagcactaacacacagaaacaagagctcaattcacccgtcatcaggaaaaggattcacaagcaagacagagacttacttcttcctgagcaggccgcaaagctcgcaagacagttgttaaaaggaagatctggatccgtcacaaaggaaactttttgaaagatatccatcatctgtgaatacgaaattcaattgaaaccattgtcagttgtgtttatcagaagttagcggagaagacaccatcttttactcacagaacttgatagctcaaacatcttgtaaacacacgactcagaccagccctgttgacatcctgtgacggcagcgttatatgctaaagtcgttatgaagtattagccactgcttcaacatcatcacacttgcacgcacgtaccctgcttgtaaagccaactgatctctttctcagcttgggaagcctcctgacttgcgacggcctcaatcgatttttctagaccagcttcaaagtgtcgcagaagagtgttttctagaccaagtcggttggcgctatataccaaacgctgccaaaggtcagtgaagagcgcaaagatgtaaactcagaccttcctactaaaactcactcatcaccaacttccgttggaagattttccaattgttttagtgataggcgcactagacatctacagaagttgtgcatgaatggcaagtgagtatg

SEQ ID NO: 2660 - DNA, 10237 bp, Xanthophyllomyces dendrorhous
agtatgagtactaatcaaaaatgacatgtatggaggtcaatgcctaccgtatgagtacaaaaacggttgatttttccgcctctggaaaggttcccgtttggatggcatccagtaacgtcgaaagagaaatttctagcaacctagatagagacgcatcgctcgcaagttgtctaaactcttaaaggttagtcatggctatttgatgtaaatggactgttttacagacacttacgttgtgagcatgatcatttttccactattatcttgacatctagacatgtccttgatggcacccacagcttgaaataattagcgagaaaatagtagtaatgagaacattagcctaaggtagacagatcagtctttggaatttaggcacaccttcatcttccatacctattccgttatgtgtaaaaggagaaatgaatatcacaaattagaatcgatctagtgatacttgagcataattcgtgcacactcgctctgattgagataaagcaagaaccgaagatagtgggtagcggcttcttcccaaggcgatttacggatgtgttccatagccctctcgtaatcttcaaggcgaatatagcacatagcgatcttcctaataatcaaaacgtcaagcgtgagatttcaagagtggagttgtctttgctgttgaatgacacgaacttgtgaagcctgtttgatcagagcaatttgataaaatggatgagtgcactgtcaaccatctcagtacagaccgacacatactttggaacactttcccctagcacctttaatgccggatgcgttaatagtagatctaaggttttcccgatattgatagtacagtttatgttagtcagtatagaacttcagatagagcctcaaatacttacaaaatgcaatcgcatcatgtaggccccccactgcagcatagcgagcattgcctatttgccagacgagctgcataaagggaaccgcgtcagcagcatcctatcaaccacaagacacagcagtcacttacagtttggagagcagcgcaaggagtgctatctaactcaaaggaagtttgctcatcaatcatatcgaaagaggacctgatttctctgatcgatttatcaatatcaggctcgcctcgtgcaaaaagagctatggagagaagcactttgatgatggatgcgctcaaatcaggtctatcatcttcatcggcttgagcgtaggttagcagcagaacggaaagagtatgacgaaggactgagtaggagacattccgactgtatttgagtgaaacaaaggatcagtcatgtcaaatcgttccaaagataagtaattgcgtttctcagactgacctgatgcccagctttgaatgcatagtatctcgaatcaaggagtccacggtgcttccaaacagattacctgcattgatcacagccctgaaagctatgccacgagagatgttcttgatcagtccttgctgcaaatacaataaatttgtcgagagtagacctagccaaccttcgagcaactgagggtctgacgcaggcctctgcttaacgcagtgtagtttgagccatttgaactgctgagagcgcgggcatttctgttcaaggtaaggttaatcgtcagtgaaggccatatcaaagaggagtacaagatacgcacaagagcggtatcatctgccaaaagttcatccagagaagcctctgctcgttccatgttctctggtctgagactggaagatatgatgtacgcttgggctttggttcatttgaaagattattaggtacttcagtatcattaacatagtctgacagatgccactgaccaagattgaaaagaatatctcgctatataaccaagaagcgccaaagagcagtcagaaacatcatcctcattgctctgtttagttaggatcataccttaaccgtttccaccttctctgttcggcccttcaacaagctccagtgatttccttcagtcagacgcaggccaagagaaagccattccacagcagtcatggcattcttagagatctccaagtctccatcgttatgctcttttgaagaagtggtgagtgtatgaccgatgcgttgaataagatgcagtacagcatgtgtctatcatatacatgtccggagaatattgagccgaccagtctccatggttcgattgcttcagaacatgagcgaaacagaacttacttccttttcagagagcaaggataatctctgttcgtcggcagctttgccgatcataaagaacgccggctcaagcttatcttgacggaacatctgcgcatattgttccttgataggtcatgaaccgactcagaccgacaaccgatgaaagaaatagaattacacgaacagattctgcccgagacaagtagtacattgttgttgctcgagctctttctttcttttcactatccacattggaagctggagccttggacagttgttcttcgaactgaagaagaaaagatccttgattcagttatgtgcacgcgtgtgcagataattacaaagagtgaccagaatctaccgtagcgcattgagtcaaaacacgatcgacttcttgattatgcaatgtcgttactgaaacgaacagagaaacggtaatcgagaggctcgaaatcagctgttaattacgaatatgcaggtccacgaaggctcatcaagaatagagagagcatacacaatagcgctgatgccgctttgcttcctagcatgagcaagcgggtaagacctggttgtatgcgcatcgttatcagcagccgtaggactctgaaaaggtggactggctgtagacagaaacgcttaccaccagcatctagctcaggctcgtaggtcagaacgattagctgaaaagcagcaagtcggactaaattcgttttttcagaacgcacataagcagtgtcagcaaaggggcttagtgcttctctggtctgcgatcaaccactgacccattccatacaactcgtttgtatctgatttaggatctgtttgatgatctaaatctaacaacagctgactgcttctgttccacatagccactccatcggtatccagtagatcctggtctgccgcagggattggggcagaacgcgactgtgcgattgcggccgcaagattagaagcctggaaagtcaaagtcgtcaaaagatgttgaagatcggaggacaccggaattgaaggccgagtagcctggagaagtggtttgatgctggtgataagatctaagaaagagagaagattgatcgtgatagagatgacaggaaaggaattgatactgagagacctcgtttcacgaatggttcctcgaagtggactaaacatcgacatacctttgatagaaaccagaggatcggatgggtctacagccttccgtttcttgagagaagccatggcagaagagactagtaagttgatcaatgtggttgaggtcaaggttaggtgacaggttaaacgagcaaggcgaagcatgtcaatccattgatcaccgccggaagtgagcaaaaccatcagagaagaaaaagcatcttcttgacacactcagtcgaacgaaaaaaagcaatcatacttagtacttgttatctagatgtggagcacaaggtgatcaaagccgcatgtcatagagattcattccacttgctccttcgaagctagtcccgaacatggcttcctcaacagctacctctcctacttgttcttctgttcgctctacgtcctcgtgttcctctttatccttttcctgaagcttgccttctttgataaatctaaccagtcggctctctaacctgcccaacgtggtcatcaagtcctcctcctctactcccagagtaatccccgcctccctaacgaccagctcgagctcatccgggacctggcctaacacatccctcgacgcatatatcgaatagacttctccaggaatcagacaggtttcgaaccgatgcactgctagaggatgaagaggtgactggggtttcgtcacgggcaaggcgtcgatcggctgagctgggccagatacacgatgatgactcggccagacagcctctaatggaggcggatcagaaggtgttggcggaggcggaaggaacgtcgaaagactagtatatgcgctcatcgtgtcatacgctgtatgaattgtgcagacaaacattcggatcgcagacaattttaataaaggcaagctctatgtgagaagagaaaagagggaggacgcacccttcggtcgagacattccatcctgaagcatattttgacataggtctaggtatcgatccaagtcttcttctaccagttcgagaggatcacttggaagaccaatgtacacggtcaaatcataagctcacgaacagaggcgtatgaagaatactcatgatgaactcacaacttcgtcgatgccaacgtggccttatcgaatctattttttctttgttcatgttgagttcttaactgggtcaaccattccgacttaggcagaagaatgactcctggatcgtttgcgttcaccacaagtctatacatatcaaaatacgagatgatcagaatgagtgcagttataaaatgagtttgcatcaaacatcagaacaaatacagtacgagaggacccacctttctattccatctagtccgtaagccatcttgaggacgatcaaacaacaagacatgactgctatttcaggcatagcctcgtcacccaacatccgtcgttgtctctcgagaggttcttctgacatgtccgattgagcatgtaggaaagcttctgccggagtaattaaaagaggatgaagtgccaaggaaattctcagctgtcgaaggagattgacgacggtaggatagacaacagctaatcaggtgaacccaagaacagagagatatcaataaaatgaccaaggctagatgaatttccttggagaaagactaacgtgaacatccaagcgacctaaggcacttccatattattggtggcgcgttcattggagggaatctgatctcaaactttctctggagctgcaaggctaacttggtcgtattcttgtacagtccagacgatgtgggcgcccacttcaaggtaattaaatggacgggaatgaaacgatcaaatgatgaatatttgatgtcaaaaaggtcaaccaaagcgaacttacaggtggggtcagcatcttgtaaagatatctgttcaaatgcggccggatagaagagggaatatgtgtagaatacacaaatgcaaggtagggaatctcatgtgaatttgtcaaactgttctcgataggacaacaacccccgaagagaacaacgtcagtccatgtcaggtcgggcagaaaattacagttcctccctcgagaaaaatgtttcaacttacttgataaattcatgaaacagcaccggcacgtttaaactccaacagcccaacaccacgattgataaacaatccaacatcgagagtctgtcactctgtcctagttctgtgctatacgttgggccttcgccagctttcttccttcttctccggcccttggtctcggattcttttccagactctccctttttggttttcgttctagcctctgatgcaatatgagactcatcctcactcgacgcgtcagaggactctgagggcgcgtggattcgctcaagttctctgatggtctcttcgcgttgctcacgactttcctcatctaattctgattccgaagaggacgagtcagacgagtttgatgacgtagatgaggatgaggaaggttcggtatcggaatcgggagagacaggtgagcgttttgccgaaggaggtttgcttggtatttgtgacaagggttgagtagagctcggtggcgcttcaaaatcgtcttctgtctgacccggtggaggaggtagtttgtagaagagtagacataacgagaacaggtctcttacgatcatctgtagaggagggaaggcaatgacacaagcataatgttcagacgagacgtgtcaatcgtcgctgatttctcgaacgaaaacgagaagactgacctcgaactccggcggcaagtcccatatacgcgtgagggctttgacttgagttcgcacaaggatttgtaaacactcataatacaggtattctgcctgatctccccagtagactattcgatgatcatgagtccagacaagacttcagatcagtaaggatggatgatgattaggaagccaggtgaacgggaacggaccagcatgcttcgttctatctttcctcaacctgtttttctttgttcgtctatgtctagccacaggcattccgcctccttctgctgtttccatcgtttcctgcctgtaagactacaaaaatacgttgtaatcatgacagagttaagcctggtctatttttgaagaacgaagcttgagcaagaacacgaaccatgttgatgtggccttcttcacaaacccggataccacctggacctctcctccattttgtggatccgcattgggagcaagctttggccatgggaaactgtccgtgaagaaaggtgtgttgagtgatcggtgtatatgtccaaaaagaaaaaggatatgaactgattcgagccgagccggttagtcaccgtctgctagagatatgatgtcgtctgcccaggaagacattaaaagatccaaatcatcaacaacttcccatccaaaatgtcaagcacagatcctttcctagcgccagaggtgctcctagagcatttgcaaacgataacgatattagaatccatgtttccatcagaaataacgcttccatcgtcgttcagcgtgctgtcagaccttgtacctatactcgaatctaataatccggtcctccctccgtcgacacctcttccagcagactttcgattgatcctctcgctcgatatcggtagctctcctcctagacttttagaacttgagatggtgctgcctctacgccggtcgttcgattcactcacatcatcaccaagaccgccgtcgagaatcgttctaaaattgccaacgtatctgtctagatctcagtatgccgaattatgtacatctccgttgttagaactccctccggaggcacccatagaagacgaatttatcgaccgactacttctcctggtagatcatctccgagaaacaataccaacattgatctcagagaacgaatcccagagggtccatcgtgaatcctcttcacaggagtccgagttcaatcagaaggagcttgacagagtctggttttggttacctagtttatcaacgaaggaaaagagaaacgatattgttcgcatggcaccttcctggaatctcaccggtttcgttctcgcaggttcgttttgcttcattctttgatcagcgtagattgtcttttattttattcttaaagaacgtgtttctctcgaacaggtaaaccagggattctctgtctagaaggaaactcgaaagctatagattcctacatgggatggatcaaatctgtctcatggtccgacattcctgcttttcagagtgcgtttcaaagcttctttcattcgtcttttccatgtgtgcatcctctgagagaaccgcgcacgattgagagtctgatgataaccatttaatggcgcatttacacatccaatcattcatattcttcacagaaagtatgttgttctctatattccaaggaaaacccttcttttctgttctttgaatattctctctcatacctgttcgctgctccattctacccccttgcgcgtcgactggactgactccgtcgattgcagaaatcaccgaacgtcatcgaactccactcataacacaccgtttgttccaagatatggtcgaaataaccgatctaatcgagcacagaggctaccacggaaaccggggtgagatggggcaggtccggacatggatcgaggaccggggtgtgggtgctgacgttttaggaaaagtcttgaatctggggtgatgaaatagaagcgataaacgaccgtcgttggctaaggggtgacgagaccggtttcattgatgttgacagggcatgattgagcagcaagggagttggggttggcatcagacgcaacacgatgatcgtgcaggcgttcagatgacggacgagctctaaaaagaaaagaaaagagagaacaagagaagcaaacgatggaagccgaagccaaactcctgcttaaactctcttctgcgccaaaactccctcagcaacgacacaagcatctcttacgccctgcctcctcatgaacagatcctgcaggcttctctgaacttggtctgagaattcattcaatgaaggtggcaacactggggctttttgatcgacagtggacatggaagaagatagaggatcttgagtcgacgttgcagcaggagggggaggagcgaaaggcaaagccccgagaccggtagttgatagtaagcgaaggagatccgttagttgagtagataatgctctgagagaatctgtcgtatgtttcacatgaagagtcagaaaaggaagggtttaactgattggtatcagtcaattcaaagggaaagatagatttaccttgttgttttgacccgttttgaccgtcggcattgactctgtcattaacatcgacagctgattccctattgattcattaatcaaacccaaacgacgaaccgagtcaaccacaagccgttgtgtaagcttaggaagaagtatcatcagaagttgattaaaagagaaaggaatacatacaattcatcaaaaaaagcattgacgtgtgcctctaatgccggtaagtgattcatcgtaatcagctcgatttgactgtcaattggttgatcaagtaattgatccattgagtcagtagatcgctcgaaccatactccaactgtcaaaggaagccgataggggcgaaacgagcaagagaagaaagcttaggcaagatggacagttcgcaagagaaagccaaaaaagcaaacgaaaggaaaggaaaggagaacagagctcgaagaaagcggagaggagaaaagacggaggacgaagagaacaaaccgagtgatttccaacggaggaggtagtactccaatgcccatcactcctcctccacccattcccatgctcattcctgttccccccaaccctgctcctggagtcgaggccgaaccagacccgaatggatggtttgtgagagagagggaaagagccggtgaagggactgattggggatgaggttgagatcgagcttgattttgcatgtgtgtgtgtatgtgtgttggtactcgtgatcaggattcagaaatgaatacgagagtcaagagttaagagtcgaaagtcgagatgttgatgtcgatgtcaagatattgatgtcacgtgttattgccggatcttctactacgcgccctgctctatgtgggttacccacaaaatctcattacactgttatccgactcaaccattcaatacagcgcagcgaacgcatcccgaaagcgagcaagcaaacaacacgatacacatgcaagatcgtaaagagagtgagcttgaaataaaagagaagtcgaagaagaagaagaaagacagacgaaagaagaaatcgaaaagttgttgaaagacgtcaaaagagtctaacaagagagaagaaagatagagtcctggaggatgttataaaaatgtccggaggggatagacacaggaaaccagaaaagtcgaacgagacgtacgaaggaaggtagaacaagaaagaaagtatagactgttgagtactagtacaaggcgcgaaggctgactgaaagagggatgtaaagagacaaggaagacgataccgaaaagaaccggaaagaaaaggaaatgacaatgttgatgttaatgcaattgatggggggacgtatgtatagagtataaaatccaaagaagaaaagaaaagaagtacaaaagccgcccctttgttcacctgacaggccggcctagttcaggcacccctatccatccatgtgccccgttctcatctcctgcttcactgcccgacgaggaagctggtgaaaattcttctgaaccctcctgttggggccgggctggttctccgtcaagcggatatctcgcctggtctgccgtcgagagcggcggggttaacggcggtctgggcgctcgcttcgagagcggtacccaagtttttgcagccttcgaagagtgaatcataatcgaggtaaggcccggtccatttggggtaaacctggaagcggtcaggttcgagggccgtgacggtccggccgggatagtgataacctcggtaggacgggca

SEQ ID NO: 2661 - DNA, 2477 bp, Xanthophyllomyces dendrorhous
gtcgaatccggaggggtcggcagcgtgtcggcatcggcgtcagtgatggtggtcgtatcagcgtctgtgcacgtggcggtatcaaccgcgatagagctagccgcatcgttaacgacggacagaacatgaatgttgccgttgttgtctgcaggctgggcattaggtggccggtaggattccctagaggtgacctcaaaccctcgttgggtcacagtctttgccgtcgttgttgaggtggccggcggagccgcttgtgagaacatgtcggactctcgcctattgagagtgagaggtgcgtcgctagcccgtctagccctacctttgatactctcaccaacactgcctgcgttgcttccaccgcctagactaaagaatgaaccaggcgagccaaagatcgaccgcctcctaccgctcgttgaaccgtttgccgttcctcttctaattccgaccgtgttatcgacagagtcactcgcttggccgtccattctgatggacaccggtgcggggaggtcagttcgtaaacttggcgagtttcggccggttcctggtttccaccaaggatgcttactcggactggtcgagccagttcgttctggtgcggtaggcgcctgtttcagacggccggtctgtatatttacaggggcctcaacaggggtctcagcagcaatgtttagatcacgggacctaggggaccgaccaagaagctcatttcggagtggggatgagctgcgctctcgaaagacactggcaattggcatcctgtgggcagaaaaccgatgttggtcttcctgctcgcttggcgtgggcgtagtcgaggccgagccgttagcgatggagtaaacctgggatctttgcgactttggagacctcggaggaaattcttcgtccgagaaagacgaggctgagtctgaacggatcgagacggatgagtacgatgccggaagagaggcgatcggtagaggagaaacagaaaggggtgggttcgaaagaggagatatcgtccgggagagaggaatctgcagctgactaggtgaggagacaggagcgtctgtaaagacggacggcggtggcggaggtgaagcagtggtcagggcggtatgcctgccttcttctgccgttggaccccactgaatagtcgtctttggggttcgagtatgttcggtcgtattcgtgaccactggttgggttgaaaagaatgacctctttcggttattaactgaggaggatgagtaggaagaagaagatgtgttggagagctgcttgatgagtccaagatccttttttgactcgttgcctttgccaagtccttttttctgctgcttctccgtcttcgagcgttcttttttgttagttgaggactctgcgaaaccggcaaagaagccagtccgttcttgccctgggctgacgcttcctcttcttacaaacaggccaaacttgccgccccttgggttgtctttcgagacgacggcaaggggaacgacgacctttggagaggctagagagacgggtgagacggtcgtcagtgaatccgtggcggttgacaggctgagcgggtagagggaggtcgagagtggcctggtgtattctgcgctaggcgatcgttgggcgagtgacctcacagtgggcacgttgtccgtccaggttgagctctagaaagaaagagtagcagtcagagagatatcagcgcgagacctcagagaaagagaaagaagagaagagggaagtcaaggagagagggagaaccctctgaacttaccctactttgggctggtctgatggatctgacaggagtggatacacgcgaacgatccgactcatcggtgctggaaagtctcctcttgggagatgtcagagacgttctggattctctaggaaggggtactgaaggggacgaaagaggcccgttctgtctcttcaggaagttccaaccgcctaagatctttggggatgagagcgaactgggctgaacctggtcgggaagggctatctgcggtaagacgagtgcggtaggaagatcgatcttccggcgcggaggctgtttccgtcggaacgaaggcttgcggatggtttgtgtgcgtatgggttgtgtcgggtgagagtgttctggtctaggttcacctggcggctgcggttcctggattggatttcgaccgatcaggataaacagctcggtctctggaagggactctgacgagaggttttctttgaaaagcgagcccaccgagccatgagacgtcatggtgggagtagcgtgagagcggcgtgtatgagagagtgtgtgtgtatgcgtgtgaatgagaatggaaagcgaaaagtcaacgacgggaagagatcaagatgggcctgtccgaggtggggaagtggggaaggggacacctgattcaggaacgagggacctaaagagtgtgggtatgagtgatgagttttgagttgtgaattgtgagtgttggtgtgcttatgggtgtgggtgtgggtgt

SEQ ID NO: 2662 - DNA, 19896 bp, Xanthophyllomyces dendrorhous
gggtgtgggtgtgggtgtgggtgtgggtgtgggtgtgggtgtagaaagagacaatccagatctactgtatatgtgaacgcaagagagagagggtgtgtggggatgaaagtgggagtgggagtggaaacagacgatgtctaccagagagacaagaaagcgacggaaacaaggagtcacaagaaaacgcacatgagagagatcgagaggaaagaagaagaacgtctagtgtctaggaagaaaaagaggggcgaaggctaggtgatgatcatgaaaatctatattaaacaaaaggggaaaaaaaaagaaaaaagggcccagaagtaggaacaaggtctagaacatttggtcgatcgatcgctcaactggactcaattgggctcaactggggtaaatcatgaatgatctgtatgaaccggcgtgaaccagcaggaaccagcaggaaccggcttaaattatcaggaaccataactgatcatcactcaaaccagcgctgaaattggttctacctctccgccgcgggtttttccgtgccgctcctcttccagaaggatgatataaaaagaagaaatagaatcgaaacaaaatacgaacaaataaacaaacaaataaacgaacaaacaaacagaagaattttggagcccttaaaattctatcttgtctttctatgtcttgttgaccataaacatatatgagtgtacgtctgtgaactatgcttctaaaggatcagatactcttcccatctatttagtctttgtcttaaagttggtcttcgttcaaatgtaaaacagtccacagtttcgttcgccgagtttacagttaactcaatcaccatttctatgctctttctctctttcttgctctcggacatttgtgcctttctttcccccgtcatatcttgctctactgtgctttgtcacaaagaaaagaagataacaaaaaaaggataaagagatcttatcgagcccaaaacgtagtgtgaaagtaagagttaaaagacgagtttatggcgagaggtcaaaagaaaggaggaaaaaaaggtacactgaaagatcaaagatcagaaatcaagagggatagagaacacaaggctcagagcgccgaggcatcataacaaagctgtctaatagtagtgaacctcctccttctctcgtcctcgctggaaaggaggctcggtacccttgacgtagatgtccgtccagaactcaacgttgatgtctggctgaggggaggcctttgcctcgaccacggcctggtcgacctcggccttggcgtccttgtcgatagccttcaaagtggcctcgtcggcaactccccactggtaaaaacattgcccataggccagtcggtcagtaaatctcctgaatcttaagaccgatttatcaaggcaagtaaaagaagaaaaaaaaaggacccacctcgatgatgttcttcttgagtccgttgatgggatcctgggtggatcgcattcgctggacctcgtctcgggttcggtaggtggttccagggtcggacatggagtgaccaccatatcggtaggtgacgaactcgcaaaggattgggccctttccatccgcgcaccactgcttcacgaacttggaagcctggtgacaggcaagaatgtccatagcgttcacctgaataccggcaatgacatctcctcgcttgaagtactcggtgttcatagacgatcgctcagcagacgttcccattccgtacttgttgttctcgcacgtgaacaccaccgggaggttccagagcttggcctattgaaaaccattaacaatttctcaacgcgctgttagcttgtcttgctgctaaagccaaatcaattagcagaagggaaaccaagaacccaccatgttgtaagcctcgaagacctggccctggttggaagcaccatctccgtacatggcgaaagtgcacttcttctgacccaagtacttctgggcaaatgcaagaccggctccgacgggaacctgggctccgacgataccgtttcctccgaagaacgaaggagtgaaaatgtgcatagatcctcccttgcccttagacataccgtcctttcggcctaagttgcatgatatcgttgaactgatagtcaatacatgcagagagcaacccaaaaaaaaaagattctgtacttaccgagaagctcggcaataactcccttcacggttcctcctcggaggacggcgaaggggtgacatcggtaagaggtgatgaccttgtcgtcaggatcaatggcagactccataccaacagacacggcctcctgtccgatcgtcaagtggcagaatcctcggatgagtttagccttgtacaaagtatcacaagcctgctccatctttcgcatcaaagtcatcttggtgtacatgtcgatcaacatgtcctttgtcaccgcgacagaggtcgaaggaggatcacatcggtatccgtggaagctgtattgatttcaagaaggaacataatgtaagtctcgcgttgtagactttgaagaatgagaagacgaaacatgaggaactaacgaatcggcatccaagttgatgttgaactattgtgatcgccaaggataaaaaaagttttgtctcgctcagaccaaaatcatctcttgatggaataaaacagccctcatgaaagcaactcaccacctcgtctcccttctcgggaacggtctgagcaggagttccagagtcggcagcagtctgaagagaccgagcaaagaggggctatatggtgaaggagaaaaagaggaagtcccgccgaaaacaaatacgcaggaggacgatcggagcaggtgcaaaagatcgggttttgatcccaacgaggttaaattcaaacaaaaagaagaagacaaaagtaaagaacatcgaaacgtttgtcagacatagttcattacagattagatatcaaacgatgggtcaaagaaagcaattttgaaggagaaacgagcggaaaagtagccagtgtggaaaacaaccggttggggaaagaggaagatcacttacaaccctggtggaagccctggtgagagggaaagcccgagagatgagagtcctagacatttcaaacacaaacgggagagagatgaggaaggtataagaaggaaaggaagaggaaaaagagatgggtggtgtcggacaaggagaaatggaaagaggaagcgaaaagatcaaaagtggggaggagagtgaaaacgaagcggaggttgcggaaatacgcgcagtaccgcatccccccacgacttttttctccctctctcttgccatgagactaggaattattgatgatactattagagaacttcctaatcagttttcttgttatcaggcgaactatacatctcgatctcttatccgtatcatctcctcttggttcatctctccatcgccacaggactcatccccgatggaatctatgatacccgtaggcagcctttttgtttttggtcatggtcgatgttttcttgacactgcttgaatctgatacgccttggctctcgatttctaatcgcgacagattaaactcgagccgtatgtcctgctcgctaaagggagcaaaggagcagccacagctaaatgcatcgaacgagctacatcagctgtaagtcatgatcacatcttagttccacattttgtcatctaaatcgtgatggagatttgacggaaacgctccttggacggacgagcaaacagccaggtgtctacgtattctcggaactgttcaatgtgcctagcgtacaacaagtcagtcggttcttgcaagcatcatgattgcgtcgttgcgtctgtctgatagttgagcttcctctcggatattccatgataaaccagctgaaagagagctcagagacggagccaagttggaaactgctccagttgtttgcatttggaacttggccagagtatcaaggtttgtactgagttcgagagctgatattttccaaagtggaggctatggactgatttcgtgtgaggaatttttgcacattctttctcttttcatagcaaacaagtcgatataccctatcttgttggatgctcaggcaaccaaactgaagcatctcaccgttgtatcgctctcaaaatccaaccgggtgggtgtttgatcggtgtaagggtcagatgtgtgtgatactgacagatatatacattctttcccctccagaccctaccttacacagtgcttctctcgtccctctcactttcctcgatcagagagcttgaggacctgctgatcgaagccatattccatggtctcgtcaaaggcaagatggatcagcaaaaggcgtgtttccacgtggatgactgtataggacgggatgttcaccctcaacagggaattgagaaactcagagatgaactcaagcaatggttagtctcttggtctgttatcgtctgacttgatatcattacccctagtactctgactgacttctgatttgtgcttgtccatactgtctagggcccaaacacaggcccggttaatcgacgagctcaccacgacgatcaccctagcccagtcgagcgcgaacgagcaccaatctcagttgttatcataccagattgcgagggatgaggcggtgtccaccagcatggaaactattccggatctgcttatgcaaggtcggaatagtacaggacaaggcatcagggctggcggagacaacgatccagtgtcagagacgcccgggaaaggaaagaccaaaaagtgagtgtgttctctgtggaacaagactgggtgtgattgcaacatcggaaaagatggaacctccacgctcaaccatgtctgcgtttcattgaccaggctgaacatgtcttctcaatctggatcaagccaccaacggaaacggaaccgagcctaggtctgagatattgattgtattattaaaaaaaccggattgtattatatcatatatatcatgtgagaacatagtgagacctctaaattccttggcagcatacaatgatgatgatgatgtaaaacaagcggggttagaaaccgcggaagagagagtaaaggtagaaaagaagaaatagggccgaactgcgcaaatggtgagtgacctgctggtcgatcgattttcctattcttttttccttcatggtcatcctctccacaacacatttacaatactaccaccttcctttatatcgttcggcctgtcgaccaattccttacagaagaaagcagttctcaaagaaacataaaaatcatagagtcaggcaaatccagagtcgaaagaaatcatcatgtcatcaggtgagtcttgctgagtttacgcaaagagttgtttgatattcagcgcgtgcgtccctccggaaattcgactgcattcgatttgccgcatgaagtgaaagaagagggtctgagggtcgcctcgtcagatccaaccaccctctttttttcttcttctggcttttcttctttcataactgagatagacgatggtctagaacagatctggttggattgcttcagtcggccagctctgatgaacagacaggcagaaaggacgagtagagcagaagatttacctttgtcggtcggtcggtctgtttttgcacccgacctgtctttcacacctaacggatcgtccttcacagtcgtttcctgcgtcgctcttctcaccttctgttctttccctctctgccctgttcttttcgttcgttgtttcttcttctgctatccaattctcatcttccactcaatcccaaaacctgttttcttgcctggattcgttcactcaaagtcacgaactaagaaagagaaaaggactctgttgctaacgtcatgtcttccttcgttacccttccatcgacatctgattcttcagcctctgcccctgcctcatccacttcggtaacgcccagtactgttgaaagttcttccacaacatcttccacaacatcttccacaacatcttcaacctctatccttccctcgtcctcttctacctctattgtctccgaatcgtcgacctctgtcgctccttcttcgacttcctccgtcatcagtacttcctcagcttccatcgcctcatcgtcctcggcatctgcctcgttaacgagcgtttcctcagactcggcatctgcagcagcatcttcgtccgcttccgactcgcttacgtccgtatcttcagcttcggctttggcgtctgcagccgcttcctcaacgtccgccgttgccagtagctcctcggcgcgagtgtcgacggtgtatgtgtatcctttgactctctgttcgagcaattcggctagctttctcggaatctgatagtatctctcccttgttcttctagctatgtcacctcaaccgactcatctggttcgacgtactccgttccatccagctcgaccatatctgatggtagctctggagcaaagtccaacttaggtgctatcgttggaggaacgtacgttcagacttttccgtctcagaatcctcaaacagatagctcgcatgttctttttatttttgtctcaacgaggtttctttctttctttttctttttgttcgaatcatctgtcgtttggtatcaataccactcacagcgtcggaggtgtaggtggtgcattgctcatcgcaatcgcgctctggttcttctgtcgccgacgaaaccgaaactcggatcaattcgatgaggccatgtgtaaggtttttttttcgctttgtctacataaaccttttgatgctcatcgtctgttttgacgtatacaaacagttgacccggatcgaggacgtcctgtaaatcatgatgacaacttggacctcaccgctgctcctgtggttgagccttatcagtacaacgggtctaacgccccagggccagagatggcccagactggaggccctgcatctggctatgctggatacggtggttatggtgatcacaacggttacaacgccgtcgacagccagtcaggtggttggcagccagaaggactcaacccggctatggctggtgtcggagcgggtgcggccgcgggagcgtactatggatcccagtacaactcatcaggctcacaggcgaacggtgtgtccagaggaccatcttcggtctcggctggttcgtcctctgccggagatggaagcctttccaccggtggcatcgccggtggaggtgtcatgtctgctgcagcggcgaaacgagcggaagcacagagggagcgaaacaggatgtacccagcatcaggatcggcagttgcgcctgagttgaacgaggcagatgagcagaactctggtcatggcgacaacgtggtggtacaccgttagtgtgctttttcttcaggttgcttcgagcccttgactctgctgaacgtgtctcatcttgctcttattgcggataccgcagaggatggaggccgaattgaagagcctgaacagcccgaagagatccctcctacgtatggatcaattgatgatgtgagtttcgtttgcttgtgtgctcgtcgtcaagtacttatgttgtttacgggcgatttctgactgttcttcatcgtttcaacatcgatgccttagtcccggaggtcgtagatatagatgctgaaacagcactcgtgttttcgatacatcctttcttcttcatcccgtcttgttttcgagacctgatattctctcctagctgtctcacttgctcgtctgtatgaattgcttctcccttcttttcgtcttttgtttttctcttgattttctttccttctttttgtctgttctcctttgcctgaagatgggttgtttgtatacgatccctgtcctctcttttacgtattccgccactcttttagtactcacaactagacgtgctctatctctcctggttacgttctattctctgtgaaagccttcagcccacctgttcatctaaattcgttctagtactcattccttttcttcttgactaccacggaccctgttgatataacctcgtctctctgtttctgtccctcttcttccttctatgatgacgctttcttctgttcaatcgtcgggcgagaccaaaaatcgctagtgtaaccaccatacttggttacgccactctgtaaggcgggactcaccgaaatcggtcgttcatcgctaatcaatctgctcttaaactaccaccccactatccctcaccttctacccttagctcatcttactcctccaatcgatcggtctctggttcaaatcccattcgttcatcaaccatggcttctcgaaagaaagttcttctcaaggtttgttttttgtcctttttgtccttgtcgttctttgtacaaagatgctagaataaaggtttggagaactgacgtaggtttcgctgcttggcggcgttcggtgtgtcatactttgttttaggtcatcatcctaggtgatagcgggtatggtcatctctcttttcttgattccttgttctcttttcatcttttggcgtgatactatccagtgtgacgtagaacgagataaagaacgaagagagaaaagttgctgattgttttttccatccacccatgtgctcatcgttgatctgtgtcttttaatctatccgtctatcggtctcgctttttgaacgtcttcctctttcacgtgtgattctatggatcgactcttcatccgcacaactcgaaccctgcatttgttccgacaattactctatcacgctctgtgtgtgtgtgtgtgtgtgtgtttggttgatgcttgatgatgtatagtgtgggtaagacgtccctcatgaaccaatacgtcaacaaacggttcagtaaccagtacaaggccactatcggtgccgacttgttagtgctcttcccatcatctgtcctattatgttctcgcctgtgtatgtgtgtatatttttgaagaactggaagactgaagagtcgatgactgtaaacagccttaccaaggaggtcgttgtcgatgacaggctcgtcaccatgcaggtttgtctcttccgcctccggccacacatccgtcaacttcagacttttaattcttacgctaaacatctgtattaaccctgtaaattcgatagctttgggataccgctggtcaagaaagattccagagcttgggtgttgcgttctaccgaggagccgattgctgtgtgctcgtgtacgatgtcaattcgacaaagagcttcgagacccttgacagttggcgagacgagttcttgattcaggtccgttcttttagtccagtgtggcttgtttcttgactctcttctgaacgtaactgatgttttctttttttttggggggatatcaaaaacaaacttggtaattcaggctagccctcacgaccctgacaatttcccttttgtgagttccttatcttacacatacccgagtgcgggctttgatcatcgttctcaccgttactctcctatctccgacgtgctccttatttcgtaggttcttctcggaaacaagattgatcaaggagagagtaaacgaactgtatgttccgtcctgtatcggacttgacgaaaacttacatcaaatctagtcgaccctgaccttttccatattattctgatgtcgcgtgccaataaaggtctcgcaaaaacgagcgatgacgtggtgtcaatccaagggaaacattccctatttcgagacctcggccaaggaagcgatcaatgtcgagcaggctttccagacgattgccaaaaacgcgcttcagcaggagaacgagattgagctgtgagtgataatgttgatcattcatgagggaaggatctccttctcattggtccaagcgtctccgagctagagtctgatcgttcttcttttctttatgcgatgcgacactagttacgctgattaccctgaccctataagaattgattcggacaactctcagaactacggttgcagttgttaattctatcgaatctataatacattgctctgtcctacttttctctccttctgagctttggtcttgcttctgcagatccttttgtcgtttctttgcgttgctcttttttcctcgtttctcttcttcatctataatcttctgtcctcggccttgttctcacgatcttttttctgtaatcctcttacctctcatccccgtccttcattcccgttcttatccttctactcgcttatttgaccgatgccatgtgaatgtatgtctgataataagagaagcagacagaatctggatgaacgtttgaatatgtctgcggatgtcttgtttgtgtgacgtcaggatgagttccgggcagcctcggaacaaagccctgcgaataagactctcatctcccggtcacatcaacccggtcgttctccctcccctaatccatctctccccaacgcaagcagcaaccgagggatacaaaaagcggacatctcatggtctttggcgttcgacttcgaacggtcatcttctttctattggtacaactcctcgcattcatctacaacccaatgtcggaagaatcagaaaacaacaccgccgatgtcgacgtcgctgtcgtcgatagagtagatgcctcaacgatccaaggaaaattcatgatgggctatcaaggatggttcttctgtggaggagatggagcgccggtagatccaggccaccatggttggattcattggattaaccagccgttggctaatgacggaaatgtatcgttcgatctgtggccttcgactagagagctcgacgacgacgagctctacgagtgagtccttccttcttgagttcttcttcctctgcttgttcatcgaataattttttttggtttgctcttgccttcttttgttgacgggttgactttttctcgggctttcttgaaagaattcctggtttgaccatcccggcggatcccaccgacccaacttctaccccccgtccggctcggttgttctcttcccggaaccccaagacggtcaacagacatttccgttggatgagagaatttgatttacccggtgtcttccttcaacgattccttggtgaagtcaacggaggtggctcgagaatggctttgagagatgaggttacacaaagagtcagagaggcggccgagaaggagggcagagtgtttgctaacatgtgggatcttagcggagtccctggcgacaagattgagcagagtaaggatcacccatgttctctcttcgtttgaacacttgttgtcatcagctgacatctcccttatcacagatatcaaggatgactggctgcatatggtaggattctgttcgttatgatcttgcgcacctcgccgctgaatattctgacaagtcgtttgtcggctgatcttgttagatcaatgatgaaaagatcctagagtcgccttcctatttgcatgaggtgtgtcgctttgactttaacgcgctctagattgaattctcgctcattcccttccgctggtgttatctaatctttaggacggacgtcccgtcattgccatctggggaatgggcttcgctgaccgaggactggatccagattcacttatccgaatgatccaatggctccgacaatcagtccccactggtgtctggatcatggccgaaactccaagtaggcattctgcacccgtgtctcgtccgagtaaatattccctcatgtagcctgagctgatgcaaaccatctctgaccgaacatggtgacagcctactggaaccgagcgatggaggatcaagatcctaacccagacttcgcaaaggtctggaaagaggtagatgccatctcgtgagtgtcaggtttcttcgctggtggctactcagttccattggatgagtttgagttgatttgctgtgttcgatttggatggttcagaccttgggctgtacgtatcacttcattctgtccgtgatatcccagaagacgaagagtcaatctgacagttttcaactttctaatcgttctgcaggttggtcggttcggtgatctggacggcgcagacggctaccatgaggataagacgatcagagatatggagatcatccagaatgaagatcaagacagacctggaggaccaagagactagtgcgtttggctatctttcgggcttcaaatgaatctttagagtgaatgtcgatcaataacgattttttttttcgttttttgctgtcgattcttctttgtttaaattcgtacagtattcccgtcgtcttccctggattctctgtgagtccccacttcttgtattatctcttgctccagcttcctgccgtacagaaggaaataggaggagacgataacttataaacatcatgacttattcgatatacagtggaaaaatcttcacggaggtcctctgaacgagatcagtcgacaaggcggtcgattcctctaccgtcagctttacaatacccatcagtcgaatgctagatgcatctacggagcgatgtgtacgtctgttcttatcttgcagcacttgaaaccacggttgatcctttaacatactccgtcaacctttccctttcgtgatatatatcatgcagttgatgaatatgacgaagcgacggctctcatgcctgcagaggtccataaatctagggtgccgaccgagagacccttcctgtcattggacgctgatggggacactgatatacccgacaactggtatctgtgggtggtattctctatcctttctttgctcttcgatatctgattgcgtcctgatcattcactcctcgtcatattcaaaaacaggcgtatctgtgcgctctcttcccgagctttgaagagtgggcaacaactcccagaagagttccctcgggacttcttgtttgggaaatctctgcgggaggcagcaagaactcatgatgagctatagagtagtcttgatactatctctcccaaacgttttttacatgggaaaaaaggatcaaaatactatccttttcaaactgaacatctcaaacatatagacgaatcgtattcaattgaacttgacttatgacgctacgggggttttcaaccgtttgactgcctttgtatatcgtactgctcgctgctttcactaagtgcttcagccttcgctcgagtagcccatgaaagtcgaaatgatataacaacgtaatcgcttgtgtgcaacagttagggttagcaacaagtttcccaagtgtctatgtacatatcgtttgttctcacatacagctcgtgatcacatatatgaagatttacattgaatgaatatccagatgctcgggtttctattttgactgataggagcttgtgttatttggtattgtaacgacaaagtcgatgctgtggaatggcaatgacaaattagtgttaatcaggtatgaaagttctgtgagcactgataaaaataaatgtggtcctcatgaaacttgcgcgctcttcggactgttcaatctcatgttacgatcacctggtttcagtaatgtgtgatgaggataccaatcgatgacacattacaagacagttcatgctatttggttatttttgtaccacgaaagatgccaaaataaaatataggaaggtaaatagggaagaaaaaaagaagaaagataaatcacatccagtctttaatgagatacaatctgacaagtgaacaggaagaggagcatgaaagagaaaggggtaggtctggattggggaagaggaaaaaaaggcaaaggataaggataaggggagtcacaatccttatcccgaccagctgcaagtcgtcgtcatctagcgacaaacgaaactgagaacaaaatacacaaactagaatatagtatcaaacagcaacaccaagaggggacaaagaagaaagaaccagtcttttgggaacgaggcactcaacacctcaatcgtttcacattcctactacctaagatatcgatcccgatcgactcactccctctcttgactgagctcacactcggctttcgctgcagtccgatgtctttcttctgacaagtatcgagtcccttgtcggctgaatcgacgagcgtcgtgttgttcgtgcgctcagaccgaggcgttgactcgctcaatgaccaccttggcgcttctatcctcttggatcccccaggggatctgaactgctcattcgttgggacagcagacgtggatgactttcgaggtgttgccatcaataacccctcattgtcgtcgtcatcatcatcatcatatgaagcgaaaacaggacgagcagacgtgcgggtcattgattgaagacggcttgagagcgataccgtcggtcgtcgaggagttgtctgaacagggaacagaagtcgaggtcgaggatttgaaggcggcgagtagtctggatgtgttatgggatgttctaccgagggagacggttgcgagtggttgtaatgtggattcgcaaatgtcgtttttgtacctcggctgaaaccatgagaatatagataccaagttgcaagatcagtatccctcgcgccaacttccgatgacaacgatagggatcgtgggagcagaagagtaattctaagacgtacaacacataaccaattgtctgcttttcgtgtgcctcgccgattctttgtcgcctcaaccaactactcttagatccaatatcactctcgttctcgcttccgctttcgctctcactctcatcctcgttcttcattatcataccgatacctttcaggaatggattggcttcatcccaaatcggtccctttttcgggtctgtgttcctgactaactgcttcctctcccgcgtcggcattgaccgcttgggtcgctggcttgactcggccggaggcgtccgtaaaggtatcaagggcggactcgaggcttgttgacgtgtcgcgtctggaaaaattcgacttgatgaagacggagagaacgtgaaatagtctgggatgtccaaggacgatgatgctataggaagagagtctgcgcttgcggtagagtccgcaggggagtataggggaggagtgaaggaggaggtgaggaggaacggattgtccagagaaacgggctttacacatgaacttgtatctcgtttggatcgaacaagccgagagaattctacaatctcgggaggagggcagaggccgttctcgagtgcaggagccagctcaaaggacatggtcggtcgatgggcagaacgggagacgcgtgttgcatttggtgaaaaggagggacgctctgtttctgggggtgtaggaggagaggatgatggataagaggcagagatttcggatcgtgaggagtgggcgaagagcctggatgcgttctttgttctggggggtgttggaaggagactgcccaaggataaagatgtgttggtcgttcatcagaaaggaacgaaataagatagacaaagaggcgatctgtacacacctggactttattcgactagtctcaaatccaatttgtttgttttgacaactgttatggggagcggattgataaaatgggttccttgatatctgtatggtctcgtctggcgaggttggaggggtagcactatggaaaggcatgtgtcggagaaaggtgacgtaggaagggtgaagtataggaacggaaggaaatttaacgggtagggataaagataaggacagatggaagagtaggaggagaggataatagaggaggtggcactggagattaaacaaacaaaaacagacgagaggaaagaaagaggtggatggatggatggaaaggtcaaggtaagaaggcgaaagcagagtaagaagtagaaatcagtcaacgatcttttataacgctatacatgataagatctaacacccatatgtagaataacatataaacccatgatgcaggttaacattaaactcacactgtcacataagcctaaccctaccaagccccgggatctcacttcgtttgcccagccagttcatccagaccgtcgtctatccatcacttatcaacagcccatcatgaagctcatcactcttgcttccacagctctcgcatttccactgttggctcaggctacactgaatatcaccggctcgctgatatacaacgagcatctcccaggtcagtgattcttgtttgcgtgacggatggtttcctcagttcagtccaatcgcttatgccttcattcttgtccggctcgtcttatctacaaagatcgacagagtctcgcaccgtccacggtgatctcactggattacggagaagccaccgcgtttttcctcgaggatgggtctttcatcttgtaagtctttccttctcttgttatcctctcgttgtgcactaagagcatgatgctaataacagtggtccatcatctcgattagcaaggacatcgagccaggatttcatgtactccaagttctttcgaagacacactcctttcctgaggtaaagttcctctctgtgggtcattgtacaccatggtattcattcacttcctgattataacgtcgacacttgaccctccttcactcaaacacatatagttgtccatcagtcttcctcctgcttccccaccctttgtagccccgtatgacccttctcggttacttgctttccatccctcctccccaccagaggttggatcattcccatttcctcttgaactatccgctcggtcaaggacaaactttaatgagcaacaggctgggttcgatctcaagggaatgtttaaaaacccgatgattctccttacggtaggtagcggacttatgatgtttgtccttcccaagatcatcgtcagtcctgtttctcttgtcatttctttctttgttttgagactgctatcaagactgataccaatctgttgggtttcattcccatattcgtagtcgaacctcgacccagacgccgtggaagaggcacaacgaacgctcaacccaggtcgaccatcgtcttcagctgtgtttacgaccacgaacccatcgttgacattatctcaaactcagatagataaactagcggtacctatcacacctgtggcacctgctaaacctggttcaatgaatgccggatctcgggcagggggaaaccgaaaaaggaaataaggaatcaagaacctacatttcagcgtcttgtcggggatttcaattgaagaacaggatcgttcattgtagactcggacgtatgatcaggattaggaagaccactgatgaataattcaagaatcaagaaccaaagtaaaagttaaaatcgagcattaaagaagagataggatttgtcaatgttcagacgtgaaaacccaagaaagaaagaaccgatcaaaaggttcaaaggtttggatgaaggaaagatatagaagaatgtatacagcgttcattcaaagactcgaggaaagaaaagggagcgacaaggaagagagacaacaataaagagcgatatggaagcagttgatgtgagaagagagaagaaggggctagcacagagagatgggaaaaatcagtgtttggtataaacgtcaagtatttcaagagaagaaaaaagaagagaaaggactgtgtaaaaggaagaagtggaaaagaagggacaagaaacgttcaaacgaagagagagaatagagaagaaaattgagtgattcggtgagaaacttagtttcctccgtaccatcccttcccacctctctgctgctgatgctgttgctgttgctgctgaggcataggagcagcgctgtatcctctcaccgaacctccacctctactcgacccactgcctacattcgcataataatccctcccaccataaccaccgacaagagatcccccaccgttcttgttaggggagtacatcgactgatcatcttcagcaaactccgggttgggcgtcgccagcaacgggtccttgacctcccagagagctcccttatcaccaacggcgaactcgagatcttccttagtgatcgagtcccaatactaaacagcaaatgtatatgactgagggttagttcctccgatccctctcgtttgttcaaagatagcgtgagaaagaaacaacagcctaccttgtagaccatcataacgctcaacagcatgcagagcacaaagatgaacaggccgtcaatgtagtgctcaaccgcatcgcagatagtcacagagaacacgaataggatgatgcagccacacgtgaagaacgcgacgccaaatacaatatctcccaagacctgtttttggtccatcaagaaaagaatgactgtcaacgatacgtagcaaaacatcagtgggagagcacaagatcagaagaaacgaacccatcggtcatccagcgttctgaatacgagaacaagttgactgatgacatagattgcgacacagacgatcgggaaaacgaggtagacgatgtaaagtcccatgggcttcatgtacgagaaaccagcatactggttgaaagtcgcaattgagataaagaacgaaatgccccaaacgacgaaacaagagatccgcagactctgtatcgagaaccaggttgcatttcgatggatgagtttcgaaaaagaagattatcaattgcagtcagcatcagaggaaaatcacgagaaagaaaagctatatccatgcgcacccaaagagacaatggtgtgccatcctcagcgaactgaagaccgacgaaaccgttgacgagcaagcaccaaaagatagagacgatgagtccaacatgaacggcagcaaaccactgtaatgaccagccggtagagtaatagttactgtcgcgtcagcatacaaaaacatatagcagagaggatgaaggcgaaagagaacggctacgaacagggtacacaacgtgagaggtcgggatgacgcctgaatcaacaaacatgcccaacagttcgatgagagcgtaaatgtagaagaacaggacaatttcctttcgacctatatcatatgagtcgaacgtaagatcagatggataaatcatagtctggtttagcatcgaacaggtaacgacaaccttggtgtttgatgcgaataggttataaactgagacgaagaatgtactgaccgacagccgtatattttgatcggatatgagccaccatgatggcagtcatgatgagggccacaatatggatgaagcatgctcctgaatacgacgagaaagcaggaaatgacggacaaacaagtaaaatagcgaaaaagaaacatcagacgtcagctacttggatgacaagccggaccaacaaggagaacatggaacaggcatgtcaatagaataagctttctgccattcaagtcagaaaactcgtcgaggatttgtatgtgaacatgatgatatcgtcttggcattgggagtctctacaaaacatattctctgcccatccgagttcaatcctcggccttactagagaggcttgtagtttgcccatgcccattgccttgtttgccgaggaaaaaggcagtcttcgagcaaaacaacagaaacaacaccaccaccacccagtcctgatagaaatgcacataaattgagcatgaaacgagaacgaacctggctggaatatcaaggtacccccaatctcaacgtttctagagtaacaagacggttctgttccctgggcagaaccgacgagcgggcagacctgaagagcggctgtactgcatatcgagtcgaacgttccgaagctaaacgtcatggatgagcgatctggatgtgtattgataggtttgcgtgcgtttgagctgctgaaacaacccgttaaaccctgacgagcgagggaaagagagggctatgtctcggtggtgtatgggtgtatgggaataatccagagaagagaagtaaagacccaacaaagagacggacgcgatggcaattacgttattggtaacagtggttacaatccaggtggttacactgcctattctaaccttcgaccttgagcccgatatctttcgtctggcttctccgatgtttgttctatttgatgtgctgatgtacagtgctgaaagtctcagaagtatgaggatggacagtgcgtaacgaaatggtagaggcaaatgttctgtttcactctgttttttttttcttttttttttcttt

SEQ ID NO: 2663 - DNA, 9976 bp, Xanthophyllomyces dendrorhous
tcccccactttccttccagtagatcctcatggaccatgaacacccggttgatcttgccctcttcgaactctccgtcccaacgaccgatgatttttccattcttgtcttctgtctgagcgacaatgtctggatagggctcattcggagcatacttcagaggaccaagagcccaggttgagagcggccgaggagagtcatggacgaacaaaggggtggtgatcgtggtgtatctctacagagcccaagtttttcagatcgcgccaggagagagaatgaagggtttaatcatttagcgcacttgacaccaggaacaaagaagatccaactcacagcttgaagaagagcgttatacgtcaataaccgaatagcaggtgttgggttttcctccgtctttggctctaacaattcgatagtgtttacataaggtgaagaacaccaaccaatcatcgcggtcgacaagattgttgtctgcaataaccaggttgtgcgtgaagtatgacgtcgagggacgaatggtcagtatataagctacgacaacgagagtagagaatcctaagagaacacacgaacagatatagcacatccggccaaaaaaatccggccagccattcctagaggggcatctagaatgaagatgaacggcgagagggctgtagagacacacaacgaagacaacgagaaagctctggattgaggttgaaaaacaggtttgaatttgtttctatcttgagcacctcatatctaaaacacaatctcgtccagcaaaagagacacatactcactttaataacttgaaagctttggcgaccggtccttggtaaacgatcactgggtactcatccaaccccgtccacggcccggcctggccgttctttcttgcggcctcctcatcaaagacagccactggtttagctcgcatagtctctggatcttcttctatgacagcatattcctcagtttgaatcgaactgattggtttagaagcatcgtcggtcgtatcggaaagtgttggcgttggtgatgatgttggttttgctacgaacttgggtggaacgatagagaacgatcggcccaaagtggttgtcatgggctggacacacccagatctggtaaaagcattggccaaacgaacggtagagatggagacggagacgccagctgttcggtttgtcaggagagaccgaggctgcatagtacgcaagcagactctgatgaagctcatggctcaagattttgacagtatcggaagggatggttgtgagaggaagagagaaaaggacgaaaaacagatccgccggtagttatctttcgtcatctatcattcatcaccatcgaccatctcattcactggcatttatcgtataaagactggcaaagctagacaagatggcatctcttaaccacacgccattgaatcctcaagcttggcaagacacgctcaagagccagctgattgagagaaataactctgagtcggcttacgcgaccatcattgatcaatgttcgtctagggtttcttctgaattgtagttcccttacgattcatgtcatgccatcagtaccaatatctgtgcgttcatgaacactagacagaaaactggccaagcagacgaagctgttaaaggagcgtaatcaagcgcttctacgagctgccacttcgactaaaccctcggacggtcggtccggaccctcctccggtctcagcacgaccgaagagtttgttgcttttatatcgttaatcacctcaaatctacactggattaacgatctggcttttcttgtcttgaaaaatcgtgcccagtaatcctgttctgcaagcatatgtgtcctccttggagggaacaatcaatggcctccgaaccgagctttcagacgtgtacaagaaccaaggccagaacactcagaagctactcactttgacagaggtgggcagagaggagaacctcttcaaatatgagtggatattcaaaattaacaatccaatttgtgggctgtctgtttgaatcatggtagactattcaagaaaaggatcaccaggccagattagaccaggaggagcttcgtcggctgacagacggggagacccgatggaaacggggcacagaagaatggtcagagcgactcaggataaaggatcatgatattcaggtctgtccaagtctatctactgttcctttcaaattccagacaacgactgatgttcgttctatctggcctgtagaatttacaagacgagataactacactcaaccttgagctttcccaggttctactgagaaacgaggcactcaaggcggacaacgcgaatttgttgaatcgatggatcgagaaaatgaacgacgaggtggacgggatgaacatggccaatgagttcgtcgaggtgcatgagccctacttcctttcctgccctcctggcaacgattctcaccaacatctgctgtcatggatgctgatggttcccattttttctcttctcctatgattaatttatcatggctcatactctaacttgaacgaatggaagatcagctcagtaaagactccgctatagaccgcactaaggatgttcatttgagcagcccaaacggcgcgccaatggcctcttcggccaaggatttttgagtaggaactccagagagaattcagagagtgtaaataaaggatttgaggaatctggagttctgatatcaacagacactgctgctgctgatgatgatattcgaggagaggaagaggactgtatggtacctgcgttaggaggagaagacgatggctgggagttcttggacgagcctctctgttgacgacttctctttcgttttcattttcttctctattctatactttccatcatgttgtatccttaaccctcatataatgttcagtcgatgtacaaagaaagagcgaagaggttgagagttgaaatcaatatgtgcatatagtcatgttttgcctctcgcacgcgcgcagccgctcactaacaactcaacatcttccctcgcttcgtcttgaaccttgttcacctcattctctcatcaagagggcccttacagcaagtaacacgacgtggaatctggatagccagatattctctttcacaaaaggccttctttacttcattgtgtgactcgttctctaccgtcatctttgactacttcttccagtcccttgttctcaatctcgctcttagggctggacctgggtgaactagatacgtcaaatgttcaaatccaagcggaacaagaatcatgatctggatgcttcaatcagaagttcaacgagctcccacacaagtcgtgatagaactactgatgaattgggcatgatgagcgtaccatacgacaagctgggaccaggaggaaaggtcatcgccggagacaagacgtaagtatcttcggttcttttgtgtcgcgttcagttcgtcttgtctgaaagagagcacgagcacgacgcgattctatgtgtttctcttcttcctagttctccccagcttactgaagggttcttttctttgtcgttctctttcttctcctctatgtgcttttgaatcgacacgatcaaacagcgtatctggccgatcaatctcaatttcttcaccaaacacgaacccgactttgacagcagaaggaaccgatctcaatatccatgctcaacaccttccagctcgtcgagagtccaatcggtcgaatcagtcaatgtctgcgtcttcaaataataccgctcattccattcatcggagagacacgaccgcttcttcgtattcgacagatagcgccttttccggcaacctacctcaacctatacctcacacgcctacacctgccagctcgggtaacccaacacatcatcggtctgactctacatcctcttcaacctactcttatcgacccgccactcaacacgccggaggtccttctgtcagtgctagaaagccacccccttcgatccaaagcgagcattccgcattttcttcaatatccgtcaatggggcatcctcctcgcttgttgatcactctggttacccttctcctgtatccacctttcatcaacctagctcttcagtacctcaatcacttctcaacagaccgtcgacctcaatgtctgtggcatctacaaggagtaatagagactcaacggggaggtatcccacctttactccaagcgaaaaaattagtatacatcctccggtagacagaaacaccagggagggcctggtcagggaggaaccgtatgggcaggtcactggagaggcttcagaaaagttttcttatccacgaccttcaagagaagaggtcgagagactgttcgaggctgttattgataacacagccaatatcaaccgttcgtcttcctctctgcttctgtctgtttctgtcatgactgtctgacaggtattctttcctatccattgactttaggcccttcaatgatgagccatgacgtttcgacacacgttgccgacatgcgcgcactctcggacgataagaaatggatgttggttgaaaatgatgccaggcaaaagtggcaaaccgagcgggacagactcaagcgagaaagcgctgctagagctagaggaagtgataccagaggaatttatggaaaggatacaccggaatggtatattcaacagttcatgagtgcaacgcctacggccaaggtggtttctggattagcagtctctcttcgaaccagacctaaacagtgagcttccatcctgggtgatagatcctctcttgctaaacgccaatattaacagtgtcactttgatggctcacctttaagatggctgagggaatttgttcaactacaaggatcaagcgtgttgagcaatttgctaggaggcattagtgcaagaagtcttcagttagtgtcttctcgtacttctatatcaaatttggaagtcgtttgactttattcgctctatctatcacaggtcgagaaaaacagctgatcttgatctcgaatatgagctggtcaagtgccttaaggccatcttcaacgactcagtgagtggtctcggcttcataattttgatagcttttatatggaccctgaaaattgatcgtcttgtctgattttctgtgtacgtcttgatcgtagcttggggcggctgacggactccgtcacccacaaattgtcaccaacatcacatgctccctcaattctccaaattttgccacgcgtcgacatgctatggacactgtctcaccgttctgtttttacgatccacctagaggttacaaaatcgttctccactctttgagtgttttatccaaagttcatggatccccatcggacacgccgttcacagtatggttagcaagtttcgagggcgtgttggacggcagaggtagaatggggagcattgttggaatgagtgaagatttaaagaggggtttaggcggagcaggggttgctcctagcggtgaagcaggcctcatcgattacgccgtacgtcctcctttacttcctctatgtttctctaggttcatttgccgatgacatagaatgaatttttactaatgtttctcatattctgtgatgtgcgacagattcgaaacgtgcatctgatgtttggtcttgtccgtctgactaccgaacttgaagtccgtatccacacgcgtgcacagttagacgcatcaggtgcccaacggatctattctaaacttcgagatctaaataacgaggagatcgataaagtgttagaggctatcaagaccgaggccgaagacgatgcccttgagcttggttcccgattcgatcaaacaatattgaaggacattgattcgcctgctgatatcttgaacgcgatcattctgtctgttcagggaactccagcgcaagaatttttcctctcggtcttacggcatctactcttgattagggacgacgacgagaccaggctgagatactatcagatcatcaacaaacttgtcgcaacagttgtcttggatgaacgacttggatcggaggaagccgatctaagtacacttctcggtgtaagcgtatccaaattggcttcccaatttgaagatcaggatcggttggagaaagtgaaagcccaggtcatcgagatgaccaacactgctcagcaattggcgctcgacaaagcctcgttagaagaagaattagcttcttcaggtcaaggtctcgtcaaacaattgaccgagaaactatccgctaccgaggaacatctcaaaacctccaggctggctactcagcgactagagaaggagatggaggagatgaagcagatgtacgaggatcgcatcgctaatctcgagctcaaaattcaagagttattcaacatgcttaaggagtcgtccgagctcgagggcgttctatctaagaaaggcagtggcgctgtcgatagagaggagctgttggagaagctggagaggaaggcgcagttgcaaaaaacggtagaaaagctggagggagttcatcgaaaatcgaaacgcgctaaaaggcgggccgacggagaggaaggagttttaacgagcgaagaagaagacgaaaatgaagagaaggaatcgaacatatctagtgtgaagggcaatcctccaaaagcgaagaaagtcgacagggccgataggaggatcaaagcccagtcgggctcacaattcgtagacgcagaagatgaccaggtccgagagcatattggagccagtctcgaagcaggattaagtaaacttgtgagctttcctccagtgccctcctatctcattctaccaaccgccagtcaatctggtttgaccactaacgacccctcctgtcttatagaactcacctaacagcacctactctaggagtgcccgaaagaatgttgatgtccagcgaaacaaagcacacttgcatctcaacgatatcgagagaaaaggaaagcctttcctagcccctaggtttgtcgaagagctcaaaggccgacgggtgtcccgaagcgcgtccgctccttcccttaccaaagatgatagagacgacttcgatggaacggaaagcgaaacaacagatcgccgggaaagtagctggacaactcatacggatgatacgcgagcgacctcagtatactctgcgtcacattcatataatacttccaacaatatcaacaattctcgaatgcccaaaaagcgagactccaaacaacgaacaaactcgattactgatgggtcgagctctgccttacagcccctacttgaaactagtgagaaccctggcttgttgtcgacttcaccttcaacgtctggcgagccgggcactttctctctaccaaatgtaccaagcccttcccccaacaagtcaacatttgttggcatcccaccatcaccatcacctatttctcaaccttctcgaccttcccatccctttgccgctggtcttctatcgcaaataaaatcaataaagtcgaatgacgagaaagaaaacgaagagccgatttcaagtcctgtctcgacaaattcatcaaggcctttcagcccgttcgcagctttacacgctcaaatcaaaggcaaatcagcatcgacatcagcctcatcagatgtggatgaagatgaggaagagtttgatcccggtttgaaccgctctcgaccatcgtttctatctgatattgattcgcttgggaaaaactctgaaggaagtctgtcttcgaatgcttcccgatttcctttcttgtctggaatcggatctggtgcttccaatcttaaatcagccggaagccgagtcctggctgaaaaatctgatcaaccaaacatattcgggtccactaaaccagccgaggcttttccgtctagtgtcaaggctccaagaaagactgtcaactacaaggcgtctgcgaaagttcggcagcttcattgggataagataaacgagctcaaagtgaatgagaacacggtttggagtacgacaacagatgagaagctagagaatgagtgggcggagaagctcaaagagcttaatatctggagtcagatggaatctacattctcttcacaagaggccaaacttcagattggtcagtgtttttctcgatattttatcaatagggctttcccaactctccgtgttatgctaacatcgtttctttctctttgattcttttagataagcaaaagcaggtcgagctactgagtgtccttgatcccaagattcgaaagctagtcggtaagtttacaactctggtcgagagatttatagattgttgagctaaaaggactgcgatgttcggaacttgatagaaatcttcatgaagggctacaaaatagatgatccagaagaaatcagagtcaaaatccttgcatgcgacgagaagtactgcacactaaactttttggagaatctttctaaattcctaccaaatccagagcaggttcgtttgatacgtatcttatcaaattcatgtccgtgctatatatattatcactaacggccgaccctctctctcaggttggaaaacttaattctcacaagtcagacacgttggcagaattgatgttgcttcacccagcggatcgattgatggttcacttgattaagatcccccggttagacgctcgggtaaatggaatgctgtttagggctcggcatgacgagaaaatcaatatgcttgaagaggtaaataataacctgctcgtttcacttgatgcttcttcgttttgacctctattatctcctccccagatcgtcttgcaaacaaaggaggcttctcttgctctgttggatgctcccaagttccgacagttgctctctgtatgtgcaatactctttttcggtgcatctgtgatttgtgcctgtacactgatgatattatctacctgattatagcttatcctcttgatcggaaattatttgaatggaaactcgtatgctggcggagcatatggttttaggatcggaagcatcaacaaggttagttcttctatgtacctttaggcttagaacgaattttaagaccttggttttctacagttggtcgagacaaaatcttctgctggtcaaaatctgctacattttgtcgagcgcacggtctcgaatcaatttcatgatatggagggattcatggacgagttagacaaggcttcagaaggatctcgtcgtacgtgaaccttgtacttcaccgttgctcaaaaatcagagtttggtcaatctgaattcctaaatattcttttcacaaatagatgatctcggtcctgtgtccaaggcaagatcggatatggccgctcaacttcaagcgattgataaggaaattaaggcccatcttcaagacaaacctatctccggtgaccgatacagtcagcggatgcttcgtttcgccgccgaggctcgggaccgtctggacgccttgaacgatctacgcatcgaagcggacgcaacttatcacgatgccctcaggtattacaacgaggatcccaatactccttccaacgtgttctttggaatcttcaagacctttgtcacatcctatagggtaagatttccatatttctaaggttgttatatgtgatcaatgagtgatgtgactgacctcatcttgtgatacataacattagcaatgccaaaagcaaaacttgacgtgggctgaactagaggcagctaaggaacgacggaaagaggtatgtcgagattagtctctgttctatgaactgtcccgactgtgtttgactctcatcacatcttgactctctttctacttacaggctgccagacagcgagcgattgaaaaagcagaacgagacgctttgatcgatgattctgcgcccgtgatggacaacattatggaatctctccgggcaatggctcctcgtcgaactcgacgggccggcaaaagagcagatttttcgtcagcctcgattgcgccttctccatcaatgcagagcttgtcgatcgacttgaaggctgctggggagaagaacgattttggaggtcaagcgatgaatatcttgaatacgcttcgaaatcgaggcttcggagacatgggtagtgg

SEQ ID NO: 2664 - DNA, 2787 bp, Xanthophyllomyces dendrorhous
tcttttatcttgtttttcttagtccatagcctattcttaaattatgagtttcctgtttgaaaaagtgagggagacaaggtcgcttctgcttttcgttgaccaaagaatgcttctctgttcgaactgccttccgacgttcaccagaaaccacactctcgaggccgatagcaaaacggccaacaacaaatagactgagcaaggctatcaactcagttcagatgatgatagaaacaacaagatatcgggtctcatataatataaaatattcataagctgtccaagagatccaacatgtccttttccctatcttctattgtttgaattgtagaaggtgatgtggttgagaaacttgaggcgtccactgaagctggtgtctgggagagggctgattgttctgctgcgagagctttcagactagctagtttgtttgaaagctctgcacactttctgtattggtggaaacaataccccaaattacgatagaacaagaactatcagtctgatgatgcggaacgaaagtgaagggaggcgaatagagacgtgaacgaaccgtttggcatctgctgtctctgatcgtcttctttgtagttggtccaccatgatctgttctaatgtcgcttgcgcctgtaagaacaacagaccagcagattgcgcggcgatcggaagaggggtctgagcgaaagagatagatagtagaacaggaagggagagaaagcgaaagaaaaagaacaaaggagacacacctgaacacctcggaggccgttcacaccgaccatcatgttgactcctacctgctccaatcgttcaacataaggcgccccgacaggagccgtctgttcatcctctgatccggcaagtacagatggtggtctggtaagtgcgcccaagagaagaagggtcgtacgtaggtaggtgtgaaggaggctaagaagatgaggcttcatatctgtacagtaaaggcaggtttcgattgaggaaatcaggttcccttaatgaatattgcttgggaaacaaaatattggaaagaagacttgactgactagtcacatcgtcaggaattaaacgaggaacacccatgtcctctatggtgggtactcgtgcattgacctgtagagcaagaacaaaagttttgatcttcggtcaaagagatgttcgtttgcttagtgcagaaaggaagaaggacatacaggaaacacgtccccgaaacattcataagtttcgtctttttcaatccaatctagcttaggaggctcaagctcattgaagtcccagtctggaaggtctggttcttgtattctttctccgttctggtcctgagactcgagatctatgagtaacacctctcgttgcttgcctttgtcgagagagagcggtctagccggatggtctctgagaagaccaagtaaacggaggttggccgaggtgaatttcagatgatgagccggtggttgagggaacgtggatgaaagtcctaggtcttctccctccattgtgtgagacggagcgaatggatgagaggctagtttggcttacggccgatggaaggtggacgatggttgacgaagggtgatgactgatggatgttgacgacctgttgaaggtcaatatcaacacgttcaacaagtgctcagcagctcaccaacagaccccaacctgtcgagccatccctgctctgccacacacatacacacacgtacactcactgtggtctgtagaacacacaccaggagttgtgtccgagacgtgttggatggtaaaagactttcgtctatacgcatagattagcatgtaagcatagtatactcaagcagagccgagcgaacgtcatccccgccgtgggaaattctcccgttgcccgttccgattttctaatgaaaactccaccgtctcgtcttcgtccagccatcaaccacccatccatcttctgactcatccacacccacacttgcacccacacgcatacatacacacacacgcaccaatgggcctgctggattcagtcaaacgtgcagcttcggctacgccagagagaattaccgggagaacaagagctggctcgacggccggcccctcgcccggcgcatcgtcatcagtaaacccggggtcgaaagatgagcagcatcaggtagaatctgcagaaggagatgatgtgagtgtgttggacgagcgagagggtaatgttattatggccatggtcagccaacgtgagtctttttgtcatctcatctcgttgtcttactttccccccattctccatctcgggtgagaactgtatgaaggcaggccgcagggcatgagaaatccgcccgtcaagctcacatgatggattcaaaacgagatggagatggatccgttcggactatgatcagatcacttacgacccatgctcgaggctttggtagacaacaaacgctgatcgtgtccttgttcatgtaccggtcaatgccccatcgtgcttgatttaattcgttgcattagttcgtatcggaatggacctcaataaagtaagtgtcaataggaatatctccttctgcttccttcctatcagttgggaggacacgacctcttgtggtgtttcgacgttatcttcgtccttctgttgtgatgtgtgttgctattgtcgagcccatttctgacgcaccgcctcacttttgcttctctatcttcaagatcgctctcccaaccttcgttcttgagccccgatctatgctggaacgtatcaccgatttcttcagccatccggatcttatttttgggtatatatacttctcctgccgacttttgagc

SEQ ID NO: 2665 - DNA, 3532 bp, Xanthophyllomyces dendrorhous
aggaattatagacgaactcatcattttcggttttcctgactcattcttgaatacacagggcagatcagatggaagatccaaaagaccgattccttgccgttctgcgatattacatgagtggttggcacatagtacgttgctttctttgtcttcttcctcttctttaccctgtgctcttcattctatgactgattggactgcgtctctatagaaacccaaagggcgagtcgtatctttgacaacatgttccctgtttatacgtcgttgtactaaccaatccatccatcaccatcacatatcaatagtgtcaaaaagccctacaacgccactcttggagagattttcagatgttcctacaaatatcctgatggaagcaagggcttttagtgagtcactctcttgtttgcctcaatgattggtcaagtactttcatactcatgctctgatcctttgcaaatatgcagtgtcgccgaacagggtacggctttctgatcaattacatattttcctcacaaacatgtatgtgcattaagacgttctgaagctgacggtatgcttcatccatgcccgtcattagtgtcccatcatcccccagtgtccgcctacttttatatctcgcctcagaacggtgtgctgatctatggagaattgcgcccaaaggtaagtccttcctcataggttcccttgcgctcagatgactcacatggtgaaaactgcctcttggaccccttgtagtccaagttcctgggaaatagcgcagctacgatcatggacggagagaacagggttatcctcatgaacaagcctgaggatggagaatatcaaatcagtatgcccaacatggtgagtcttgtttcgttcgccagaccatagcctgcagcgtccatttgttgatcgggtgtacacaccttatctgttttactcaattagtatgctagaggcatcttgttcggaaaattaatcctcgaattgggagacacaagctcgatcaacaacgtcaataccggaattcattgcgatgtcgagttcaaaaccaaaggattcttttctggaacgtataatgcggtcaccggtaaggtagctaattccaagggcacgttaggtgagattaacggactctggtcagagagcatggaatacaaagattcgaaggtcagatccttttttcctctcaacatcactcagcattttatccgtttacgatcgcgaattattctactaatcacactagctcatctctgtacttacaatcgttgtttcgaaaacgtctagacgggccgaacgcaaacattatttgacgcgcaaaaggcaaccagtactcccaagacggttgctccagaaccggagcaggaaccaaacgagtctcagcggttatggaaagagttgacggacgcaatcaagcgacacgatatggagggtgctaccgaagcgtacgtaacgatatttgtctctcatccaattgtatcagtatgacggatatatattctgtcaccgtatgaaagaacgatccgcttattgactcgttgcttctcatgtgcaccatgtctatcaatagaaaaactgcggttgaagaccgacagcgcgagcgcgcacgagaaagaggtagcgaagccgactttcccttgcggttctttgaggctagaggggagaaatacgtgcctctgtgtggagtgaccaagtaagatccttccatcatctgcctgtgtcttccgctttcttgtctttttctcgaacatacattgagctatccattgcaaacgggatttacagcttgcctaaggacccggttgaatgcactaatttcatccagaactggatttggtctgattcgacaagctcctctggtcttggtcattctccgtccgctccttcgatgaatggcaagattcataaacaagaatccccagccaaggttgctgctgctgctcgtcgccagagtgttggtagcggctctctgcatggtatgtatccctatcctgcgtttttatatagcatgttatagggaccttgttgacagtatacccgtttgaatttgaaagttgtagaggccgtcccgacgattcctggtccgccgagaggtcccgttcaggatcaccctcccggagcatactagacgataacttatccgccccgttgtcttctcgttcatctatcatcattgcttctcatctatcgtttagtattcgtcattcccgcttatatctttttgtcccatccatggtggtcgtccgcctttctttctgagcttgcttcacactgccctcctctccgcctatttcattctgactcttctgggcttgagcttatacctgattgtctcgtgtatgtatatgactacgcatcatagagtgcgagctctcgaccttttgtgtttcgtcacgtacaaattctccatttttgtctttgtttctacctctgttttgtcgtctgttcttactatctcaacttcgtcgaacattcgtgactctggatctcgttgttgagcgccacgactggacgtcaaacgagagccacattctcatcttctgtgtatcgacctgtctctatttttcttgcttctcttgaaacatactcggatcgtccgtactcgattgtcctttttctttcccctcgttcttctacacttgttacggtgtaaagcatggttgcctgtcgatcagcccactcatgagcaagtcacgtgattccgaacttgcggttgaatcagatcttgagtcatgtcttctcacactttctgtttcttcaaccctcgaagatcacccgtcgttctctcgcccgtcagccttctgtttgtcaacaggagcacatatcaagaagctaagctatacagacagatacagagagccacacaaacacgagacaaagtttgaaacgtgatggcgcaagctcgagtagtccctcgttcgttaccgagactttcgatattgtacgtcatgattttccttcttatcttgcctctgtcagtcgttgtactataagcagaggtacaatctagcgcgagacaggagttgaccaatccagtttggtacgaaatcatctttgtggtgtaccgatggactttgattgatgaacggcgacgatgacgatggtgatggtattgctgttgtatgagggatgtagaaagctggcactctggatacctgtcgggatattcgctatagatcatgtaggagaagtcgtatctgttgaaggatcaagtatgagtgtacgtccgagatattttctcatccctctcgtgtgtgtgtactcgttcaacccaatctgctgattgtgatttctgaaccctacacactttgttggacctgaaacgggcgggaccacgatcttgattgaaaatccgtcaacagccgacgttgaacccagattggaaagaaacaaggagacgggattggatctttctcaacaagtggcatgtcacctggaagaaaccctggcatagaggggacgtcgtcactctttggtctgtctaccttttcatttggtctctccttccgattcatgttgcattgggctgatgaatattcatataatc

SEQ ID NO: 2666 - DNA, 9425 bp, Xanthophyllomyces dendrorhous
gtttggtcattcgtatgatggacgatcgcaggtccccgacatcagatacacgaagattaacagttaaaagaatcatcggaatcgaaggtgacactatccgtacgaacgcaccgtatcctgaaaaattcgtcaaactggaaaaaggtcaagtctgggtggaaggtgataacgatttagagtcgaaggattctaggatatacggaccagttcgttcttcgtcttgcatccttccttccttttctcggctcttcaaggttgacttcgttttgtttatctatctttctttcttgcgatgatgatggtggtgatggcaatacgttgcttgatgacatttcctggttaggttcccatatcccttctccaatcccgtgtatcccatgtgatatatcctccatcccactacaccactctcgatcctcttccacccttctcctcatcaagcgacaaggacagtattcatcactcgcgcgtcgtaccgcctcctcggttgaacacgattcatagaccgatgatgggtcgtcttccaggatctgaaggtgttggatggggcggaaaacacggtttgggtgagggcgagagctcagagtctgaggagagaagtagaaggaggagagagagcagagagcagagagtagaacactgatgtaatataaactttcattcaattcaaacatccatcttaccctatgtgacattctcacgaaagaaaggaaaaaagaggagggtagggctcgaaagcgacatatgtataattcaaaagtaaaaggggtatcttgacataaaactatccgaccagacaactggcctaacgaggcaagtcctgtccaacatagtaagtcgacaaaaggagaggggctcgggcggtttgggatgtgatgccagcgcggacctgtctgttcagagcacgtatctaggtagatcggatgatgtctcatagagtgagtttcgaagtcttgatttgaaatgttactattcaaatgatgatgagaacagaattcataagaagataaacagaaagatgtttgatcagcattgagtgcagtgacctaagggtaaggcaaagagctaggaatataccttgcggtagtcctccggattcggctgttacagttgctggcagaccgagtctggcaagcgctcctcggatgagaccttgaggctaaaagttcacaaacacagattcacagatcggacgccaatattgttagaagaagaacctctcagtcgcttgcaagaagtcactcacgaaggccagatgctgagccagaaggaaaacagtcagtggagaaaacttaagaaagagtaaagtcattgagaaagactctcactggagcagctaatttgacatcctcttgaccgccagcaggtgtggatatgtgagctatcggagggaatgcagagtcttgaagcacaaacacgccctgttgattgaagagttgagaacggttatcagaatcaagctttggaagaaatctgaagggaaagggaggagaggatatgaactcacccgatgattcgttcgaaggttgtcaacctgtttctcatacacagcgatccaaacctgtaatggaacagagcgcagaaacattcatctttcttgagcttcatcttgatggagacgagcttggcaatcgggatgttgctcagaacgtacatccttgcagatgaatttgacaatatctaagggatcggcaaatcgagatcttgagaaagtcaacctggcaatcaagataacacgttgccccaatcagtatgatgagtgctagcatgcagcacacatttaagagatccttctctaatcttccgagcgagcaatagagaaggcgagacatgtttgtaaaggtttttacaaacctctcagcgatgtctcctcctatcctaaattcgatctcctccatacgtttgcccactcctccgtctccctctagtctttgcttttcagattccttcagcacatcttggggtagaatcccttcggcaaccatttcctcctccctgagctttgttctctgttgagcaacgctagccgagcgtcgaagggcttgtaccatgtggatcagaaggtactgattcgacgcgatagctacctggtgggacggagcaactgagagcgccacaagacttggagggagaggagaaggtgtaggagcagagtatgatggacgggacatattatagtgcgaagttaataaggagagaatgaacgttgcgttcttgaaagttcgttgatggccgtcttcgtcaaagtaggtgatagttcgcgtcgaaccgacaatgatcatctcttaatctcaccctcaccaccatctaatactaagcttcaatatggcccctcttcctccatcggaatcgcctgtaatcctcaagattgagcgactactgaatgatgtatcagtccaccagatccctcttctcaaatcttgtaccgggccatacaaccgccatcaggaactagcgaaggaaattagaggagatcttgttagaatcgagagactccttgttgtgagtcgtttctctctttgcccagtgctcattcaaagtttaacccctaagctattaaaaatggcattccatctattctcacataacagacccttgaagaagaagctgacgaccaggactccgagcgagcgagattggtcgtccgaagtatattcgatcagttgagcagaaagcttgattcgtgagttatttctatatcttatgtagcctatccagttcgtaatttcacttcactactgtctttctttagagcaagaatagaatacagaagcgctctcttgaccagtaaaaagtcgatagattcaaaccctgcggcaatgtatgtacgatggcttatgtcttttagaggaagcaacaaggtctcatcggcttcgcgcctatatgtatatcttttagacgagaggagttgttgtattcaaagaatcggtcggctgagtctactcagtacgtgtaaattcatttcgtctatcaggtcaatctagagctgatggtgaagaatttaaaaccagagcggacgacccgttacaagagaaagccaaccaggtcaccgttgctctccgacagacgacagagatgatgaaggatgagattgaccgcagtgttctctcagctcaactgctcggtttgtcctttgaatgatttgtttcagtctgctccgcttatgtgtcaaagtgagataatatactaaccttctttgtatcacgatgtattagatgagtctaccgctacactccgttcgacgacgaacctctatgagacctattcttcgcttcttcaggcgtcttcctcccttttaaccgcgctcgaacaagccaactacaccgatcggatcctcatcatcgctgccgttctcttctttctcctcgtgtgcggttatattctcaagaaaagggtgttggacaaagctgtgggtggattgacttatatcattggtggacctggcggagctgccaagaaagctgccaaatcagcagcgaaagacgtcgtccagccgaccatagggaagatcctgaatcagggaacaagctcggtcctggaaaaggcgagcacatcgacgacgccgctgtcaagtcaagtgacgagcgttttggcacaaacggtcgttttgacaaccgcaactaccaacatcatcagtcctgcatccacgtcctctgcaagctcgagcttgccagaacagggccaattgttggaagaagagcgagaaatgttgcatgaggactatactgaggagagtcgcgttgggcatagagacgagttgtaaaagatgatcttgttgtttagcaagcagttcattgatcatagaagggcaaattcgtacgcgcacgggcgtcattcgatgcatcgaaagtaagaaaagagaagagagggagacaagatatgggatgttgtttaggttaagaaacaaaggaagaggggatcaatataccatctgaaagccagcttattgtttgccttaattcccgtgagcggccagcctgctttcaaggtttctcaaggtctcttccttcgcaagctgtgttcatcccccaaagatcaaaaaaggatcagtctgaggtcagacacgtgttgaataaacaagggaaagccttaccaattcctgcctcctctcagcaatttctttctggacccgtagctcgatctcccttaatttttcttcttctcttctcagttgttcttctttaattcgaaccgactgagaagtcatatgctcaggaagagtcgaagatggtttatcggtcgttcgggataaagtttgctctcgactgttgtatggagataaacaagtcagttcaaagttgaggtcaagattgaaatgaaggaagaaggaagaaacttagacatactattctggaagattagtcaattataaggtgagagagagacatccagttgtgttaggaagcttggaaaatcagattgtcaagagagctcgactagacaccagagacaggcaaaggaaagtggatacggacgttcgtatagccaatcgtgtgtgcactttaagaaacaacatcattacgaacagtcagaagacctgcgctccgcaaatctgactcaacccacaagataagttcactcacttctttcaaatccggcagatgtgtgctataaaattgcccaagaaccattacgttagaactctctccctttgtagcagctccatgttcccgaatggtatcagacatacctaagcaatgcgtttcgaagtgcagtgaaatccgagtgatcagggttgtcgacttcgacaagaccccaaggatacctgtccatgattgaaggcgcatacaaatagaacatcagatcaagtattaagaattgagagaaagaggaaacaagacttggatgaacaaaccttcgaactcgaacgggttcgtcttgaacaacgatctcttcttcggaaccaacgatagcgaacgggagaagtgactgtatgttgtaccagtccgggtatcagcaacgcttacagcaggggcaaggagaggcaggaattgactaacgcgcagatgttggttttcttggatagtttcttcgtcatcctcttcagggtcgtagggaaaattgtagatcgggatgttgtagctgatttgattcaaaatgaacaccggttgtcatattagtgatgatagctaaaggggaatcaatgatggagataaagcggaacgcactaatcgatatcctccatcactcttttcttgaaagctttcagctcagagggagtgagagaatcacttctgccaattacaggaatcacattcaccctagcagcgagagttcgcatcagctcgatgtcgatctctcgaagtgcatggcctgagggagggataaagtaaatgagcgcgtgtacactgagcatcatggagaaggaaagttagcaaacacgatgaaagggggagagtaacagagagagctgtctgggaaacggaaacatcatctcagggaaggacgaaccggttgtctctaaatctaggatttcgcttgattcgactctcctcggccatgatatcatcgtattgtctttcgaggtagcctaggatctgaccaaaggcgggatcgttatctatgctatctccgaaacctggagtgtctacaatagtaagcgcaatcctgactccgtcctcttccagctctgattcaatatatattgatggttccaaaatagatagacgtgatgttagccaggcaagtaggccgactatctgacaatacagcttgaaaatgaaggacttgccgacattaaccggtttgatctcaagagggtcctcaatatgggcttgagcaggctcaaactcggtttgatgttttagcacatcactctcgcagagggtgtctgagtaccacaggaattgcatgacgggaacaaacgagaggagccaaatgatgatgaatatcggttcgttgggacatacgctctttgctaggatcggagaaaccccaaggacgtactgacaaaagtggttcgaccggtaccggaggcgccttcaaaacgtaattttcagacaaacaggacgttgttgttgaaggaccgttccagaggttaaaataagtttagaaaaaagaactcgctgagcaaagagagaacacgaaggaaaggaaaacaaagacatgctcggacgcctaaggaaagagaaaaagaaagaaggaagacaaatactgacctacaatcatcagggtgaaagtgacacccttctttatggacttccttgatcttgttggtggtggtggcatctgtgtgggagtctgaggatgagtgtatctacaaatgaggatccaacgatgttgctggtaagcaagagctcggtgaatgtgagagatgagagatgttgaaatggcagggagtgcaaacaaggcgcgtaacttgcttatgtaagccacgaatgtaaccacatcagttggcatctctttcagagacaatgagactccaaagaagacatctgcagaaggagaagagtgtatgaagatgtctaagaggctcgcatcttgggtcatagtatgaatggttcaagagaaaatggaaaggccagtacgagagttgctacagatcaacttttttcaagctgacgtgattcccatccgaagataccttgaacgctgatgaacgctcctctatttccagcagcatggatggtatgtgcagatctgcgctcataattctttcgtgttctaaagatagatagactgttgaacatgctatccgttcgattgtgttcttgtgaggactggtcgtactggctgggtgagggtgatgggcggttgcttacataagctgtctcaccagaggcttgcaagcgattcgagatattcctgttcctggccacgcgttcctgccactctccctcattcctatcgtttcgaccttctccatttcctcatcttcaatttcatccagcggtttcatccctctgtcttcctttcttctttccctctccctcccttctcgtccgagatggatccctcattcccatctccacagccaccaccaccattgccgtcttctgggcagaactcgcagccacagctcgcctcgttcgctctctctcaacagcagcagcagcatcaacagcaacagcaaagccatccaggtctctcgaacaatgttcagaacgggttttcttccattcagcagcagcaacaaatgcagcagcagcatcagcaacagcagcaatctcaggtcagacagtatcctccgggaagcctgccgttgcctcagtacccaggcaacatgacccatcagatgatcggaggtcttactcaggacaggttgaagtatattgttcaggtttgtaccagatcaacttctctttccttagactcggatgcatcaaactgcctcacttggatcatgaatggaccggacgatctcgtgatggccgctcagatgaacgctttttgctcattttggttcttttccttcgcgtccacttttctacagaaatctcaacagctcaaggcccagggggcgactgagcagacgtcgggggagctcaagcagatgatgaccgtcttgcaagcttatcagaaattcatggaatggaagtcagtgtctccgtctctattctaagttttttctaatcctgtctgagcgtgttgaggcttatcacttgatcgacgtgtcggctgtttttcacttggatatccataccttagcaaagcaaactatgtccatcttcaacagcagaggctgcagcagcaacagcagcagcagcaacaacaacaacaacaacatacatccagcaccaatgggctttctcctgctcaaggtaagtttgttatgggcatcgtttcgccaactttcgctaaaactaacgcgttttctttcattgtttctatacatgctcagctctccctccttcctctacgcccacttctttggtttccaacaacccgacaattgcggctcctccatccgggtttcctcaaaacgggcagccgccacaacctccttcatcttctgccaacccccaggcctccttttcttccgccacaccggcagctacatcaacccagccacccgctaacccgcttaccgcgtacaactttacacccgaacaaattgctcagcttcgaactcagttgcacacctttaagcttctaggaagaaacatgcccattccacctcatcttcaggcagcaatcatgggccatactggtggggctctggatataaccgagaaggacaaaagtacagacgttggacagtcgggcttaactaaaagtctggaaaacaagctaacagaaggcgcggtgaatgtggctctcgcggcagatgcacaaaaacctgaaccaatcaaggagactggaaacgtctctgcggagtctgctgctcctgtggaggcaatcgccgtgacagcttctccgtcgccggctacctttgattccactgctgatgcagccaccaacggaccaatcccggacgacaaactgtcttctgtgattgcctcgcttcctgttgagttaccgcccgcgctcgagctcaacagatcatcgctcatctatccctacaatgcattcacccatcctttcaccctcgttcctcaacctgaacctgcgtcgagcgcaccgtaccttagcactaagcagcaacgaacgttgattccttcgctaatgcctcccggactcgacccatatatccttctcgaagagcgaaaccgattcgttgacactcggatcaaatggcgaattcaagaacttgagcagcttccggcgatgctcggggaagactgtggaggagagcccatcgtcggtttggttgaaccgactcgatcggatgctaaaatacgagcactgatcgagcttaagtcacttcaccttctggaaaaacaaaaggcgatgagagagaagttggctactcaaatggacgcttcctctggcttgttgaccgaccgaacggcattccgaaaacacaaaaagattcatcaacgagatgccagggtgactgaacaactcgaacgacgacaaaagttcgaccgggagaagcagatcaaacagagacagacagactacatcctcgggatctgctctcacggaaaagaactcgtcaaggccggctctatcgctcaagataaagttcgaaagcttgggaaactcgtcctcggatttcacgtcactaccgagaaagaagaacagaaacgtgttgaacgaatttcaaaggagcgtctcaaggcgcttaaggcagatgatgaggaggcttatatgaagttgatcgacactgccaaagacacgagaattacccatctgctcagacagacagatgcttatctagattctcttgcccaggcggtcgtagcccaacagaacgatgatgtccataaagacgcgggtgtaatcttgccgtttgagaccgaggacggtccggtagatgaaaccatgttcggagcctccaagatggacaccgaagagcctggacaggcaaacggtggtggggc

SEQ ID NO: 2667 - DNA, 19843 bp, Xanthophyllomyces dendrorhous
caacaaggtggattattatgcagtcgctcacaagatcagtgagaagattacagaacaaccaagtatcttgatcggaggtaagctcaaagagtatcagatcaagggacttcaatggatggtcagcttgtacaacaacaggttgaatggaattttggccgatgagatggttagtctccttttctcttgtgtcatcctctttaaatcaaatgggcagtggaaggatgcttgagagattaacggctgacatttcctcaatttttgcctctcattttctatagggtttgggtaagacaattcaaacgctctcgctcatcaccttcttgatcgagaagaagaagcagcatggtccctacctcgtcattgttccactctcgacgatcaccaattggactctcgagttcgagaagtgggcacccggcgtatcgaccgtgatctacaaaggaacgcctcaggctagaagggatgcggccgccagagtcaaaagtggaaacttccaagttttgatcaccaccttcgagtacatcatcagagaaaagtctctgttgggtaagatcaaatgggttcacatgatcatcgacgagggtcaccgaatgaagaacgcgcagagcaagctgtcgatgacgttgacacagcactatacgtcgaggcatcgattgattttgacgggaacaccattgcaggtttgtgtatctcgctgttttattcagaaagaacctgttgcacatagtgactgccttaaaatttactgtctattttcttagaacaacttgccagagctctgggcgctgcttaacttcgtcttgcctaaggttttcaactcagtgaaatcattcgatgagtggttcaacaccccgttcgccaatgccggatcgagcgacaagatggacatcaacgaggaagaacaattgctcattattcgacgactccacaaggtgctccgacctttcctcctccgaaggctcaagaaagatgttgagtcagaattaccagacaaggtcgagaaggtcatcaagtgcaaaatgagcgcgttgcagcaaaaggtatacgatacctaccgaaagcatggctttttggcttctgaaggtgtcgataagcaagggtgtgttcctcgacttctttgtctttggatttcactctgattcacttgaagatcatgtgttctcatatatacatttcttatttggcttgtttctgaatgtgtagtcgaagtaatgtcgtcaagggtctcaacaatacgatcatgcaacttcgaaagatatgtaatcatcctttcgtgattgatgtgatcgaggactcgattgtgccggaaaagattagtgacgataggttgtggcgagtggctggaaagttcgagttattggaccgaattttgcccaaattgttcgcaaccggacatcgagtgagtttgagcggccaagttgaattttcgttttctcatgtctcaaccttactgaacatcatctttggcgatgttttctctttctttttttcctttttgtacaacaggttttgatgttcttccagatggttcagatcatgaacatctttgaagattaccttaactaccgaggttacactggccaatatcttcgacttgacggttcgactaaagccgatgaccgaacgacgatgatcacagagttcaaccatcctcagtcgcctcataaaatcttcattctttcgaccagggctggaggtttgggtttgaacttacaaacggccgataccgtcatcatgtatgccttttcttttttgttttacttgtatagagtggaaaggatcgaactgaactttctgtgttcttttctcaaccggcgatagttatgactcggattggaatcctcatgcagatttgcaagctcaggatcgagcgcatcgaattggtcaaaagaaggtcgtcaagattttccgactcgttaccaacaagagtatcgaagaggatatcttcaacgccgctcaaggcaaacttgctatcgatggaaaagtcattcaagctggaaagttcgacaacaaatcatcagctgctgagcaggaggcgctcctcgtatgtcacattctcttctgtccttctttttgggaactcatttcacggtgatgtacaggtcgactgactgggaatctgacatctctcaattccggtttgcagcaatcattgttagaagccgaggtggaagagggagatgaagaagatgacggagagatggctgacgatgagatcaacgagcttctcgctcgaggtgatgatgaactcccaatttttaaagccatggatcttgaacgagagaaggaagctatccgagtctggcaggcccaaggaggaacaggacctccaccagatagacttttcaccgaagctgaggtcccagagatgtacaagcgagagcttgtgagacaagtggatgacacgcttcatttaccagaaggccgaggtcagcgagtcagggcggatgtccattatgatgacggattgacggacgatcagttcttgcaggctcgtatcaatcgtatcctctcattaagcttaaagttggctttattgacgttttatttggattttcttattttcaggctttggagggtgaagagggagatttagaggaagcgatcgagaagaaacgacagcgggtggaacgtttacgtgcaaagcgagcagaagtcggatccggggaggatgggcaagattctgatgactctatcgctcctcttggtcgacccaagttaggtaagaagggtaaaggtcgtcggtcatctacgatggccattgatgatgatgaagacacaccgttcggcccgaccgcaaagaggaagagaggaacgacatctatgtcggccacgcctgggatcgacgatgaggaggacatcatcagctcgacgaaacgtcgcaagactactggtctactaggtgctctcaaggatcgtatgaaggacgccctcaatgctgtctacaccggcatccaacggcctttcaaccgacagatgaatcagccccattgcgttgcgttcttgcagcccgttgataagaaggttagtatatgtcttaattttgactgggttcatttatcaattacgattactaagatcgtggcttttttctcctcttcacaaaagctatacccatcttactaccaactcatcatgaaaccggtgttcatgtctcagatcaaacgtcgtatcggaaataacacctacaaggatgtcaatccattccgagcagattgggagcagatgttcgccaacgcccggttgttcaacgagcctggttcgtgggtttacgaagatgcagattatcttgagaaggaattagatgttttgtggaataagcatatcgtcggtagcgggttgcccggtgcgccgttgacgacaaacgccaacacgacggctgccaactcgtctacaaatactcctgggcccggagggagtgggatgggatctgcttcggaggaggcaccgccatcgacaccgatgacagatggaggagagagtgtaggtagtttcaaaaggaaaatcacgataaaaaggattcaaccaaagattgagtcggatgaggatgaggaggacgaagaagatggtgaattatcgtccgatagtgatgactagagtgtcatctcttatcttggttctctgatttcacatgacttgtctcatttcctttttcttttcggttttgaactcctatcgttcacggtttgtctgtatacgcttagtagtactcttttgtttgttcagttcctctctcacacaatcttttgtaaaaactcagtccgttagagtcttgatgtacatgaattttctctcttacccatcaatgccggtttctttctccctgattttctagtccaaagagatagtcaaagatgttctttcttccccggttttcctaagctttcctactcaatcttcgacttttctgtcccgacctctatctcactggaccgatcttgttctctacgaatgagagctcgtgctttgaaagccacgaatgcgagcgccgagccagagagggcataacagaagctaggtcccagaacccagtatgtggtgcatgctttaaaaggcaagaaagagtgtcaaaggacgaatctgagagggaagagaggcgaaagtaggaaggaactgataaggacgaaccaaagataggtcctagagctctgcccaattgacctgcgctcctgaatccacccaacgtctttccctttcttagcttttctccttctcccttatccttctgctttccttcgacttccactctcttctcaacacttcctacgtgctggtcttcatcttggtcacataagagactaacgaagccggtgagaccggtgacgacacttgcagaagtgaatgctagacaggccgctcctgaccaaaggatgagtgcgctgaacttgcccggaatcgactcgtttccggatgaagaggcggagagaggaaggagagacaggagtaaaagaccaagtgaggtagagaggatccctctatgggctaaaataagaggatatcgggaaacagaaggtcgtcgggtatatcctccttgcaataactttcatattccaagagtgttgtaaagggaaagaaggaaagagggaaagaaggaaagaaggaaagaaggaaagaaggaaagaaggaaagaagaaaagtagaagaaaaagaaagacctataagtcaaggctctcatcttttaatgcgctgaagaaaggatgaagacgtacggacgacaaaacaccgatactgaacgcaagacaccagatcagcgtcacaagtcaaatgacagagaatttgttcgagagaagaagagcttacaagcctaagagtctaccgttctgagcgttcgttgctccgaaaagatcgtatgccaagaagctataatttatcatgtcaggatcacaagtgcagacagagaggtattgaagagttaaaacgtaagggataatcacgttaaagtaaattcagctcctacaaggaacatttttgagaagagaaatcatcgttaacaatatatttctcttctcagcaagtcagaataagttgaccgaggtacaaacatgacgtaccactgaagaagaatagaaaaattctgtgtagagcgctaagctcgtcgaccatcctctttctctcttttacattcattgcaacctgtctctcttcctctcttcctgctcctttggcagtgtttgaactctcttcctcaggagacagtctccaccctcttgtttccggcaacttccaggcaaggaaagccgtttcaatcgtgatcaatactagggtgattgcagcagcgtaagaatagacgttgagcctattcaagagtgatgtatcgctagacacagaaagaggaagaggaagtgaagcaaaatatgctcccaaagccggactaaaaaaccgaatgaggcaagattgaaccgaaaatcaaccgatgttcagtatcaaattggaaaagatataagggaagagggtgagacgaaggggcgtacccaaaagtaaagcagacggagaaagccaagccaaccaaggcgagcgccctagatctcgtggaagcaggagtgacatccgcaattattgctcttttcaatgtatgggagagcacaagtgcatatttgaaaattggtcaatgaacatattaacgagattaacgattgggacgtacatcgacagctggacgtttccctcactcagcccgcctactagcctagatagtagataagaagcctgagcgatacctgagttagccatcgatcttgctcttattgtttcgaaatcattgcaaagcaaaaacgatatacatacaaaggtcgtgctttgaaaccagattccggccgaggcaaggtttccgatcatgctgatcaggagcactcgtttacgaccatacttgtcggatagtcccccaatatgcggtgccacaagatattggcagaagctttttcatcaacatagatggcatcagtacagatgtattatgagctctattgatagagagaaacgaaagaacggacgagaagatggagcccaagaagccaccaaggagaatgatgtcccattttttatggacgttggtgacgactggttgcccgtctgaccggtatgatactaaagttgcccggaaggaacgaaggccggctaggactgaggagagtattgtatgggtctgatctgccgatgagctgatggcctctctggaggcgtaccattcaatgatccttggaaacaggggaagtgggatgctgggaaagttgtcgagaagattatcagataacgagatgttgacagagcagagcacaaaccgagcgggatactcacgtaaacgccagaagatccaacaccagagatacaaacacaactaggatgaccgagcgagctttcatcttgtgttattcctccagcaagtggatgagtgggtgagtggacgatcggatacacgattatgtacaaggtcaaatcttggggggtgagcagaaggataggaaaagaaataatgcttatgtaagcaacgcctagttatcccacaaagccaacccagccaacaccctccagatggaatcgcacggggaaggagcgcattgttgatgaaataagcgtatcgtagaggaagctgaggtttttctgtatgctataatattgagtccagctggagataagtaattgaaggaattctttgagggtcgacgagtcattccactacatgactgctcacttcggccgataattaactcttcagagctaacttgttctctcttaaccatcaaccatcaccatcatcatcatggcacccaggctcaacgctctccttcgacctcttcttcagtccggctcaagccgggtcgctactggcaggcttgccgcctttgctagacctcttgctcagagaacctacgcctcggacgtctcccgggatcctttcaccggcgagcttacttctcttcctgatatcaacgtacgcctttttttcatcgtattctcttcttccttccctctctcctttcttcttctgcttcacttttgttcttctgtatgatatcctgactagacagttctgtcaattctcccaaataacgtctccaactttatcttgaacgcgttctaatatcgacattcttagcctaaagcacttcaatacaaccagaaccactctcctgggacgcccccatcaagcgacaagcttacattcggtagggtcttcaccgaccacatgcttactatcccttggaacagcgtcaaaggatggggaaagccagtcatcggtccttgttcgtctttttctcctgtcttgatcttcctctccgtctccttatttcgcttgttcggaggagctccgacagaagacattgaaaagtgagtcacattcttacaccttccttgttcacctccagatggtcctcttgccctcgacccttcatcgactgtctttcactatgcattcactctcttcgaggtctgttctcctttccctttgttttaaaaggcgcctacgctcttcgtcttttcaacacgtttatcgtgcaggcgttgaccattttttggtatcactatcgttacagggaatgaaagcatatcggtgcgacgatggaaccgttcgactcttccgacctgataagaacatggcccgaatgaacactgtccgttccttctttcctctacaacatcatctgatatttgttcggtcgtttcgttcgattgctgacgagactttttacctaaacccggctgactcgcgcatacatgcaatctaattggccacgaaccatcagagtgccgctcgaattgctcttcctgtacgttagctctgaagctcaacctaaaactacctatcaatggctgaccctaattctcaatttgtttcaaccaaaacttgtaatgataaaaaaaaaagcaatttgatggagaggctcttactcagttgatcaaacgcctcgtgatgattgactcgaactggatccccggagagcctggtcactcgctttacatccgtatgtctattctatcaagcctccggtcttctactagatgctcgacttacccatatccctctgtgttttcaggacccaccatgatcggcactcaagctggactcggtgttggcccttcatcagatgctcttctattcgtcatctgttcccctgtcggaccctactatcctagtgagcactctcttcttttcttcttttgcgcaccaaaccttctcatgtactgatctcgtgcgcaaacaccctcgacaaatagctggattcaagcccgtttctcttctcgctacctctcactacacccgagcaggtcccggaggaaccggcgcgtacaaacttggagcgaactacgctcccggagtcgtgcctcaggtggaggccgccaagagtgggtacgcccagaacctgtggttgatcggcaaggagcactatttgacggaagttggaaccatggttcgtcggcattcttctttctctcgtcatgcacttctcgtagtagtggtccggttgaacgtggtgtttatttgatattgtccatcggcgactacagaacttgtttgttgtacttgacaagccagatggaacctgggagatcgtcacccctcctctcgaggatatcatccttcctggagtcactcgagactccatcctttcgcttcttcgagatcatgctgccggaacgatcactctccctggcttgccttcaaagatcgaggtgaacgagcgagccatcagtatgggtgagattaagcaggcaaaggcgaacgacacattgagggagatctttggaagtggaaccgccgcacttgtcagccctgtcgacaagtacgttcgcatgttttctcttcatttcttgagtaagatgctcaaaaattatcttgcggtttctgtccttaccctacaacagcatcggatatgagggaaaagacatctctgtcccgactggtcctgagggactgggtcaagttgccaagagtggttcgtccgatctctcttgttttgcctatacttgagagagtgccaatctaactgatctctcctttctcatggacatcgtagtgctcaacaagatcgtcgctatccagatgggcaaggagcctcacaaggactggtccgtcattgcctccgagggtatttaagatggctacaagactatcatgtctttatttcgtgttagatgcttccgaaaagatattcagtcgctattccgatgcgtttcccttctttgcgtttttgtgtcttctcctcttcttcttagatttatgagtccttctctctcgatttttgtttgcttctggagatgatgctagagcgttacgtttgtcaaagatcaagaacacacggtgttttcttgctaatgacgtttccaccggtcacaaccctaactcgatcatccctctgatcggtatactatcaggttgaccttcaatcaaccatcatcaccatcagatcgtcttttattggatagtaccttcagtttgcagctcgatatacggacatttagaccaaccagattcagatggtgctccagaataaacataaacgattggcgagcgctaggtggaacaagtatgtttgatgcttttcttccctgctctattcctcgtgtctcttcatggttcacattcatgagccttgagtatcgactgtcataggtttctgttctgacatatagactgcattccgttctatgtggcggtgcgttttgttgttaaagagcaaggggcaatcctacgaagcaatatcaaggaagaaacctcggagttgatcagcaaaggaatggtggtgatcactcgaacggagaagaggaggatagaagtgaagatgatgaagacacaggagaagacgacgagggcaagggggaagtccatggaggagaggaagaagaagaggaagacgacacagcgttcccaactataagaagtcgtccctccggtaggtcatcacctacacttcattcacgcccactaccatcatcaccgtacgacctacttactagaagcctctccttgatttccttctttcctttgaaacttgttactcgacaacaaagaacggcctaatgcatcttcggataaacctttaccccaatcctcacaatcaacagaaaaatcctttgctcgtcggccactcaagtcgaacgaagatcgatatgcagagccagaagtcgacccatacgcagaagttgagcctacttcagacgatgaacgtttgtcctcttgccttcccctctcccatcatctcttgccgttggttctctgaacgaagtctcagacttttgatactgatccgccttacggttatatgccgtcaatctcgaaacaaatatcgatgataggagaagcacacaacctttcgatattgatgaaacacagactagacttatcgacctcaccactccctgaacttcgagacgactcaacagacccttcaatcgatcatgcgctcaaacttagaatgcaaactcggtccggcgggaaaaaagttctacatctctccagtgcctcctcatcaacgtcaagtcttagaacgaacaaaccggcgggacagggaagggtcgtgcctggagaagacagctgggatcaagcgtcgatggaagaaatgaacagggagagagctaaagctgatgcgatttctggttgagtcttcttctttcttcctcttattctgctgatgtgcgtgttctgccattaagttgtttggttttcttcttcgctcatgatagacgtcaaggcgagacttttgagcgctcagtttcaaagatcaaatgcaccgtcgccatcactcaataaccgaccgacttataaaagcaagattcaaccgccatcatcttcagcaacaaaaaatcgtcaggtggatgacgttgatgattttctgaatagtctatgaatcgatgtggtaatgatgatatgaacatttaatttcaaacgatggtgttctctttcccactgtcgttcagacaaacaagagaaaaacactggggaaggcaatctcttgcctaactaaagatccttgaatcgatccgcgaattcacaaagcttgtgcatcgtagcggtctagtgaaggtccaacccggatcaacccaaacaagagaacatccaggtcaattctgttcagctcaatcatgcgctatctcaatcggcaaatgtctgtaaaggtcaaacctacctctcgagcagaatgcccggcgtcaggaatgatcgtcaactctaattcagggaacgccttcttcaaatcgtacgccgttctaggtgggcagacgacatcgtatcggccgttcacgctacgtatacgaagcgtcgtttattccatttttcaaagcaacatttattaagtagagtgcgcttctgatggttataccacgatggcatggagacacgtacacaaccgtagggatatgtcgaattttactatagtatcacgaacaaacagaacaaatgaacctcaattacttggacatcaagtcttcctgcctgggttaaatcaaagacttactcgatgctctgggactcgagcaactggccgtctcgcataaaacctctgttcacaaagtaactacgtagaaagaaaggaagaacgaaaaagatagtaaacggtatcaaggatcagggatagaaagagcgaatgcacgatgcacggcataaagtgaaagaagatttattctgactggttttcgattcttgcgaacgcatttgcccaatcgtcctctccggccttgttgacatattctggatcgactcgcagcttgcttgtagtcatctgtttatttcctcgcccaacattcgacatcaatcagtctctcttactgcctctatgcctagcatataaagaaagatgatacacacctcccatttagaccaggctcgagcagcttccagcctgactgcttcatcatctgaattcagtcgagagtgataggccttcatcatgtcgcctctttcttcctcagggataggagctaaatactcgtcccaggcttcgggaaaaagatgagacgttccattttggtagaagaattcgagttcacttcgtcgaaggcaaaagattcctcgcaggatcaacgccttcacgacctttggatgagtttgggcataagccaaggacaaggtcgatccccatgatccaccaaagacgacccaggattcctattgaaacaacagaagaagaagaaaagaagtggagccaggtcagtcaagatatttaccgataccatatggaaagatagagagaagactacgaacgatcttgagttccttcctgagcttctcgatatcttccacaaggtcccatgtcgtgttgtcctccaagcaggctgtaggagttgattttccagctcctctttgatcgactgagcaggaagataacaaagcccggtccaattgatattgccaagagatgagcacaggaccaagatgacaggttttgcgatgatagacgtacgaagaacgatccgatacacttcggggtcaaagtattccttgtcggtatcggcgactccgcctcccggtccgcctagagcagaccatttgatgtgtagagaatctcagagttgacatctcttcatcagacgactgaaagaagtacataccgtgtaggaagatgaccggctaagatcatagggaaagatccatcagtccgtcttgtcgtacgatgtctctatgatcagaattcagccaaagatctacacacctttccatctttctttccactctcctcataactgtatggttccaaaggaacaaaccgatgtacatatgatcgttttgtcaacaatactcttctaatgtatcagaactaatggtacactgtgcggctaggatagatttcggccaactccggtcgaacataacggagtttgcaaggaaactggataagatagactgactagagagagtggacgtcggatactttgaggagaccagaattgaagctcgcttgagaagggtacatggctgaagatgaaggcttagacagtcggtcggagggttctaaaagaagatgattgataggcaaagagaaacggaatcgtccagatgggctttcttttctgtgtccaaatcacgtgacccaagcttcctcactctcattctctcacagataagaaagatgttccatctcattctataaatgccttacgcccgatatatgtaccatgtccgagagacagcatggctatgttttacatctaggaagtaatctcagagttcgtcccttggacgggcaacaacagaacgttggacgtccgatcgatcgatatcagaccatctatattgatccgatgaatgtggtagctctcagcgctctgtccgactagatgattttaaaagtaaagatatatactcacaccggccaagtcagctgaagagtatcgggctcgagactaggataattctcttttatggtggagattaacaagtcgtagagcaccttggtttttcatgaagagaagaattgatcatatcagtcatcgaggcgcctatgaaggctcttcaatcaacatgcaggctcacttgatacccttccttgttgaaatgtaacccgtctctcaagacttccttcgtcctttccagatctcctccaagatagttctcgatacctcggaaaatatctactacgggcacgtttgtatcctgtcccaccttcaacactgcatccgcaaacgccttggtgttctcctgagatcgatccagagctcggggagccatgagaccggctcgagtaggcccatgaattggaggaggagtgatcaggacgagcttggtctgcggcgagcgagtttgaacagatgtaatgattttatcgaggttgtttgaaaaatcggagatggacaactggagtgcgtgaagccgtgcaagaggtgggacaaagatgggaaccaacaatttaaaatctcgaagatatatacagatggaggtcggatcagaactgggcttacatgttgtgcagatgggggtaagcaagcatcattcgcaccgaaccagacggtcataatctcgatcttgggagagccatttgtaagttgctcctctcggggtaaaatctggtaggatcatcaccaaacatggtatcagtctactatgtcgaaatacaagagtctaaaatttatacaagatctgttcttgtatcaagacttgcctggtcaaggatagggagtgccctgaagatattacaatgaccgacgatgagcctgtgtatgttcttggaagaaaggagcaaggactggccaaataagatcgcgactaaccattctgtgttgtatcctccgtatcctctgttgatgacatcgagcttacgacagtaagagtcttttagaatgagggcgtgagtatctatcacagtgctttgctaggcaatgaaacagaaggcgatgagtgtagatgaggacaaacaggcgagcctttggcataacgagccttcgtcccaggtctgttgtgaatatcacaagaacgaaaaattgcatcagtaaccgttgggagcaacctgaaacatgtccatcacactaacctgagtgagagagtctccgaaagcaacgaacaagttttgaggggatacagacatcgttggtcggatggagaacagtaacaattcccagaaggtgattaaatgtgcggtttatctaatcttagctaatctttcccatacctcctctcccctccgtgggatatataagcgaggatgaggaggccgtcgtttttcttctttcgccactatcttcatttcttcaagtactcgcattcataaaccacgtccatatatacaatgacatcatccagaaccatcgtcaaagctgttagagcaatcgctcaagcagaaggagccggagcagtcgtcaagcgaagcataggcagttcttcgttgaggtctctgtccccgttccttatgctagacgaatttgctgttggaaaggatgcaggctttccagatgtatgtatatctcctctattttatttgacagtcgctcttattttatactgactagtgtcgttttgcgcttggccgatgatttgtacagcacccccatcgaggtagctagctttacatgttttctgattcgtgagatcggcaactgatgagagtgcttgtgctacattaggtatggcgacagtgacctatctccttgaaggtaaaacagttgctttccgtcgcatcctatttccctcatcccggaccgaatctggtctcacacctcgcttactttggtgatctcaggtcaatttgagcatgaagattttgcgggtcacagaggaaagctcggcccaggagatcttcaatggatgatcggtatggcattctcatcgttgtatctttgtattgtaccgttgtatttatcactatcttgccttgtttttccttcatcagctggccgaggaagtaagctgtctcttcttcaaatcattttcgaacttatgactcattgacatgctctttcttctattgttactcgatcccagttgtccacgctgagatgcccgttgtaacaaaaggcggagtgactcctagagggcttcaattgtggatcgacttgccagaggcagaaaaggactgtgaacctgactatcaagaacaatctgcgcaggagtaggtcccaaatctttcatgtttgttcatctgctttatatggagagttctgagtgtttatttgggtgaatcaatttacagaatctcgaccgcgcacccttctgaggatgtagagatccgggtgatcagcggagaatcccatggtgtcaatgtgagctcttgcagacttcttctcttctcgttagatgatcttattcaatccaaatgggtgtgtcggttattgtcattagggcaaagttcgacacaaaggaggctgccactactacgatattcgtctgaaatcgcctacatcctcggtgttccagaccatccctcagggatggaccgcctttgtacgttccagatcgttgctaagagaacttacttgcatctctaattgacctctatataattcattacagatttacacattgactggctcgctccagatcggagaccagactcatcctgcatcaacaacactggttttatcatctcaagtcgggcaagacggagtggagatcaaggctgctcaagctgagggcgagacccggtttgtgctgattgccggagagcccctaaaccagccgtgagcgcgtttgcttcaatgagcgtgttgttgatcctcaacagagattgttcttacgtctgttctctttttatctatttctgcgaacagtgttgtccagcatggtccttttgttgtaacaagtagggccaaagtgatcgaagctttgtgagtcttcctaattttccatctcacatatccataccaggaggaagctaagatgagctctgcgtctccttctcaaaccatcctcgacagccgagattatcaattcttccaaaacggattcgagagagccaaaggatgggctagtgagatcggaggacggatgggctgaaacggatcctacacctgtactcaaagattgaacttatgaacgtttgaagactggttgttaagatgtatgatgaatatatatatttgattataccactccgtacttatcaaataagtcttgccccgcattcccactcgcttcgcaccccgtccaatccgacgattcgcaaacatcctcatctccatctacattcagaccgttccttctgtatcctcccttccaaccaacacgtctctgcctatatgtcgccttcacatgatgaacacgaaaaggaaaagatccatagagttgaatacccagctattgcttctcaggaagatatgaaagctcacagactgcctctagcttaccgagatctctgctcaaagtacgtctgaaatctctcaatgtcttttagagttctcatcctgcctcttccaagcaggagcttgcttccgatccgagagagacggagagaagggacgtttagaattcatgttgatctggattgaacataccaacttcctcttgtgcctatcatgcttatcctatcggcatcgacagacacttgatcacgttgaaccaatgtcgaaaggccgagtacttcctaccttggaagtgccatgcagaaaagtacgcccgtccatctatgtcatctctttattgttctccctcttgatatgacatagtctaatctctcaacttctgtactttcatccatcgtagggaggactgggaaatgtaagtgctcacaggcgaacatccgatcctgatacttttggagaatcggaaggacgggtctctcgtcttctccttcatatggggtctgactgatccgttcgaactttgaatgatttggcatcgaatgactcgttaatcgcttcgatcaactttggatcgaatgttcactttacaaaatttgactgaatcaatagctgtcaatacaaagagtgagagcgattgtcccacttcaaaatcaagctactgtttgcatgttttgacatcatattcctctctttctttcggttctttacatcactcttctcctggtgtttttaaaaaaaaattcttcataaaagcttcctccgaagaatgcgtaaggcgacccgacttcgtgccgaagctaaggaagatggatcgggtccgatcccactcttggacaccgtgagaacgctgaatgccgtcaaagctgccgaacgaaaccaagaggattagagaccgttgctctgagccctaaatcaaaggacaaaccccggagaaagcatggatgtgtgtactggcgcgttcgctttaagataaggctggtcggaggagtggggattttaagatagtcgataggttgtatgtttacatgttgtcataaatctctcttgagaacacactcttctctttccatctctcttctgctttcactcttcgttctggattacaacgcgacgagacatggataacgaccttccctttacatacactctcgccaaataaaacctagcatcacgctgaaacatgacagtcttttgactatccgctttctactgagaaacttccatgggcgactctgtagatgatggtgtcgagattggaaatgatgatgctgacgacaatggtaccggtggtggcggcgaagttgatgtgggattaattgttgatgatgatgggattgaggatggtaaagttgtcgaagaagttgttgagggttttgtaggtataagaaggccccgctgtttgatcatattggcgatcgcttcgacctgtaccagaaattgaccgaatcttgtcagaacaatcaagtaggctgaaaaacaaatcgtatcgtactttctgggtaacaacttcgatgttggtatcccaccgctctgtgtaggaaacaccttgaaagtcaagaggtatcttctcgacatcgcccaagccacccgccgttgtttgagctacggtgtccgtatcctgatgagtcgattgaacagcagtaatgatcacacaaatgagtcaggaaaaggggaccattgagcgaatcaagtacagaagacggattatattggatcgagcccaaaccgaaaaatgaacacatactcggccttcaaaccagatcagctcatcgatttgactgtagagtttggccgaggaagatcagatatcagaggtgctcaaagaagaagaagaaaacattagacacgaaaagaacaaggaagcgcactcgatccagcctcttaaccgctcctgctcgatcatctttcgggccaacaactcggctcctgctggtgccagatccagtaagacccccaaccccgagaaagagatgttaacgtaaagctgtaccagagacacgcaggacgagacgcccaaatagaacatgagtttaggcccggttatctcttcaggaagtctttgaaagacgctcaccttggaacagctcaacaaattatgctccagcaccgccctatccagcaccgtcgtcggtcccattcgcttactcacaccttccattggttcgtcctgatcctcctcccaatcgaccatcattttcacggctggcagcttcgcgagttgatgtacctgaagccccttttcaaactccaccacctcggccgggcgaatgatgttctcgaggaacatcttggagagtacagtgtaggtcggaagggaagccgttcggtcgtcccgacagagagaagccaaggtccgttgacgagctggtccggcgggtgcaaggatagaacatgtcactgcggccgacctattgacacggtcagaagtaacggagagaacctgtgagcttgacatgaatgatgtcactaagacgagagaagcgaagcgtacagtgtttggagccgatcatccgcatctaaatccgggacccaacttaattcgtggtatcgaagagctgcttcattgaactttctactaaaatccaaaagacgtgcctgtatgtttacattgagatcttgatgagtaacgatataaacaatgtgcttggagggcttctacgatacggacgaaaaaatactcacatgacaaagcttgtaggccagtcgggtaggttgatcgtcacaatcgtgaatgaacattgatgccttgttgaggtctgtccgtgcaaaagagaccaaaaaaaagtttctgtttgaataatcgaaccgactttggtatgtaagcgaaacccgatacttacatgtctgagcttgcccattgtcgccgacctatagaaaatccgttggagggtaagcttcctcacacgatctaagtcgccacctcatttcaaaggtttcctgaggtgatctgacaaacctcgatgagcaatcggacaatatgaactaaatgagccagcttttctgagtccgacatcttcctaaagtaccagatcgatataacaaaacagatatcaacgtctgatccacaaagtatatccagcagaacagaagagatgcaaggccgcgaacgcacatgttactg

SEQ ID NO: 2668 - DNA, 26374 bp, Xanthophyllomyces dendrorhous
tgttactgttgtcgagcggaatggcaatcaacacctgggctgcctccaaccattcttcttcaccttccagaatggtcgccagttgatttctcagcaatgaggtcttgataaatatagtcaaagacggggcgcatatagccatcaagatgtgctcttcttctttagttttgtgcgagtgccaaaatagaacgaacctgctcctcgtagtttccgggattacctccaactttttctaaaattccctgcagtacttccttgacaaggtcctcgtttctatcctcgcctggtctaccgactttctcattcccaagagcgtgaacgacctcggaatagacctgtctgcctaccaccaaggagaccgacgaatcgtttaccagatgatccaccagatcgatcaaacccggagatggatcactgtataagtctggcagtatttccaagtaggcaggaagcctatccttctgtgggagatcagagatctctataagctgagtcgagagagacatgatcccgatatggggagctagagatggtgattattgagatcgtacgcgtgtgaatcgtttgtacatgagtttaatgtttcttacgtgttcccctcgtaaatcacaaccctaacagcttcggctatctcctggatcggagtttgcggtaattcacgtgataagaagtgtcacgtgcgtgacgctcgatcctcttgccgtataaatttcgacaacttctctatccaacattgttcccaaccagcaacatgaactcctctctcttgccttctctcttgtatctttactaacattgtgagtattcaaccgtcgttcttctcgtctctcaaagttttcctctaccccttccctttatgtgatgattggaggcatttggctagatcatcagcccttggaacgtcttgttccttgggttggtatgctgaaaaattccgctaccttaaaaacacctctgaccctacctctacctaccttccttctcgaacttgtcctcctaaatttttgatacattaactgacttgctcttcctgtttcccccccgaatgtgattcagattgatggcgttgtattttatgaattgttatctatattccttcgttctctgagcaaaattaaaccaagtgacctaggttagccaaatataaatacagacatgacaaatttcgactgtccacatccttgatagtccttgatggccttcattacaacgatattatcaaagcactgagattcaatatccctaagtcatggtgacagaaagcagctgattcatgtcattggcggataaacagattgcgaccatagtacgtggtgatattcagattaggacaaagaggcaaaatagaagtactgtagcgagaaataatcgagactgtttcgaaggaataaaggatcaagatagaagtaatagatatatgaaagaaagattcctacgaaatgaatgtcaactcgtcgaacaatttaccctcaatcacgctctctccttcgactccaggaacagtaaggtgaagcttcgcgtcttggtagtgctgataaatataaggcttggtcgaagcaacaacttgaacgaccttcttgatcctgtttaatgaaatacatccagccagccggttgatcagtcagtcatccgtgttgtcttttattcgcgagagtaaaagagagaggaaagaagaaaaaagaacatacaagtagggaatctcggccaacacgtcaaccttttcgatcaaccctttctctccgacctctccacttccagtctcattctcaacccaagccttaacagcgccctcgttattcaaagcctctccggcccactcaaacttgacgcgcgagggaggggagtacccggtaaacgaatcctgaacaagatccatgtgagttgccatcgaggttgtcacagaagatttgtcgtcttcgggttgagggttgtgtagctgggaagtcaccagagagagtttgctgaagaacaaaaaatcgaccttcggggttagatactgctctcgtcaacaggcaggttcgcacagaaagcggatgacttacttgtcgtagacgattcctccaaggttgactttgttccggccagtcccctttccgttgacgccatgctcgtcctgcaagtccgagttgttttaagtgaagataaaagtcaatcagtgcgttcgaatactgacagatgcttgaacaaatatttgaacagacgttggtctcgaactccatcatgatcgctcgcactcgtttctccgctccaggattagaagtaaagaaggcaaagttccaccttcgggcaatcttgttaggctgcataccctgaatggcatggatgaaggtcgcctctccgtcagtagagatggcctttttgtcaatgatgatatgacctgtcgaggtctgcacaggatggaaccggctatacacaagcaggatgaacaaaagtggaccaccttttaggatctcccaatatctcggctgagaagaacataacgtcttcagaacggcaaaaatgtatagacttactgaacagcaaatccatccggcttattcttgtcggttccaaagtagctcataccaccctgagcgccctctccaatcttgaagccaggaacttcttgaggtcggacaaaggtgaccatgatctggagattggcagcaaggttggcattgatgacgtaagtctcctccgtcgaggaagttccagtgtgggtgatcgtctggtgcaatttggcacccaaaagataaacgttggcaactgtcaacgacgtgttcgaaatacatccttgggatgtatttaggaaaaatagtgacttaccacctgatccgacttcatacctttaccggcaggcttgaagtttgtcaaatttgtcgacttccagaaagccttcttggtctttgggtcgaagtgcttgaacgtaaactggacagtggcgggaacaaggaagatactaagcaaaaattgtagaagggtcatattagcaggctggaatgaaaaatgcaacagtatttgaagcgacttacccggtgattgaccagataatctgaaacatacaccaacttccatcagctaagatagcataccaactctgagtttcggtcatgaaccccttagtggtatcgcacgcccaggtggtatcctgttcagtaagcggcccgaaaagcggcccggaagtaggaggagacttgaagttgggtgtgtcggccgaactggagaagagatgtaggtcatcacacgacaaaggatcccatccatataagtcaatgtcactcggaaagacaggagcgaagtacaaccatcaagatgatagatgatggcagtgcgggttttgcatcgcaagaatgctcatcttcttccaacttctttctccatactagacaaccaaacactctctcctaatagggactacagtcatcttctcttcaatttccctagtatcgacagaaagagcggcatcttgatcgtcgatatatgatattcttcgcactagccgtcgcttgtttacttaaatctaactagggagaatttgttgaattgatttgaaactcacacggcgggagaagaagacaataaccaggacatttttgtgaggtctatggagagggaataaaacgagttcagattcaaacgtagattatgatgatggttgaaaagacgaaagatcgaaatgaggtagacttgcctttggccgctagagaggaaccctaaccaatgatggccgatacgtggtcctcttggacctgagtatctttagatcacaagccaccaagatcttgtcgctcatacgtttagtccgccctgattatgtcaggaacgtaacataggttacatcttatttgtaacctgtgacctatagactgtccactttcgctattcccctgtcttctagttcggcggatcatatcttcagcgcattctatacagcgttcataggatctgagaaccggatataaggcgagagttctcggccagttgtagacaatcaacctcaagcctggtttcttcgtcactttctgcttctatctttcatcgtcctcctatccttgttctccattgatcatatcaatctcttcaacctcgtacactcacttcttttctactcattctcaacaaatcagaacacggatacaaaagtaaaaaaaggattgggagagatgaagaacacatagtacactatacaacgcaccaaaatatatatttacagcgcagtcgaaataccaactttgcataacaaaaagtcgaaggctggctgtatggcctgtacccaccatgagccatctggtgctctactctcccgaaattcctgatcgagttgtaaaagaaacaacaacaaggacaacggtcagatgaaagaaacatatgtttagagaaagatgtctccgtgtgaatcagaaagcctgctgcggagactaaacatcgaaagatacgaaccctttcagcatacccgtggattccatcggttgcaattgcccatctggtctctaccttcaattctagcaatttgtcccgaagaaactcgttttgacaaggcggaactaatgtgtctttgtctccccaggacaggaaagtaggagggtatgcggcggtggcaagataataagccgacagattgatccggctattatcttctgatccgtcagtcggcgcggcgatgagagaatggagattgttgagctgggctgtgattcccaagaatgctcgtcggggtgttatcgctttagtctcactattcgagaggaaagtagacgagatgtttataagtcaccgggttcgtaaatatcatggttgcacagaacaactcgatcatcgactgtaatatcacctacccaatgataggaacacttgtagtgacttctccatgataagacatttccgcaaatgctacttcttgaggcttgagctcccgcgcttgctcccaagccgcggcgggtccaggagacaactcactatagatggccggtaaaatggaatgaatgaatcgtgaatgaatatagatagtatataaagacaatcttttctactaactcaagcttggacggcccgtagaacaatatcatacatctcggtggcgagagacctagagacggaagtttcgatatctgaggtgatggtcaaatccggcttggccgtcttcaacacaaacatgactgagtagattatacacaggaagactaaccatacaagacaccaagtgcgctccggcactatacccgacgatagagactttgttgagatccagagtgcgatattggctttgttcgagctgctgattcaatgcaattgataatcgtccatctgtgacgaatctgtacccatccagacagtcttgcacgcaatcgacgaccttcactctgaataggcgcgagatgacaaatgacaaatagagggtatgagaaggagactagtttgacaagtaaacgaaagatgaataccctcttcaccgggataacttgaacatactgaggggcaagtctgtattccaaggaaactactgcaattcctgcccttagtagataattcaccgaatcaggctgaatatcggtcgaggctccgatgacccaactcccaccatggacgaggatggctgagcgagatagacacgcgagaaggatatcaagtaagatgttagagaaccgatctcagaatacgatttagctggccagacaagaaaaaaagcatgttgcataattcgagtagtcatatactaaccaacagggcaaggctcatcaaggactgagttcttggtcgactcaggaagatacacatccatatgacaccctccattctgaacgttggcaagaggcttgaagagaacacgattgagatcaggcaggcctggcatggctgtgagtattccagattgattgagtatttgaggataactgctagacaaggactattgggaagatccttgactgaatacctctccgtagtttggctccgaagtgaatcgggtccggttaatagttaggcccggatatgagtaatgtcaggatgatggaatcttttattgaattgccttttcttcttcaacccacatgtaggatatatatcatcaatgtggttcagcctctcattttaattccgttgtaccatacattcttctgctgcttttatgatgtccggcgcaggatactgtgaggcaacctctacggagcaaggccaagaattgaccggatgtttgttatagaagtcacgtgttcaggaccgcctcagcacgtgaccattacacaggatcgtcccgttgttttcgtctactcgaggacagcaacaaacgtgacccgtcacgcccgctctcgaaaaaatctgtataaattctgctgcttgaacgagatccagtttctttttccccacttacaacagcccgaggctaaccaaagatagcgaaccgcaacccctatgttcgattcatcgatggagcctcggtgagaaggccgccaattatagtgcgtagaggaggtcttaaaatatctttctcctgagtcttaaggagaaagttttttcgctggcattccgatagctccaccgtagttctgtttgattctattgaatggatgttttgacaaagagagtccgttctgttgatgcaagagatcatcttgacaaaatctgatgatctcaatcggctgaatcacaaaggcaaactcgatccaaaatatctaagaagtatgatgtaattcgtgaaaaaaaaaagaaaaaagctcagagcaaaaagacaaagacaaggaagagaatattctacaaagcaagtaatgttgatacagattacaatggcgttcctccacaacaacgcctgaatcgaaatcttcacctttcccacctccctatgtataatggcccaaataagaaaataaacaggcaaagaacaagaagatttggtaaaaactctgcaaattcatgattatttatttataaatgataagatatcgtgatagaagcaagcatagagaacggccgcgatagatgaacgacttgaagacaagcagtcggcatcatgtccatgattccggaccgaaccgctgtccgtcctttaaaattttatacgcagggtgggacttgtcatagactgtgttgccccaccatgtttgtatcgtgttctcgcctaccttcccatctttagggaaactcagagcaaaaaaaatgacaatggccgctagagcatagccagcggagagagcggcgctacattcaagtgagaaaaaaagaagaaagaaagaaaaacaatttagtcaggttcaacttgcaatcaatagtccgaattgatgagaacatgttggtcgcccttacgataggatataatctacagagtcgttagaagaaagaaagacgattagatacgcctgctccacatcaatcgtttgacaaagaaacttactataacgactccaccaagcaaagtagtatttacgcgcgactaaaattgatgaaaaacgacggttatagtatcaaatgacatgatcgatgttggatcaacaagagagaaagacgagaagaacggcgcaccatattgaaataagaagttggtatagcagaaggagctaacgctgtataaagagtcatttttgagaaatgccgtgtcagtaaattcaatttcaggtatgatacgagaaacaaagaagcatacttgatcggcaggtacggtggaacgagctaagaagaaggacggccacaacgacaaacatcagaattgtgatccttctctcgtgatgatattagatataagtgtacataacacatacagcggttgtcgaaaacacgaccggccaattgacaaactgagaacgaaggttatgtttccatttggactcagtgaaaccagttcaagcagaaggattgatacatataacacttcactcaccttgtaccatttgttaggatttctcttagctagatagtagaaaggaaagggagccagcgcccctatatgaaatgaaggttgaagtcaaggtttagcgaccatacagtctgtgcaatatctattctaaacctgtttaagtgtagaacgatacacaccgacaaagaatccccatatgatagggtgatataccttcccgtagctgaactgacgggctggtccaacgagtcccctgtagaaacatcgtatgtttcatcagtgataataacgatcgagtcatctagaatgatcaggaagcaaatatgagaaaagaaggacaacgaaccatatcacagaacttgtaccaaacacttcggatggcagacatgaaaactgggctaaatttacaagaagggtcaacctttagagtcttatctagttatatatgtggagacagatattaccggtacttgacgttcgagacttacggtgactcgatgtacacactgaagatttccaaaacatcaggtcgaatcaggaattgtcatcaacgagctacgcaagcccctgaataaaccatcaaccaatctgccactcactgccaggtacgttcgtaaatagccattggccaacgcccacttggactagcgccgccaagatggtagcatggatctgagcgaagaacatcatgcgtggtggaactttctgtgaaagatatcatgaacgacgggcgattgtttaacagacgtgcttataggactcaaagtacgacacttctcagcaaagtcttgatagcgagcagaacgtaccatatagtgacccatcttcatatcgctaacaaaatttattccttgggataagctaactgcagacgtgttcacgttcgggatcacagagtgttcgtccaaaacatcagtcaaaaactaagggcttttcagttcaacgacaggtctagtacgactcactgtaggaataagttttgaagatcatcatcgagattggacgcccaggagcgatatagccgctggttcaacccaacaagaattcaaaatcagcatcatgattgctgttataagcatcaaaatcacgatgcgaggggcctgtaacttacatgatcagttccgaaatactaccgtatgatcatcatggtaaacgaaagagaatatgacgaattcgtatctggtaagtttacaaccacattgcacaaccgaagtaaactatgcttacacgttcaacgcaacctgttgatttgtgatcgcctgaacgatgccgactggcaaagcgaatacggccactataacaagcgccaggattaaggtttcaaagggcatatgcctgcgatgagattttaggtatacccgcgagcagacgaaatggttgtcacatcagtcactatattgcaagagcagtttttgttagaaggagaaaaccgagtcagcgactcacgtctcccaaccaaggattgcaccacaggctatgaattcagcaacaaacaagtcaaatgtatacatcaacacttgaccacaatctgcaacgatcggcaaatagtactcaccaagactgaagttgataaccagcgtggcaagataccaaagatctgtggtcatgatgaacatgtcagcgctaatgagttagtgtttctttctatacaaagttgatgcattcacgtacgaggaacttctttgtagcgtctcatgagctatgtcggttcaaaagacgcacgttaagactagatctttctcattttgagagggaaaaaagtgaaatcgacgaacccgagcgtggatatccgtttcatccgctaatgaacgacaagcttgttcacgtatctatttgaaaaggtcaatgtaactcgtcagatactgaattgtatatcggaacacccaaattcgacatgactgactgtttttcgataataaagactgatacacagcataaaacacacacagcgttagacagatatatctaaatactgagtctcggtgataatgattgaattctgaacgggcgtacaaggtatgaaccaacgttgccgtcaagcctgcaaaattgacagctgtttgaaaccagccaagcatcatcaatacgctgattattaatgatcaaaagagagggttgagtcgagcaagcgcaatgctttaccataggccatcgtgaatgtgattcttcaagattgtagagaagggagcgaaatacaattagaatggcttttcatctgaaattagtccaaacaataagctcgaactaacggaaggtagatctgagagtattcgtgatatgcactaagaaacaaaagatgttccgatatagttgacatagagtgatcaaccgacgtctctgcatttcacaaatagatgatcctgtcctcacgtttcgttgaatccagcatctgtagtcagaatccgagaaatgttgtaacgagttgctgtgttgtcatactattagttgaaagcggagaccgagtgtttggtttgaagccatcaatctcggctttcgtatctcgatacgagagaaatataaagaaacaaggtacgaacagatcctgagcccaccatgggtagataccaggcatcccaggctttttataccgatcgagcaaataacattagttttatcgaagatcaatccatcagtatggttggaaagcacaaaatatctgtgggaagtattcaccgcccgtatagtataaagccgggtaaaggatgcacagtatagacccaaactaaaccccaaagatgtagaaaattgctcgagagtataagctacgtctgctcactagatatcaagtactgagattaaggacgtaccccaaagaccatatttgcagccgcccaccaaggcattgcgagaggatttccaatcgtcgagatgatacccccttattataatcgcatacaaagaaaagcagagttggagcaaggttttctctctctctctcatatatagacgcgagagaagatctgactgacagtcgaacgttagaagacttagtccgagtccataatcaactgtagagaaaatcacatgaaccgcctcactcagtcaagaccttttgacgaatatatgaaagaagaaagactaagtgtttctcacatccaaatatctgatcgaccacggtattgtctttcacactaagaacacgcaattcacgataaagaatcagcttcaacatgagaaagcacagactacgacgaagacaaaatagagaacaatctgagtgcagacatacatccatgtcacccaatcaaatgtactcagcgcggtgaaaatatatgatggactggtaggaagaaaaacaaacgatccggccgtatacagatcagattcgaggttcaagaacaaagacgagaaacaccgaatgacagcaacttacaaccatgaccaaagaaacatcaaaaacatcgctctaaaaaagaactacaagatgaacagaggcagacgcgtcagtcgatcttttcatcgagctcaggactcgagcgataaaagagaactcaccttgtctcttgccagacttccggaatatgagcctcctccagagctcatactgtgcaatgtgttgagcaaagctgtgttgaccaaagccgccggccatatcatcgcagccggataaacaagaaatcgacgaagaagacctcccatcgaaaagccgatgagttgggtagaaagaacgagcatgatttggtaggcaaacgaccaaacttgattgtaaaagtatcgttgaacggtgatgatattcgttgcataggccgtctgttgagcaactccagccatcacggtgattagagtgtgttctttgatgttaaatggtccagggtttaagaaagaattgtttgacgggataagtttggccattaataggccgagaggataactgatgagctgaatgacgagcgccgagacagtgaccgttggatatctaaagtagaaaaactatcgatgaggaggccgatatagagaaggacagcgttcaactgataagtagcttgcatagagacttttgaacacagaacgtgaaaagacatacctgattgatgcctgaaagaacgacacatcccacacttcctaacaaccaaactcttattgtgttcactggcatcgtcgggtcatccgtgttgctcaccgccgctctcacttcagcataaaccgaatcttcttcaccctcaccgaacccgtaatcggtatatacatcatctccactaaaattcgataccccttcgccttctctacgtgatgaagacgaggaccaattcaaaccagaaggcagagttgaaagcgagtattcaggattgactccgtcagagttggcatctgcagaggtctgccaacggttgagagctgagcgttcccggagaaggatcgagtcgtcatagtttggatccaacagatgcgatttatgaatctaagtcaactcaatacagaccaagaccatgcccatgaacacatattcatagaaaagcacatcagcaccaaacaactgatcgttgtgtccaaactcaaagaaggaggaatgacagacctctcgaagctcatccaagcttaagtttgactgccttatccaacttccgttcagccctttatcactctcaccttccctcccttctccttcctcttcttcaagcaagtcttgctcttccatataagctaaatattcattccggatggatgacgatgtctcgaaggagagtgatgtttgcgttcctaccgactgagtcacgtttcaatcaccaaaaattcagtcgatcccagcagaaaagataccaagaagaagagcagatgatagaaacgtaagagaggaaaaaggtatcagtcgcgtgcagccacagctgatgggaggctccagattggaccggtccaaactaactctttcgcctgacatgaccgtcctggaggctaaccgctgagccaacatgatttatcgtttcccccttcgggcctgattgattcaggtggagagtagcagcagaagcaggaaaaggtatgaggaggggcccgtctgagaggttgaagagtcgtgcacgggattgagcgtatgatctgctgccgtgcttgataagatgcttaggagtgagagagcagagtagtcacggcccgatagattgagacgacctagttttatgttaaccttgaacctcttgagcttgcaaggtttaaaaggaagtctgagaaggagctgtagggtatgtaggtaggatgatggccaagagcgggttctcgttcaattcacatgtggctcaaggccgccgtcgtcgtcgctttcctccgatcggtctctataaatgtggtaaggcaaaatcaagattgacaacagaaaaattaaagatcagatatgactctcatggttttgttcatacatgggcagcgttctcagagcatacttattgcttatcaggtcgatcgttgtatgacggccatccgaccaagcctgattaagcgaattgattagagatattacgggacagcaacgtcggatattagaagaacactcttgacccagaccggattaatcaatcttatcgtctggcacaaattttatactaatctcgtctttcgacacatagaatctgagcgaaatcaatctatatcacacacagataacctaaaacagcagagatcaacacaaagtagatgagttcaagagatggcaattaatatgtaaagagatgtagagagtatagagaaaaacttggtctaagaagtcatcagcgatgatgcgcggccacaacgagaatacaacgtatattttgggcgaggattcaacctagctcagatgctcaacaagtataaaactatggacctaatacagaattcagatcaaacaaaaagcactagataaactgaacttaagagacactatcacgttcatcattcaagaccgtctgacgatgtattgtctctccgggcacggacgataccggtttcctgatgagcccaaaatgctttcgctaagcatagcaaactgataaaataccatcgcacgtaatacatggcagtgtgttagtcatctgagttcatccgtcgatatacaacatgacacgcctgcgcctgcgcactcacaagcaaggagggatgtacgacttgtactgtatatgtcctaacatctcggcctccatgctgttaatttcttccagcgaccaaggcgtccggcgaacgaaagcgatgttggcgtaacatgcgtccgatatcatcttggtagccaataggaaagaggaaaagatcactcggagcgccgtgtcttgaatgcctgtgaattcagagagagagaatcgtatggcgtgggtgagcgaaagagagtgttgaagaaatcaagaaaatgaaagttcgattgagaggcttacgtcctgtagtggtgatgagcggatgaatcgccttgagtagctcaatgtaccaaatcgtacagatcaacacgacgagctgtatccaaacggatcgatcgtcgaactcttttaatcgatgctctgatctgtcttcaaatactgcgaaggaagcgaggtacgaaccggatgtagggtcattgacgtccagtgaaacagatgtcttgccaacgcttccctttccgccctgatctggtctgcaggcatcgacctgctcgtcagacgcggcagcaggatttgtatcatgtctatcgccagttctaatgaaaaggaggcaaacaacgatggtcaagacctgcgcactggaaatctagctcttcacacatgactaaccacagtccattagggttgcttcagtttccatgagctcatacatctgggccttattgttaagatccaacgggattcgactgtggatttgactaggaccggaaaccgctgtcgattcagacaactcgtccggatctgttctctgaaagttttcatcccacgaatcggtctcttcagctgacagcaaggacgatggtgatcttgaggaacaagacgtcgtcgttgaagatagttctgacgatagagatgacggccctgatgacagagatgatagccctgaaaagggaccatgggcatgcttttcaactggaacgatgttgcctgtcgggacagcacacagacaccagcctggctctaccgaggacgacaggtcaacgaagccctcgtcatctgtgttcagataggctgaagttgaagtttgggcaagcagaagagagtcaatcatttgaggaaaaaaaggatgactgaaaggaggatctgagaaacgatatcctgatgaggtggcggtaagaaagaagaattcaagaacaagagaacgttttcccccatatcttccatgtagttgccactcatttaggttggaaaaaggttaatccgacggatgaagggacaaggagaaaactgaatgggaagaacgcacggttcgcttgattgacggaaagcatacgaagcctaaaaaaagatgtcagagagttttccgatcaatagcgcatccaggttccgatcgactccatcagtctctcaagacgggccgaggctgccttgttcttaattgttttatttgtgaaggatggaggataaagagtcggtggtcaagataaattggccgaacagggacaggctgaaatatggaccagaggaaggtcagagggccttggtttgtatttgcgatgtaagccttgtacgtcacatccgactcaaccgaacataggcaggcttgaatcagagcgtcttgttaatggtaatgctcgagaggacagaatggcggagggcaggaagatggaacaagatcgatagagcaaagaggcatgatcatcaaggcatagaatagatacatcaagtcttaaacctcatcagggtacagctatgtttcccaaacaaccacccatcggattgtagaacaaagatcagtcatgaggaacacaggaagggagtgaagattggggcaagagaacacataccataagctcaggtcggaccttatcgtcgaactcttctggggtgagtaatccgagcgacacagtagcttccttcagggtcgttccctccttgtgagcctgttggttaccgagtgagcaaagtgagagaagcaaagagaaatcagtacatctttcacatgagtcgacatggggttgaccaaaaccgcaccttcttggcacacttagcgacgttgtcatatccgagatggctgttgagaatggtggccaacataagggactcgttcaagagagtggagattcgcttctcgttcgcctcgattccaaccacacagttcttggtgaacgatcgggctccgtcagagagcaatcggatagattgcaggaggtttttgatcaaaacaggtttgaaaacgttcaactcgaattgcccgtacgatccggcgaccgagatggtcgtgttgtttcccatcacctgggcggccaccatcgtcaaagcctcgcactgcgtcgggttcacctttccgggcatgatcgacgacccaggctcgttctcaggcaacgagagctcaccaagaccacatcggggaccagaggcaaggtatcggatgtcgttcgcaatcttcatgaatgaaacggcgatcgtgttgagcgcgccagaagcctcgacgatggcatcgtgggcggcgagagcctcaaacttgttgggtgcggtgtggaaggtgtatccggtgatggccgaaatctcagcagcgaccttgacatcgaacccaaccttggtgttcaaaccggttcccacagcagtaccaccctgggccaacaagctcaatcgaggaatcacgtcctcaactcgagagatcgcgttggtcaactgctggacataaccgctgaactcctgaccgagcgttagcggggtagcatcctgaagatgggttcgaccgatcttgatgatgctctcgaacttggctcgcttgacctccatggcgtctcggagctcgtgaagggcaggaaggagcgaagcgttaagctcggtcacggcagcaacgtgcatggcagtggggaagctgtggagagcagaatcgaggttggtcttgtcaacagaccaaaccagaactgagcatacttaaaaactatggactaacgtgtcgttggaagactgggacatgttcacatggtcattgggatgaacaggcttcttggatccgagctctcctcccatgatctcaatggccttgttggagatgacctcgttgacgttcatgttggtctgggttccagatccagtctggaaaacaactaaggggaagtgatcaatgagcttaccgctgatgacctgtattgcttccaagaaacgaaccaggacatgggtgaagaatgatcagtctcatagccgaaatagctctatacaatcagctcactcacgtcatcggcagcggtctgaatagcgtcggcaaccttctcatcgagacctgaccgtgagatgatggatcatcagtgtttcatgctcaatgacagttttgctgtgacttgtcaaagagcttggacttaccgtaaagaacgttgacacgagcggcggctttcttgaggactccgaaagccttgataagaggaggaggcatcttttcggttggtcctccaatatcgaagttcaaaagagatcgttgggtctgagctccccagtatcggtcagagggaacctcaaggggaccaaatgtgtcggcttcggttcggtgagaaggggcggactagacggtcgaattggcatagcaggaaagaggaaaaaaaaacatcagacccgacttctacagaccgagaaaatccgaaaggacaagctcaccatggcgagggaagatgagatctgtcgggaagcaaggaaaggaacagagctggcgatggaggacttaggaagctgatgagatggtgatggcgatggcggtgaagatggtgtgagatgaaagaacggaaaagaaaaaaaaggtgtgaagcaaggcgagcgtgatggacagtcagctgattggaaagcggatggacgatgaagaaaagacgagagatctctcgttctaaaacgatccgatgctctcttggaaaagaagaattgtaaaaaaacaaatacttacccgtctagcagaagagatcaaagcgcgggtgaacataagagaacagaaagaagcgaacgacaaagagaaggagaacgagcaagtgaacaagagagcagaagaaaaaaaaaaagggggagaggatagaaggacgccgagcggagccgggaaagagagagtgatggttacgattttggctgctcgcacgtggttttgggtcacgtgattgacacagctccgtccgatggttacgctcaaagatcttgaaggattccaacttgatcattctccagttgaaataaatccttgatccttgcccatccactttagctctctagtctgcattggttgtgtttgagatcaggtgcgttgatcaatagacgcgttctagtcagctcctggtatgtatcgaacttcaggctgaccgttctttgtatgtgcatgtgcagtcgtggtcgctttcatttcttatagaaccggggaaagattttccccatacccgggaccatccttgccgttccacctttctcgtttctgtgagaccatatagacattttaaaagtcgctgttgtcagttctttcaacgctggttatcgtttgatatgcctgctgctagtagcatactccatactatcgagctgctgatattggttttgcccttgtctcacgcttacagaccaataccttatttcaggtttctttcgtcaaattcagccgatccaaccttattgctcgcttttctttcaacttaatggagagaatagaatcacctcgtgagattaatttctaccttcacattctttccatatgggacaacatatgcaaccgatgatctgattcgcatctcccatgggaatcgcagataaacgtcgtcgactctccccctcggcctcccccgcaatttcttctcctaaatcttttacatctagagaaccttctgcacccagctcgactgtcgtcaaacatgaagacttagcgggtgcgcacgtggagcccgtagagacctcttctggagtgagaataatggatgaagatgagatcgtcaagctgcctgctggaacgttgccttcagacgtcgcctctccactgcccatttcgagctcgaccgtcaatctaaaatctggtgattcgaaaatcaacaaggctgattctatagaatctcccacagatgatgtaagacatctctcttccattcttccgttagaacgatataagactcaatgcggacatccacgttcacacgactcacatatttggattggccttacttatttcttggcgcgcattcttctttataggacgaccccttggccgaaattgatttttctcttttatcccatactccaaacgttgacactcagaccaatcttgcgctgtttgatccttcctcaatggttctcgatttctcatcgcttggccagtcctttttgtttgatcttccaaccgagctcgaatctgcgcttgccgctgcaaacggaaatggacaatcaggtgaggctgaagttggaggggaagctccaggtgtcgctgatggagttgggctcgataatttccttggtctaggacatggtgccaccggatttctaggcggaatggctagtgtgggcgcaaccccgttgggaagtccagacttgaaagcgttagcagagagcttagtacaagattcccctgcggtctcacctaaaccgcttgcgctcggaaaaccaggcttgacctcgaattcgaaagactcgaatacgagaccgattgtccagtcgaaggccgaaccgactgtttccatcatatcctccccagcaatcccttctccaactccgaaagataccccggcagtaattcctctgacggttgaactctcccctccaatatcttctcctcctgtgatctcaccatctggcgctacctcgagtcgggcgtcgacacctgttgcagccgtggtgactgttcgcccaaatctatcatcgagtcccaagccaaaatccttttcttcctcgccatcgctgtctgttccttcagcatcttccacctctacgagtatcgtttcatctagtacatctatacaacctcaacttagtctacctctcaaacagtctcctgcacctcgacctatgcttcctgcaaccattacaaagccgattctggcagtacccaaagcggtgcctgtagtcaaaaaatctgtcatagctaaatctaatccgacgccgacgccgacgcctcctattgcacgtcccccaacacatccccctgtgccggatgtttcaacaacaaagtccaagccaggtccaatagtcgctttggacgatatatctctggatccaaacgctttgcccccggaactcatgtcgttcgacttcgcggcgttggaagcttccgttctggcaggaatggcacctagtgaatcttcctctggtccaaccgtgacttcaactaacactgatgctaccgctgctaaaacggggacagccacaactgctgcccctccgcctctagtcaacacacaatctcttcctactcttcctactcttgcatctacctcttccggtgcacaaaatcatcccacaactacatccggtccgacacacagctctttcactgcgccaggtccagtccacatctctagaccaatcacatcccaagctttaaagacaaaccaacccgttggaacaagatcacaaaccgctccggtccctaccttacgtacgatgaaccctgccgcttacggtcgaccgccagcacagaccgtaaatttgaacacggtgttaacaggaataaactctttactagcgtcaccttctatcggccaggcctctgcattctcgaccgtgaatccagatatgtctactcctggatcaatgtggtcggtagaggacagaaaacactatctatcgctcctgccttcttcatcgttggtgcagatcatcttgaaactaacggagactcatccaggactcatggcttatccaagagcattgagtgatgtggtacttcaattggaagttcaggcgctcaaacccaagtcagttcctcaaggtggtgtcggtgttggacacagggttggtgtggctcaatcatcagtgggcgtagtgggtggacagcaacagaggtatgccgtcaggccaggtggtcaacctgctcatcaaactggtaatgttcagggtaggccggcattgtatcatcctccgggagttagaccagtcggggtaagaccgggcgtcagacctgttgtaggtggtcccaaaccgactttggcttccaacggcggcggtggtgtaactgtgagggtaagtttctttttcctttgtctggtaatttcacaggcttttcgaaggaattgccagttgatccttctttcgatctcactctttatcagccttcggcttcaccaatgactccgaccgcccgacctcgagcgatcaacccactagcgaacagctcgatgggtcggagttccaatccaaatgcctcgttaacacagaatcataatccatcgattcgaccatccggtgtacctcacacaatccctaaattggcagcattacatacatcttcgcctccttctgctgctggtggtacgaattctgttcgtccgaaaggagcgggcgtaggtagtccgctcagcaggccacctagtttcaatcaagcccaagcccaagggccaggacagggacatggggcggcggctttgcaagcagcacaggcccaggcgggaatggctgcgttgatgagtcaactcttaccctcgaggactcctagtcctgcgaccggtcctactactaacggcggaagaacggtcgacggaaacgggacggtaccaaaggggcctacttagttgatggtcttgattgtctgtcaatcatcatagcattcttccgttcgatttatggagggaaagtcacataaactcatctgtatttcttatccgagtcaaacttgaatcagcaacagcgagtaaagacggaagagatgtcacgcaaaagatcagacaaaagagaaaagcccaatttgagaggatgatatgtgacaattattggtcaagaaaagcatcaaatctcgaagacaccactctagttctaatcaaacttgatactgtgactttccatctaaaagtgttcgtacgatagaacaataaggtatacattgagtcagatagggcgaatgaccagaaagagagatacgaaaagagaagaacgaacggtgatctctccacctctgtagcttcctctcttctttttgtttttctcttttcggaaaccggctcctcgggtaacgatgagatctctagacgcacgctctccgtaatcgttcgtggttccaccctaagaagagataacacgtgcgcgagatgattagcacattgccttttcggttccaagcaagaaacaacaagcaaaccaggcaaaggaaaaacttaccttggtgtcaaacgcgttgctcttcaacctttcatcatggaaactgacgtcggcctctttgatcctctggaatcgttgaccttgaactttaccacccttctttccgtttcctgtaggtgagctgtatccactgtttgaatccgaagcggccaagtcggcttgcttgaaccgtttcattcgctcgtcgaagtgctcctgtggggtcattccggatgcggtgacgggcggaggagtaggggacgaggcttttcgcttcagtgtggtggcggcaggagtgatcaaggtggtggaagtggtggtctgggtgataaccgaagcgggcgctgtgaacgggtcggctccataaaaatgtcagcttgaaagagtttgatatcaagagaagcaaagggagaaaagaaactcgtaccatcatcttcatcttcatcatcagacgaagagctagatgagtcggaggatgacgaggagctggaagactcagagtcagagtcggacgagctggaagaatcctcagagtcagacttttcttttttggcggccacaatgacagtgggagccttaggggtgactggcgcggccttggagacctttttctcatcctcactctcagagtcctcgtcatcactgctgctgctgtcgctgctactactgctgctactactactgctgctttcatcatcttcgtcactcgaactatcactcgagctttcggccatcttggtatctttcggcacgatgatctgaaccttcttctctgcctttggagtgtcagccttagaggcagcgatgatcttggcagcaggcttctcgtcctccgaatcggaagagtcagaggaggaagacgaagatgaagaggaggaactatcggagtcatcggaatcagaactggaatcgtccgaactagactcatcgtccgaggcaaaactttatcaagatcaaacgaaattttcaaacatcagatggaaagacgtgttcaaggcatagagggcatagcaaagtaaatgaggtaggctcacgcgagagcagcagcagcaactagctcaaccaaagactttcctcctgccggaggagctgccactttctgatcaagatcaatcaagctcttgacttccttcttgagggctgcagcagactttgtgtgctccctagaggtaagaaaagcgtagacgagcctgtaggcatctgaatgtgaggaaccagaagggagcagattgcagattgcagaggacagtcagcccggaagaccagatgatgaaaaatcacgagaacacataccgagaagactttctttagactctgacattgtgttctgtgcagtttggattgtggttgaataagttggactcttcaaatgaggagttaggcaaagtaaagagtacaagtatggggagaaagaggagaaaaatcaagtgaaattctgaatgaatgaacctatgcagcgatcacgtgtttgtcacgtgaaaaatcacgtgccgtactcgccactcggagatcgagccgtccgcaatttccttcggccgcttgggcccctccaataagatttctttatctgtgcgggcgaatgagaaaaggacagagcttgataatttttctttacctggcgcacaagtcatgaagacagtaaggatggcagaaaaaaatgtcaagaaccagacaagactcctcatgagatatacatgctttgatgtgaagagtgagagagagagagagagatcaatagaaggagagaatgaggatatacctacactaaatatacgtgctgcgtggtcactttccggtgacgtaagctttgatgattggccagtcaatccggtaacgaaagacaaagccgcctccttttttatcccctcgtttgattttaacttctgtccaccatcgaaggtatcagcaacgacaacgagcagaggctagagacaaaagacagtacagtcagagtcctttttcgttcatcatctctcaccatgctcgcctcgaggttacctagtagattgggagctgcccagttgagagccatccatgcacactcgtctcggatgaccactcattcgtttggagctgctttcagaactgttcactcctcgcctccatcgatcgagcctgcgtccaacaagtctcttcctgcggcaacatctgcgactactcctactcctgctagctcatcgaccactttgcctcctcctcctcctcctcctcctcctccttcgacgatagccccgaatgcctccactggtggcgacgggtttgaccccagaaacaatgcctttaccagatctatcatcgttcggatcctagccagactggtcttttcgtctgtactcggtatctgtgtcgtcactggtgtcattcttggtcacgacgctctcacctatggtacgactcacgtggaaaaagtcccagttcatccgttggccttgaagccggagaccggagggccgaggaatctcccgattctcgccagggatatcagtgacatggagaaggacagatctcgacacaatgtagactcaatgggagtcgagaccgaaaagcccaggctagttatcgtcggtggtggttggggagtcagtatcagttcattttgtgtgctgtcttgcatacttagttacgatgtgtgcatagctcatcttcttttttctctttctttttttccctcgattcccccacatttatcaccatttacgcagtccgtcggccttctgaagactatccgacctggagactacaacgtcacggtcatcgctccggacaactattctctctttgcgagtctcttttcctatatttgtgttcttgttttttcccccttccagcaagctaacgattttttcctgtattcctttctcttaaatcaagaccccgctcctgccatctgctacggtcgggacggtcgagactcgatctttggtcgagccattacgacgaacactggtacatattggtttcagaagacttcaatcacgttcagtctctgagttcaagcctgcctgacgttttattatcttactgtctcttacactcttacccctccaggctcgagtcagaggtcacttcatccaggcaaaggcggtcgacctggagatggccgagcagctaatcgagatcgagacctctgctggccagcgagtttatgtgccttgtacgtcttcatctttctgactacaatctctccatgttatcggtatcgccattatctcagtttttatgtctctcactaccctttgggtacgttaagacgacaagcttgtcatcgcttgtgggtcgtcttccaacacccatggagtcaacggattggaacattgcttccagctcaaaactattccagacgcgcagagcattcgaagacgaatccttggtatgtttattcagcctcgttacatcctcccttcaaccatggccttaccttatacgatttcaatccatagataacttggagaaggcttcgctccccaccacctccgagaaggagaggaaaaagctgctttcattgtgagcccttttgtttgctcttcgatgagtcttttcttatggaaaactagactggaaccagactgacattctattgtcacactcccagtgttatctgcggaggtggaccgactggagtcgagttcgctagtgagctaatcgacatgatgaacgaagatgcattgacctatgtgagtcggtcttttgtccgctcaggattctgcattctttcttcgatgtctattctcatatcggattttgttcgtcgcaatcaacagttcccaaagcttttgagaaatgagctctcggtttccattgttcaatccagggatcatatcctaaacacttattccgagaagatctcccagtatgccgaggtgaggcttatcccttgctcctcttccctcaaaacacttctgattactctttgcgctttcataaacaggctcgattcgcacgaaatgaaattgacgttatcaccagtacgtctgtttcgcatgccacttgttcactttcacaaacccatgctaactccttgactccctttccgtgttgccttttttagatgctcgagttcagagggtatttgatgactcggttgttatttctgtcaaggatccaaagaaccctgactcgaagccagttgagaaaactcttcctagtggtttcaccttatggtcgaccggtattgctatgaacccgttcgtctctttccacatctccatgc

SEQ ID NO: 2669 - DNA, 40389 bp, Xanthophyllomyces dendrorhous
caagcatttcgaacaatacagattcacaaagactctggtacaaaagttgcctaaccagttccattccaaagctgtcgaggtgtaagtcactatcctttacctatgtgtttgccttatcgagaaagagacttccagctaaacaagcatttttcttcgtcgcagtgacaatcacttgagggtgaccggtgcgccgaaaggaaccgtgtatgctatcggagatgctgctactgtgagctcctttctgagctcttatgttgaagtgtatgtcactcatgctgataacttcatgtgtgccacagatcgagaccaagctagtgaatcacttgttggagctctttgacgagtgtgatgtcaacaaggatggcaagattaactaccaagaatgggagaagatggctgatatcatccgaaagaaacacccgttggcggagaaacagttcatcaagatcaaagaaatctttgatcaatacgataccgacaaggacgggaaccttggattgaatgaggttgccgagatgtttatccgaatctccaacaagatcaccacccttccgcccaccgcccaggtagccaaccagcagggagtctaccttggccagaaattcctaaagcttgcgaaggaagtcaagaaggaccccggttcttctatccttgccaatgatgatctataccatcctcatttccagtacaaacatttgggatcccttgcatcgcttggttcggcaggagctgcgttcgatctggatggcgtaggaagttttgctggtgggctcgtggccatgtacgcctggcgatcgatttactggagtgaacagactagtatgaggactagggcaatgttgatgatcgattggtgcaaacgaggcttgttcggtcgagatatctctcgagttcgttctgttccttttttcttcttgaccctcttagctcgctttattaaaagttgtggagatctgactatgcctttgttttcccttccacagttctaattaatcttttttcttagccattcctgtgagcgattgcctatgatcagatcttacactcattcgatacaatacacaaaatagtcctctttcgactctgctcgatcgatacatgatactccgcgtttcctctttctgtcatctgttctacctcatgctcttttttccatgtcctgccctttttcaaaccctttttctttgtttcttcaggaaaagagcgtgtatatccatcttctcttcttctcatcataagtttatctcataccgtttcaatcacacatagaatcctttctctttccttttgctccttcgttagtatgctctcgatcattctgttctgttctgtctttccttctcttgatcgaatctagtcattcacgcgcacctcccgaacaataggaagaacaaataaaaagaaagttacgatgtgctgctcctggttgccttgaaaaatgtatcgatagaataagagctcgcggttctgtcctgcgcccctactgctatcgttgcgactgatgacgatagatgccgataccgaaatataagtctggtaaacataactcggccggtggacatactcatatgatctccttcacatttaacatgcctcttgttgtctcaaaccgattgaaatatgatagtacagcacggtaaaaaaattataataaaaaaagagatgacaggtgtgctgatttttttgatttgatttgatgagtatgcattgattatggtatgtggtatataatgtatatggtgttcaggatatacaagaaggtagaggaaagtgggtatcaggttgaagcgaataaggtcaactggtataagtcgaactgagtcaaaccaagagttgaagggattatggatacaaagggattatagtgcagagaggaaaaccctttagtagaaaagggtgtttatgaatagaaactagacaggcaccgagaaacaaagggaaagaaggagatacgtgcggtgaacagaggagaaagaaaaagagaaaggaaggaactcgtgaagaatgggaacaaaaagacaaacaggcatcttaactacttccgaaccaaccacccacccatgacttcctacctgctcctgctccttcacctacatccccaccggtacctgcgcccagattcctaagtctgatgagcgcttctgatgattccccttgtatgttctctcggtttcctggttgaactgctcgaagcgaaagcgagattccaaccgtgtcattagactccactggaaggtgtcgacttgtgctcacaccggacctctgcgcttcggatgggctgttcgaatgggtcgtcgagaagacgatggaagatgatgatggtgagggttgttgttcaggaggaaaggagagcgagtacttcatctggttcgatcgtacgctcatcatcgacgttggaccattcaatttaaaatccggtgatgtttctctgctctgcactcggccgggggtgtccttcgtcgaagcgatatcttgtgtaccgtcttcaccccatgatctgaccttcaagtggtcatccttttcctctagacacacctcgtccgtccctttcgttagcctgactcgtgctggaacaggtccattcgtcaagggtgaagagccgttcgcgcttagttgaactcttttggaatattgagttggagaggcgtcagagacgtcaacaacaggggaggaccgaacccttatgaacgatggggcgcggttggttgttgtcgaaggggaccatccttttgccgtcgtggtcgacgtcatcgacgacggagacagggatggagacgatacgggaagattcgaagattggaaagaggaagacatgcctaccgttggtgatgaattgattcttcctaccgacgacaagccgataggatctttttgttttgcagatctggccatagttgcctgcggggacagagactcattctgatcggattcaactctcgagatgtcagagatttctatcgactttctaccgtgttccgatgcggattttagccctgaggagagaaaagtcgtactcgatggctgattgcttggtcgaccgcccagaatgcatagtgtctcggctgtcagcgaggtcagggtagcgttatgatcgtcgtctcgtttcgatcgacattctacggatgaggcaaagtgatgagcgtgctttcttgtctcgctgattatcacaagtccttggcaaagcaagaaggagaagatcggaaggacttacgagtctcgacccaaatccgacccagtgcgccatcaccctcggcctccctctcgttccagtcgtacagagcgcctctcacacccaatgcgccagaaagcaagacttgtgctgtagctagtgccgacgttgatttggtcaacatccggtccaaccaaattgagaaatcttcatatgggtatgtttcttcatccaatctggtgaaacctagctgctcctcatgctctgacctttcagtcaatgatgacgatagcgacactgacgaggttgacaacgataaagacgaggatgaatactctcgaatttgaaggacgctgttgctctgaggtgtttggcatattgatggatctgaagggtctgatgaacggaacagtttctctcttgagataccgctcttcaatgaaggaaccttcgtatcacccgtcatacaagaaggaacagattgatcgaaagataagatctccttatctttttcgagcgtatccgctcttccttttatcgaacggttcgatatggatgctctcttccattctggctgcgactcaactctgggttcaaggggcgtcgaagattgtttgccaagaacatttgtcgtgaacgacttggtcagtgccggtataggagacgaagtgaagatatcggcatatgctggaagactcgatacggaggaacccggaccgacgtcaaaagattttcttcttcgatgacgatgggaggagagaggggaagaaggtgaaggtagggtataaggaatttcatcgggagagtgtcgcttggatgatggctgagtgggtgtttgcaatcgaggaaaggaccgggcttggccgagagtccgttgacttgtcatagggctttgtctcactctggaggagcgaactagaatcgaggaggtgaagataacgagaagagaaggctcagatgagagcggccaggtgtcttctcatcgatcgttccctccgaagagcgagagcaggtggtgaaaggagagtgtatcaagagaaaacattgaagaatggggatttttccatgcggggttcgccgtcacgtgctaaaactgaaatattggaaagtatgcattctctcaacttctacatatcaaccatctacaaatatatgccttcaaccgtctgattatgacatgaagttgggaactggaaaatatggtaaagcaagatttattccgaatatgaaaatcgccttgagtctagatgaccaaatgctagatctcgtcgcccatgcagaaccctcggttgacttcgtgatggtataccatagcggaatatatgcatctacggaatatcaaaagatttagacgacgccaggacaaagacgtagataaaaaaacatgagcatcagatggagtcattctcgaacatgaagacgatgtatgtcaactcacttctatttacgaacaaatcgagagaaacatttagagaaaaatcagaagcatcagataagaaaggccatgccgagagagtgagtgaagaaatagtatggacacaaacatagtgaagccaagcagcagctatcacgcatacgtctgtactcatttagggaaatcagttgtacatcagatcagagtttggtctcatcgccttccatcggaagagggtagatgtaacgcacggaaaatctggtgggaacttcccacaatatcaaacgttttgagccactttctttctgggaaccgaagagcataattgagtgccccgacaacatatctgcgcgcacgtataagatttgaaaagtatcagagaaagaatgatatggttcatgatcgatcgattgatcaatcggtgacacctctggtaaaggcgaggaggacaggacctacaacgctccactgcctaagagatacttgagacccatctccctttgagctctttctaaaccatacgcgtagagattatgtgacactggaaggatagctgataggccaagagaaagaaacaccatggttcgagcccatcgataggccccggtggtgaacgtcggattgagcacagtgtatacagcaactgggaccacagaaccattacgtacgtcagttttcccattccctgtactgaaaaagagcatagtattaataaatagacttacgagatccaaggacggtgatcaacgctaaaaagttgatcgcatcagaaaaacacaaaaatagcagttagtgctgaaaaatcgcggataagcaggtgtgttggtcgtacagatatagacccattggaataatagatcgcagtagaagccataatagatcgcaggaaagtttgaaccgacgattaggaggacgatcccgatctttgaaaccagcgacagaactagagttagccttcgatcttttcctatgagacctactgacgacatacataatcaaattggttccatcgtttagagatcttgcgggaatggcacgacaaggtatgataggtagccgaaaacccgagacaagtggccgcagaaataagaaagatggtgaagtgaaatttgtcggtccaacgaagagtgggatgtctaaattcgtggagaagaagatgatcgaaaagatacggcagtacggtcacagcgcctagctgtgaagatggaagaaaaggcatcaacaggaatttcagaatttgtcccgaatgaacatgcgatgagaccaagaggttaaggtcaaggtcaagggcaacggagacgacaaacaagatgagtatgtatgttgattgtctcattatgaatatctagaggcgaaagaagagaggaacgaaaaagcctgccaacgtgagtttggcatccacatccttgtatgaatacatcaaacctaggtacatacagccaacgatggaccatgcgcatcctgaataagagttttgttctgcccggtagcctgtgagaatatactcgctctcaaattctttcatccatggctccagctcgtcccactcgagcagtctgtctggatttttttccggtggggtaaccgaacccgactgtggatctgatgttgccaaggatgaggaagaggtggtcgatagcgatgcagcagaagaagatgtagatagcggagagggcaccaaaggaccattcgtccgacgacgaagatcatccttatcccctgcgacgtgttgctttgatttcgacatctgttgtaagtgagctggcaaacaagttctcagccaagctggcagatcagtcgacgctgggtttgaattaaacgacgatggaacttggcgagaaaagtcgggggccgggccgatcagatttggttacggtcggcacgtgacttcgtcttacatgtgcctgtgtccccaacaccagaagcttctacgccgcttaggatttcgtctagtccggatcctagccatcaaccaacttcaatcgacaaatcgatcatgtctgttgccaaatcagaaacagctcaagcactagctcttgcagaacaggatctccttcctggaactcttcagaatattcttgatcaaaagagtctcaaggtttgtttatctttttgttcgaggaggcttgtttgtgttatcatttatagacatctaaactgacacgtaggtcgccttcacatcttggctatgtacagtggatcttttgtggttgagtatcctctgttcttcctactcaaagattgaagctgtgcccaattggtctcggacaccagtctcatttttgtctttgcttttattttcttcgttctttgcttcatctcaggtggaaagggaggagtaggtacgtatcgtttcccctaagcgtctttttgcaaagtcttctgtgtatactcatactagcatcttctactggccaacagggaagactaccacctcatgttccctcgctactcagttggcttcttgccgagaatctgttcttttgatcgtaagttctccgatctgatcatatcgctgccttgggacgtgtatgagacttcacttctgatcatgatatcctgttatcgcttttccgttagtccaccgatcctgcgcataatctttccgatgcgttcggtcagaagttcaacaaggtacacatcactttttcttttctttatagtcacatccgatctgatggtttgctgaggtcgcatcactctttctctcttgcatcaggacgctaccaaagtcaatggatttgacaatctctttgcaatggagatcgacccaacgggatcgatgcaagagatgatcgacaacggtgagctgattcgttctttgtgtattatgatctcgtcaatctgagtttcactagacttacagtcgctccttctttctcttatcagctgacgcttctggaggaggagccatgtcgggccttatgcaggatctagcgtttgctatcccgggagttgacgaggctatggggtttgctgaggtaatgaagtaggttgcacgctcttgtacttccgacttttctcttgtgcgcatccgctcagccattgcctttgtttgttggggattttttttaataagacatgtcaaatctatggagtttgaggtcatcgtgttcgatactgcgcctactggacatactctccgattcctctcattcccttcggtgctggagaaggcgcttggaaagctctcacagctaggaggtcgatttggcccaatgattcagcaggttcgttcgtctggtcttcctttttctctcgtccttcatctcgaaacgtctcaccattccatcactccttactttagatgacgagcatgatgggaggtaatgcgcctcaagaggatatgtttgcaaagttagaatccatgcgagccgttatcaatgaggtcaatacacaattcaccgatccggtcagtcttttcactttgctagcttttgtcaagaagaggtcacacccatcctctttgctgaacaaacttatctcatcatatcaatacaggacaagacgacttttgtttgcgtggcaatctccgagttcctctcgttgtacgagacagaacgactggttcaggagcttacgaactatgagatcgatacccacaacattgtcatcaaccaactcctctacccgaaagatagttcgttcttgtcttcaaactataaaatctcacagaacgatccaataacctgatagaccgatgactctgcaattttagattctaattgcgagcactgcaacgttcgccaagcgatgcagcaaaagtatctcctcgaagcttacgacctttacggagctgatttccatattgtcaagctccctctcaagacggaggaagtcaggggcgcagaaaagattaaagagttcagcaaggttggtagttctgaccttttcctttgttcacatctgtatagagtggctatctgactcttctgcatcgttttccttgtttccttatgtcccagatgctcattgagccgtatgttcctggaaactagaaagaaccccgatttagagaataccaaatacacaaaacatgtttaggcggagagagaggacggacgaaagactcgtcattctatcagggttgtaatcataatcattgtccacgtcaattctcttttccttccctaaatttgatcagtaggatgattctggacacacttttgagtgaaagagatcgttagggttgaacggacttgaccggtcatttttcgagctgtcacatctgatcctcgtcatcgactctcagcttgacgttgactgttcaacgactcaagttcccttaacacatcgatatgtccgaatcaatcgaccaggatccgttggacttgtttgagagctcccttccaccactattcgagcaaccgatcatcgcccactcatcctcgttctctaacatatacgtccatgaacatcctttacttccgtttcctatcaaattaggctttccaaaccctccagctcggttgaacaacctacaagctcaatatctatggccgtcagggatatatctgtctcatctgatcttgacgggagtggtcgatctaggacgggaaggtcaagggaaaggaagagtattggagctgggtgccggaatgggtctgccgggaatcatggctttggtttccatggctctagaccttgagcaaaccgaggagaaagttgaacttgaaagcggaacatcatgcttaggaaaaacaccgacgataccgacaaaagatgacatggtagaatcgcaagaagaactgggaactgtggtagctactgattttggagattctggtatctgcgacattcttcgcgaaaactatcttctcgtactcgataccttgacctcgtatatccgttctcagtcccaacctcaatctcaatctcgagccaaggtaaaacaaaaccccggatgggaggtcttagggtatgaatggggaaccgatcccgcctctcttctcgtcgccccttctggtcaaatcccaaggaaatacagtaccctccttctatccgacacgttgttccatacttcttcgcatctctcacttcttcaatcgatttattccttgctcgagccgatacacggtaaagcgtatatcaccgctggcttccacggtggatccagaggtacggttgaccggtttcttgaacttgcgagaaccgggggatgtctggtcagagaactgaacgtcgtaaagtgggatccgagaacggaaagttgggcagacgtcgagaacaaggtagaaggagagtatggagaaggcgtggtttggtcgggtctattgacattgaacgataaatcttagttcatgtttgaccagtaatcacagagatgtcattcgatggagtccacatgagaataagggaacggaaaagaagaggatcttgatctctcggaagaacatgggaattttttttaaagttattttgaggacaagtggtttggtgaaacatatagacgtatagacatatacacatataaatacatgtctaatctaatcataatttctattctaatcttcgccatcgttcttgaggctcagacgtgaatgataggatgagagggaaaatgaaaaggaaggagaggcagtataaaatatatgatctgttcgattataaaaaaaaattaccaagaaaaagaaagagagaaaaagacaaaaataataacaaaattaacattaagacggggaacaagtggagaaaacgagaaggaaaagggaggagaagctatcaaagaaggaggaagtaagacaaggtctgcaagagtccaaaaaggtgttagaaaagaaaatcgaaaacattgtgtacagatacagaggggaatgaagaaggaaagcacaaagcgaagaaaagcaaagaatgtgtctttggatacgaagaaacaaagaagatatgaaaagaggcaagcaacagaaacaacagtgcgcattcacaagtccgtagaggaagcaactaaggtaattgagggcaagccagcacgaaaggagtgacagaagagaaaaataagaaagaggaaggaggaaaaagattctcccagactagacctgtccttcatcaagggcgtatttacttgacgtactactagagttagtgcccagcatggtcggcatgatcaagttcacaggtcgattgacatgaggtgccccgctcttagatccgaagctacctcgctgaccagttgatccgcctggtaggccaaaggacgacatcgaagaaactgatcggttaggtcgtctgtcccttgatgtaacagtgttgattcgaagctgatgaggtgttccctgggatcgagatccagtaccagacggaacgagtggcacatgagtggccgagttagaggccaagtttgatagtgagtgagggggcgaatcggatgatcgagaggagaatgagccggggcgtgagggtaggccaccagatggggcaggataaggttccgtagcggacggggggactgaagagtcggcgttgaattctgcctcgaacgggtcggaagatggctgagagtactttgagtatgtcgggccgtatgcgttatagttcgaaagagaatgttgggtcgggaacgagctaccgcgcatactactgttgtacgagggttgcatcactgagttcacaaatggaaaaagtcggtcagtcaggaaacaagagacacgtgatgacgatacttggatgaaatgtatacataagacatgaaggagaaaccaagactcacaactattgtacgatgacgcacgccgagcggccgacagcgtcacaggctcgctagatccagacgtctgcatccgccttggaggtcttttgaggttggttatgcggttggtagccaacacgtatggaatttagtcttggacgttcttcggtgatctcaaaggatttgacaaaaagaaaaagaaaaagaagaggttactgacggcggcggcagcttctcaatcgattttctattcttggtgaatttccacaaccaaaaaagaagacccagtataaccaatccaccagcaactccccctacgattcctccgatagctccactggagagacccttgttaccagagctgatgttagaagaatttggaatagccgtcgttgccgtatttgatccagccgcagtagaagatgactttgaagctgatgttgaggcagccgaagctgtgctagatactgaggctaggtatgaagacgaagaggacagagcagaggtcgaggacgaggacgcggacaccgatgctaaacttgatgttgctgtggatgaggtcgaagagacagtcacgctcgtggaagatgaggatgaagatactgaggtcgttgacatattgagctgctttcgattacagatttgaaagatgaaagaggagggcagagagttgaatcagtttttcaactatgtatggtgaaatgagaagcattctgtcattgtcagatcagtccatccatacagattggaatctgcgatttgtgggactgaaccgtataatggaatcgaaagcgagagagaaagagcgaacgagcgctctacgaagaaaagagaaaacgacaacataccttctcttaaggcaataaaagacagaggacaaaaccggattgattctacagagaacagaaaggcgagctggaagaaaggatctggctagctctctccgaacgccaaaagagaagatgataggaaactcaaacgagcaaaggaggatggtgagagtaagaggtttaaagaaggacaagttaaatggaatagcggtcagtttcgggttaggtaacattcatatatatctacttaagtaatggaattacgtcagtccacctgcatacatttcatgacgcgtcgagacgcgttgatcatttaacaatttatctttcgttcgttcttcatcatcatctacctacttctactctcacgttttacgttcccatggcgccgtatgttgagtccttctcaaaccgaccgtcgccagctcagatcgtaccgattgatcggattccagccgtgtttgcagcttccgatatcgtcaatccgaagctcagattagccggccagtgagtcgttttttttttgttcaatcaaatttcttacttagacatcttaccttttgaccctcttctgctgatgtcaactagccttttgacatatcatccacccaccaggcttgccctgctcagtagtgtcgatcggtcgacagccgtctggatcgacccgaagctctgcttcgatcatccttctgacgattccctctatcctcggccctcggacgatctggaggccgctagagcgtttggcacaagtggtcatgcggggaaaggatcctactgggtcgctgttggcgatctcgaacgcgtacttgtttgtgtcaatcgatttggattctctcacatgttgcatcgttatggaaacgtgttcatctgaaataaaattcgcccatgtttctctttccccgtgttctgacctgatactttttggacagccctcagagttacctacgttggacaccgtcaaccttccgacttggtcgacacatacaatccagatcccccattggattcttcgcgcgattctacttcgaccaagtcccgaattagatctccgactatgggagcaagccgctcggacaagactcggtgtttcttaggcatacatcgttcattaaattcgcatgcatacacgattgagccatcgccttccttattcaaacattaaaagactctgcttcaaaggatatacccccgacctcggtcctcactgctctgcctagctcgcctactgatctctcgacctgacggaccaaaccacttggaccacaagcccttacagatactcccgatacgggtgcatgctcgtccatcagagtcctcaacgtcgctcctaggtctggtttgatgaaatgaagcgtcgtgtacggcctgacggtaggagcgtcttcattggccgtcggcggcggcgactgcgtaagataaacggagagtcttactcgggaggagagtaagggagatagcaaagcttcgagcgacgtgtacattgcttgtacatattcgaagcggtagtaagagatagtatacgtcttgagcagagcccggatgccatcataaaccagcacaggagacaaacttacccaaagtccggacgacccaaatcaactcgataactttaacgcccgatcttgccctacttccaatcgcagcccattctgctctagcttcctcggctaaagcgatcaagaaactgactccacttccaccggctatgcagatcaccacctctgccttttcctcactcaagccatgagccccgaaggacccgtacggtccatccagcatcacactgacagctacacccggcgtgtcggttttctctgaatcctccgacgtgacggctttggtacaactggattgaccggtccgagctaatgagtgaatggaccgagtccaatttccagagcatcctgccaataagatcaatccatcccctctttcgactgctgaactgtcggtctgggatgggcgacgaggaggagaaaggatggtgaacgggtgtgcgggttcgagggctgaccaattggacgtgaagattcgaagatagacgtgttgacctggaagccagccatgtgttgcatgtgggatgtgtatctatgcgttcgtgtacgagacggcaagaaagcgagaactagatcagcgaacgatcgatcaaagcgttgacgttgaaagaggtcacaacccaccaaagtcattccttccaaaggaattaattccgcatccttaaaacgaagtttgacaagtctcgcacacaggtcaaacgcgtatagtgcgatcggtggatagatccatggctgagcgaaaggcgtgtgatatgctatggtcgcaaagaacccgatgatggacatcatactttgtcataaaaggaaaagaaagaaagacgtcatggtcaacaacgataaaaattctgttcaaagtgatgggtgtagagaacgcactgggcaatccagaacagagtataacacttcgatctgattggtttgatgctcgtcaatgcgctctacaggtattttatagacaaggaagatacattggtaagcatggaaggcggttctttggatacttgggcattgaagggatgtcagaatccgacataagggacgaacgaggcagagaaacgaatagattgctagaccccaacgtgtcttctggttagagagcgtatactgtcttccgtgtttatatgcccacatagcgctaatgattaaacatgtttggagagagaatgccaatcgacggatatgaagttagccgtatgtcgaatgcaaacgttgtgtaggggggccacaagaaggatatggcgatggatgtaatcttacccatgacaagtggccgtgagccaaacagtccgaccgagccatcgatgagcccagttaattttctcgtaaccagtggaaaggatgaaggccaagggattgttcttcgttgatagaagaaagagaggtgtaagctgggcaagtgtcaaaaagcctagagagaatgggggacagggcggagaccgatatggatatataaagtaacagagcgtgtcagatgtgagtaagccaacagagaggctattgaacttcttaaggaacagcccataccgaaccggttgggatttgacgagagttgggcgtcctttagcacgcatagcagcacgatccctaggtagacgatcccactaatcatccggtacacgacttctggccctcctcctcccaaagtagttggaaccagccgaccggccgaagccaagccatcattgacaatcgcctgattcgcactcaatactcttttgtttgagcctcgtcgtttggcagttttatctgatcgggatgagtcgccgtcttcggcctttaacagcgcctgatggagtgtttggtcgagagatggaagtttacgcctgggagacagatcctcatcgatgaaccatccacaaaagaatcggccggaacggaaggatcggatgagtaccaggaaagagcctgagaagagaagagcaagggcgagagagccaagccatccataagtaaagtaccgagagtactttggatcgatggtgtacgagctgacttgtcagaaacatgtaccggatggtcagggacggtcaatacttgagcaaccaggaggaagcagagagtaagaaaagcggaaaaccgttgtaactttcaacctactcgtagactttgaattgatctggaacagagggaaggccggctgcagacattgaaagagaaggatgagaaggatgaacgtatcaagaaaggatcaaatgaatgaaatagctctataaaaggacagcatacgaccgagtcaaccgaatgttagcaaattgagagatttcagatgacattcagcacattccgtagcatcagcgcgcagggagagctatgagcagaagattattagggagcacggatgaaagagcagaatgagtgtatgtatagctgtgagctgtttctctctgagcggttttggccgaaggtagagtagagtctcacggagacgccacgtctcactagggagacctcgctagattgttcctcatcgggtttgtggtcgatcagctattgagcagccatcaatcatctgttctactttcaaaatccgtggtcatgaaggaagagaaagacagagatgcgcaagaagagatatttaactcgtctgtttgtaatatctaacaggatttgtagaaagagtagtcgaaagcgggtattagataagggccagttgaatcgacttggccgttcgtcttctttctatttttctctaaacgttcctcggttgccgttctttccaaggaaacagaacattcaggtagtgatagttgtcccatcgctggtcattcacataggtagttcttcttggaaacaacgatgtcgttctcgattccccgagtccaatccactctcagggcctctttgccttgttcgagaagaacctactcggtgttgagctatgttcctcatcaggtaagtgtcctttttttcttacccggtaatcttgatctaccctagggtcgcctggtttctactcggaattgtccacaggtcgtctctgtctgctatcgtctactaacagaagtgtctactctacctctctttccattcatggcgttctctttctctccttctcttgtttctttgcctttctttctgtccatccttaggctactcaagatatcgatccaatcacccctcgaacgaaaccccctccgttcttctacaccggaaagccgaactattttgcaactataaacaagcttcagtccgaactgtttgcggttcgaaaccggctcagacaagctagagtattccccatcaagaagggaatgcccgagcagccaaagaacacttggaagtggaaggataaggaggagtttgtcgccatgctttctgtcaccacgtttgtcctagtcttgtctcttcttccacgatttatctatgattcggccttcgagtcagatagtgctatcgcgagcaacacctcgctcatcagttcgtctttgtcgtttgcttattcggccctggcatcaatcccattccagactcaagaagacggaatacgagatgatcattagaaatctggagcggctgactagagctcgccacgttgccagctgcgtgtccgacctcaagtctgttgcccgaatcacccagcttatcacaccttacttcaagatcaaagccggaggtgtccttcctacctcggctgactttacagtagtccaggatgcgtccgatgagaagagctctgctcgacggacctcggaaaccaggcctgtgagcctggatgagtttggccgatcgcacactaagggaaccaggaaaggagctaaggcagaggtctggatgatcccaacaaaggcgttcgccgagcagttcaactcaatcgctgagagaaagcgacaggatgagttccttgaccagctcaaggaacttattaagcagtccgcagccacagaggaaaaggctgttgcttcggcggccaagaacctggctcccgtctgggcccgtcgggacgagatcgaggacgctatctgggagagggagagcaaacggttgactgatcttggcttgccagttcctcccagaacagtcgtcaagagtcacgcgtcatctacagtggacagcaagatcgacataaagccttacgtcaacgtattgaggcagctcgagatggccaaatctcgagacaacaaggcctcctccactggatctggatctaacgcctcagatgtggccttgaagtctgccgacactgtcgatgcctcgacagtaaatgcttcttccatccctaccgctagtcctgctgttcccactctttccaccccgtctgctatcaagtcctcttcgtcgtccaccacgtctacttcatcattacctgtagcaggcgtacccccgatcgagacggcttcaaacaatccagattcgggtgctgttagccgagacggcacgatctcgatcaccaacccagctcgacctcctttgagtttgaacagcgatccagagttgggttccattctaatcaacaatgtgccgatccatcgatatttcaactcgcccaaggatagagaggccatccttcgaccgttcaagttggccagacttgtcggggcgttcaatgtgtttgcgcttgccaagcagggtgggtcgacaggacaggcagaggctattgctttggctgttgccagaggattgggtgtccaccagccgatggcgaagactgttttgcagcagggtacgttttgtgtatcttcctgtctttctccttctcttcttgagtgtatcctcaaccggctgacctggttgtctctccttctttctcttgaaaaattacagctggtttgttgggtgtggatcacagacaggttgagaggaagaagaccggacgaccaaaggcgaggaaatcgaaccagtgggtcaagcgttaggggaatccgaagcgaaggaaaagacaatttgtacatggatggcaagaccagtctttttgttgtgtatcacatgcaaaacttgcgcaacatctcgaaacgtcagcaaggagagaacgtttctctacagactacatgagtatagatggcaacaaaggatatacggagaagcagaagaagaaaactgctgctagccgctttgaaatacttaccttgatattgcaggtgccacgcttctactaaccgatccaagaaggaaaagaatgaactttcgtctgtgtatcttgatggattcagccagtcgctatgttttcttggttacgcttttctgcccgaaagaaactgaagcacgcgagtaggttgatagggtgttgtccccgtaatctattttgccagacagccttccaaaaaagtttccaacccagagcatacatcgatcagatgcttcgaccgatcggcctggagaaccaaagtataagaacagacaacgaaggctagccagaaaaatcaatatcggagaaattgaattctggattctcgtacattgtttccaggatttttccctctttaaaatgagtaaccggttacagttgaaattatatctaggctgttagatcccaacatacgtcgcgataatgatgtaatccttgctcggccgtccgtcgggcgtttatgttcccgacaaaccgagctgttatcttttacctccctctgaataccatctaacctgttcagatctatttttttccatttctttcttttgacatcagtccatgatgtttgctcttcgtaaaaagatcggatacgccgcccagcgcgcttcgacacacgcttattccactatggcagcccatacggccgggccggttgatggctttgtcggcgctgttgggcaagtatttttttttctttcttttctctttctccttttcctttctcttaccagtcgtattccaagatgcataaaagttgaccagaactcgtcatgatgtgtttctctgacgactggaacgatggattgagtaggaacactcctttggttagtccgacctccaaaagacagagtcgtcatcgttctcctctcagagctcaccctatctttcacgtttgtatatttttcttttatcgtgtctctaaagattcgacttcgacacttatccgagcgaacaggatgcaacatcttgggtaaagctgagttccaaaaccctggaggaagcgtcaaagacagagcggccttgtgggtcgtgaaggatgctgaagccaaaggtttgtcatcctcctccagtcgaaaccgatccaaaggaagggagactgatcttgcgcaatatcttccttctctattcatcccaatataggtctcatcaagcctggaggaactgtcgtggagggaacggctggaaacaccgggattggactcgcccatgtctgtcgatccaagggctacaaatgtgtgatctacatgcctgataaccaggtgggtttaatctttctttacttctttcttctctcatgatcagtaactgaaggaaagctcatcgtgaaaacgcacatcagagtcaggaaaagattgatttgctcaaaatgttaggagcagacgtgcgccctgtgccaggtaagtatcaatgtattcttcagcagtacgcagtctcttcaactgaaacccatttggatcgttactcttctttgttctgttcgtatcctccaacaaaagccgtgccgtttgacaacccacaaaactacaatcaccaagccgctcgacacgcggcttcgctcgagaacgcggtatggaccaaccagtttgacaacgtcgcaaacaggcaggctcatatcgactcgaccggtcccgagatctgggcccagacgagggagaccggtctggacgctttcacctgcgcgactggaacgggtggtacgttggccggcacggccagatacttgaaggacgtgagcggaggggctgtcaagtgtttcttggcagatccaccgggcagcgtgttgttccagtatttggaaggtggtgagaggaaactggagcggactggaactgggtcgattactgagggtgagctggtctttttttttttcaaattaatatatgcatacccgatactgcgagctgttactaatgttgacaaggctcgttacaggaattggacagggccgggtgacggaaaacttgaagccagacatcgagattctcgacggcgcagtccatattccagatgctgagacaatcgaaatggtataccgactattggatgaggaaggaatttatattggtgccagctctgcacttaatgtcgttgctgccgtcaaggtggctgaaaaacttggcaagggtccgtttgtcgcattcaaagctatctttcagagttttccttttcaatctgggcgcgatttggttcccttagattcttgagctgacttgaaatgctgcctctttttttcctcttcgatctctctttggcaggttcaacggtggctaccatcttgtgcgatggggcataccggtaagatgaccttatttcttattccaatacttccgctacgttcatttcatgtgtgctgaaaagaaactactggatgatccatttcatgcagataccaaaccagattgttctctagaaagtggcttgagtctaaaggattggacgtagctattccagaggaactcaggaagtatgctgtgttggagtaagagaacgtaggagaaaaaccagaggaacaattcttctttagttccgataaaatgaaatgtcttggttgtctttcttccccttttctcaatcgtaaaaataaaacaaaagataaaaagaagaagaagaaggagagtaggagaagagcggatagttcatgtgagatggcatggatcagaatgtttcaggaagcagtttgtgatgaagtacactgccaaggtgtacatgttggggtaacagtgagaacccagaatagtccttcgttggtcgtcgaagaacgttcaggcggatatacacaaatagacaggagataacctatccgtcagcgatgttttaggatacggagaattgcatttttgtggcgtcaagtcgtgcatccatcgaaaccgggtcaaattcatgcaaaaccatgaagagaggaagaaagcattcaaacgatcttccaagagaacaagccgagtactcgttgagcagccaactgagggtagagtcgccttgcttagccgagcctttcgaatatacgcgcatgcacgtgctaacgatggtccctcttccaaaatgcaacagaagctaatcgggggatcagctaataactcacacctttttctttgtctgaacaagatttgagtgtaagagacagtcaggcccgcatgggcagtgaaatactttattgttcgtttttgtttgacgcccaatcttccttgaatcaacaagtgccatctgacaactccacctacagacgtttgagcaagaagcacagtcagaccctggaagatcgatcaggctgatagatgtacacacacaggctccggacctctgatcgtttcaagccgaaacaatgcccagttttgatgaaattctttgttttacaactgatcagcttcggcccccgtttgaatgcctcaagtactatttaatattcaatcagccaaacactcggaggaacgaccaatcatgatgactttgctggtcatattcatgacgtctaaaacgacgatctattttctccgaggttttccgtttcttttgactcgattaaacattgtagccagcatgggtttcgtgtctctttccggacatgcgttgtaaggcacaacagatctaggaatcgaagaaaagaacaagacctgactgctgcatagaaaacctaaccattcatggcttcacggctactaatgacgtacagaaggctgaccaagagcagagagcgactgaagctatgccatgccatgccatgacatgaaattctgaatgcatggatcatgctcggcagaaggatagcgaacatggtcggtgtattgactgatcttcgactgcaggtgtaaacatcttggaagaactaaaaaacatccaggataaacagctccaaggatcagtccagttcggtcatttcgggaactatatgttcttctttatctctactttctattcctcttctgctctttcgagttttgaatatcggcggtcgaaccaaccgatcgttcattccatctgtttgctctatctttagagggtggaacaaatctgacctttctggcccgtcgtagccgttcgttgtcaggacgggatccggttccggctcttatgtttcttgcgctcctcctattgtcttcgttttgtctgttctgtcttcatgtggctgaacgaatttggaaaaccaacaagtcgatcagtttgggtgctcgccatgcatgttatatagccacaaacatggtctatgtttcttctccttctccttctccttctccttcttcccctttgctttagctggtttatctttcccatttctccctttcatttggctgaatcggtcatcctattccactcagtacttcttctcgggtatcttctccgcttgagggtttcctgcccactcttgggtttcctgcccactcttcttgttctcatctctcctctgatcttacatgttggatccttcccacctgtgtatgcgtttgctccaaccacgctccccagactactcctacactcaagatatgctcattcccatctctccatattctgagtgtccaaaacgaatcacctaccttcccacccttttatactccactgatcgcctccatgtactgggtcaaagagctgaagtggatatcaacctccatcaatcattgccgtcgccgttatcggatcgtttgactatgacgaagacgttttccgaagggcggatggtagaaacagactttgagcgatccaactctcaaaactctggatctggtcgaaccacaccggatcctccgttcggcgcgcttcctctgtgtctcaacaatacggcacagatgtacaaactcatggaatttagaactacgccacggtattgtagtgagtggaatgcttccttttgatctcatcaccaatgcttccattcatctctgcctgaattggtcagggtgatgcgcgcgaaaaaggctgcagcctataacgaaggtctgaccatctgttatttgatactggtttgctcttctgttctgaattcgctatcttcttgattgggaaaaaacccccagaattaacggtggagacaatccaagggttaattagtcgcaacgaggtcatttcgccgaagaagaagaagctggagagagatgttctggttgagtacctgttttattggacgtcaatgacattgcacccagtgagtacttgatttccatcttctcatctttgttattttttccttctgtccagttgcttctgatgtcgttaacttggtgataaatacattgatgctgacccgatttctttttatcagttcatcatcttgatatgtaccgttcaatacgttgagcttctcaagtatatgcaccctagcatcagttttactgggagtgagtctcctccttccccttccttcacttccttcggccctctcttcatccaaaaactctcgactcacgtctccttctgcgccgtctcttccctccttcaagaggtgcaagatgcaatacttcgtgttatgttttccgcctttctcatcgctaccaagatggtcagcgacgtctgctatgccaatgccgcgttcatccgtcataccccttggacgctcgaagagatcaatagtatggaggcagaactattggtgcacattcaatatcgatcgttcatctctcctgtctggtgagctcagcctttcaacgaagctgtctatatttctgagcatcaagtatgtacacagtgctcacatccctctttgttcgacgctatattctctcgtggggggtgtagcctgctccgtcgagccaaagacttctgggcgcagccccatgaagacacccactcacccggagacgaagacgatgacgatgatgatgacgataacgacgagactccgttcggtccgacactgtcgtcttatgatatattgagtggctgaaatctgactcttgtctcctcttctgtctttgtattctattctattttattttatttccattatcatgatagtcagcactgatcggccagccgatcaaacttcaatctttctcctttccgttcatatcctgcttttgttttgataacctatttgatctctctatcaactcgtaacatctccacaaaggctttcaagtatcgttttctacacgtgcggaaatgaagggcgcttttatgactatctgcgcttgagagctatcgcgtccaaagtcttccaacaataacatgactcttacgtttttttttcctttgctgctgatctctctgttcatgtacatcgcttattccttattgttaacgtaatttcgttatcggtccatgtttatcttgttatatagatgttattgaccggtcaatatttgtccgagaacggcagaatctcaggataatgggagccaggatagcatgttcttcattcaaattctggactagtctcgtatccatcggaggaacaccgaagtagttgcatagatatgtcataggtctatccgatctatctcttccgtcaagacgttgatgtgtctagcatgacgtgtcgaagcgcttctttggtagactccgtcgagaatcgagagttcgagaatctatttgtgccttgcaatcgaatcactttgattccaagagcctgccatgacatgttccaattcagatttatagagttaaagctagccacctgcgagatgaagaagcttcgacaatatccactcacctcgatcacatcagtctctatgtcaacctttccactttcgagataaatcaaatgagatatcagctggctaggtttgatccggaagcttaataggttattctttcgcgcatcgagcgttgttggtgtgctcgcattcccacctccaccaaccgaggacgacaaaaacgtggagctcaataacgacgggcgtcttgaatgagtttggcgtaccggagaatcatgtctgatagattggccaaagcaccaagtacaagacatcagaaatctagagtctgaccaggagggagaaagatctaggaggaaccgaccgattgagtgtccgaacgatggcttctatgtacgtcaatgcggtgtatccaatagtctctctatcgttcgacgagtttactgtagacagctcgaagaacagatcgtcaagaggagacttcttcgagacacgtccaactctgagggaaagagcggtgctcacatagaaagatcttggccttcaggctagtactggttgcgatggccgagcctacgccttctagagctaagcacggcatgatgctacagttgatcaacccgtcacccatacagattatcgaactgagttttgatctctgatctttgaaaccacaaaggaagagatacaaaagacgcagacgagatatccgtacctggtccaaagagacccgcacgaatacacaaaaagctctctcgtggctagtgaagaaaggaattctggattcggtgtcggaaagatttctctacaacgagataagccaggcacagcaaggagtcaacatggccagcacattaactagcttaagtcaagagtttgaaaaatgcgagatctggaaacatactggccataaacgttgatgtacaatatctatcaccgcaccgatggaaccatgtgaacattcaattcagctgcacagaaccattgtctcaaaaactcccagcggtttcacgtatcgggaacgaaaagagatgacaaactcttttaatccggcttgttaaaccctgagtagcgtccaaactattctcatcttcagcttctccagtccgtttgaataccagattgcttccgcctggcgtgtttatagctttcttgctgctctgagagacccctcctctacccaatgaatatatgccatcttcaagtccgacttttcccagtcgaacttggaccggtaaaggggaagaatacgatctatttgtagcagattctactgttgaatctgacaaagcaggttcagtgaccgccgggtgagatatattacactggcccacaatagtctctccattttcctttgaagagcgcagaacaaggaagatgacaagaggttcggagttggtcgtcggcctcggaagaataaaacagtgcaggatgaagcttactagttcggccgcaatcgtagcagtgtggtttgtaagaattgcaggaatgacgctgcattgactttgaatctcggtgatcgaggcaaagagaaagatggctgcaggaagggaaagaaaaaaccgttgggccgacgacaaaaaaacgtttcctagcgagcagtttctttttcattcaataagaacgagctctgttgacccttaatatgtattctgctaagaggcatcaggacgaaaagaacgagaacatacctgaaagagaaccccttgtgtgctctctgcaagactgtgagaaaatgataagcttccgcgaagtatgatttttcttagagcccacgagcgatactgaactcaacatactttcagactcgaagtgtacgaaaaatcctaagggtgtcaagccggacgtcggtcggctagtgctctcaaatgatgacgtggcatatagtgcagaggagatgaattctcacgatgtaaaatctccttgcgatcttcggccaccccgtcccagagctcggatgtgccttctacaatctctctccataaggactttacttcctgctcgctagcttcggcaggtagtcggtagctgagtagacggataatcgccccgagtgagcttgaagaggcatatgctggagctaaacggatcaacctagatcggatgtctccaatggatggaccccctgtaaaacgtgatgaagaggattggcagtcagctcgacgattcacggaataaggatcaaccctagagagaagcatacccaagcatctgaggatctcagaggaggatccgccatcgtcactgatcggaagaatgaacgtagttcttctaccgaaagctgagcatattgcgtttccacctgttcctccggagatgcaacagatagagacatcggttaaatctaggcgaacatagtagcagacgataaatttctcgattagtcttacaccaggggaaacgagaaggagcctcaaactaaacgaacctggtgagagatgtttccgatcagtagatccagttgaagaatgatcaggcgtgttcgtccgactagatgtttcagcaggttgaaaggcagatccctcgatagggtgagatgtaaccggtgtatcgaacacagaggaggacacccgacggagggaagggtatggctcttgatctgtgcatagaattgttaaatctgctggactcattagaagtaagcttgctggataatttgggcgagcaagcgattagatcgatctgagaacaaccaaatcggacgtatcaagcggtaggatctaatcaacgcttaaccctaaccgagacttttctcacgtggcgctgaattatgtaatgcatctacaaaacagatgatgtaatctttcgtgcctgaaaatagcttttgtgactagccagtctaagcccatactgcgcgtgtgctcttagccgagagtcagtatcaagccgatttaactttcaacgcttcgctcaatctcatttccctttccttggagtagctcgttccgtgggatcagtcagttatcagtcagcaagatgccgaagtttatagacaagatggagtccttgagcgataagtgagtccgaagagtcctttcggtggaatttccattgctcatcaagatctctttccttgtcttcaatcgtctggttgttctcggtcttggcattgcaggctcaagagcaaagcgaaggtacgagatacgcatttgtctgcattgttttaagtgagccgctctgaaggtatacctatcgatactctgtttggttgtctccttcatagatcttggactccgatcatatcagggggttcaagcaacaacttcgaacaacatggaaccccaatcatcgacatgatgaggagcacgagaaggtttgcaatctctcatcatccatctcttctgcaactatccttacggctcagtgattgaacaaagcatatatatacgcgtacaaaaggaaatcgatcgacaactgcaagccatcagagattctcatcgattcaatagtttcgcgccagagaccagtggaagtatcgttcgaagtcacgtcgatggggttcgttcaactttcgaaatcaggttacaagcctattctcgttatgcttatagccatcattgagagagcttatcgtcgttccttattctatttcagcacgacttcttctgggccgtttccattatggtcagtcttatgatactcaaggcctcatattagtgtttaactcagtgcgaatattacaactcgttatcagctcgaggaagcaaaggagtcgatcatggtaagccgctcgtatcacgattcatcgacttttgttggagcctccacacatacgctttttgtctaagccaatctcttctttttcttaaatcgatactatgactcacgcttcttatttcaatccaaacagatcttagattggtgagttgtatcgttatatatgctgatgagacgttgggatagctaatttgctcgttattctatctcgatttctgaacataggtgtatgccatttgtccttgttcacagttcacgaatatatacctgcgctgatttcttttctcattctgtcgtccttgtttctctcacaagggttgacgcctgagctttagtacgccgatttcgtctatctaaggggtttttttaaacgatcatcatctgatagctcatttcttatacattgcttgatctggcattcaagcttacgaaggcctcccgctcagcatccagaataccgtcttgataaattgcttcaccgaaaggccaaagagggcgtcaagatctagtacgttctggccagatttatcaagattcgtgacgacacaagtgtttgactttcggattatgttcaaatttcttggcgggattctagtatcatcgtttacaaaggtaccgagcccttctttcgattgaatctggtcatcacttttcctcattcacttcctttgttggttattattgtgtgcgcgaaaactagaggtcactcaaacgatgagcatgagttcgtcgcacacgaagcatgctttggaagagttgcacgagaacatcaaggtcatgcgacatcctgatcatctaaatggagagattgtgttgttctggtcgtaagtgtttcagatccatgcctcaaaaagattggcacttctgtatgaatcaagggaacataggtagatctcgggttgttgactatgtacaacatttatctttatctttcggtcagtcaccatgaaaagatgactattgtcgattccacccgagcgacaatcggtggacttgatttgtgctttggtcgatgggatcttcatgatcatcccttgagtgatgttcatgtcaccaaatttgcagatactctattccctggacgtaagtctaagataaatctcactacttcggagacccctcgagtcctatctcatgttgtataacaccacctgatgtcaaaccttcatcttggcaatgctgcttatcatcaatccaaacagaggattacaacaacggtctgtaggcaaccattctcaataaggtctgattgacgtgctgatagttctacgttccggcaacacacgcaaaagcccgagtgctcgacttccaagccgtagacgagtgagtctccttggtattctacgcctatatcacaagcctgaacaaatcttggtctttaaattggtgtggaaaactctagctatgcatcaaatgcagtcgatatgacttcagttgcacgaatgccctggcacgatacatctatgacaattatgggaccagcagtaattgatctttgtcagcatttcgcggagagatggaatttcgtaaagcatgtaagttcttccttctacgggtccgattactgaatgttactcgtgtccatagtgtctgatggctaccttcatcatgtatagctcaaatacaagcacaaagatggatatgactggcttgctcttccctctcgtatgtctttcttcattgatagaaacttcagtcttatcaactgacagtgatagacctttattcatcttgatgtcaacaattccagcatacgaagctgatatcgacgcttgcgataagacgcttgaagagcgtcgaagcgatcctgaagctggcctagatgaggctcgccgtagcgagcgacgtagggagcaccctcatctggccgaatggatggatcgtggtcgacagttctatcacccataccatttccatccgtccactgagcctagagccgaagagcaaatccccagaggaagctgtcgagttcaggtcgttaggagtgcgggtgattggtctcatggtgttttagtggaagatagtattcaaagagcatatgcccaattaatcatggaggccaaccatttcatctagtgcgtttcaaaatcgttctttccgcaccttgagggattcagtatctacggttgattttatactgaattttcttttacttggatttacggtatcagtatcgagaaccagtttttcagtccgtccgcttctcaatcttacttctaggttcttgactaacggatttcactcttcttacgatattttcttagttaccgagacgtccgctggtcaaacaccagtagtcaacagtatgtcttacctctgtcatgatgacctcaagcgcaggtactcagatcctctcccttttcatttcattttggatacttcagccgttgggcaggctctagtggatcgaattgtatctgctgcccgatcaggcaccaaattcaagggtcagtactctagtttgtggtttaatcggtcggtcttagagtaagaggccaaattcttactctgttcttggttctttgattcacatgcgagaacagtaatcatcatgatcccagagatgccagctttccccggtgatctgagtgcccagggtggattgaaagctatcatgggaggttcgcgcgtcctttatcgtctcttgcttgatgtcactcccgtattgatttcttgatgaatttgccgtgcgcatgatgctggaccgttgtaaatgtctaccgtcgtagcacaatatcggtccatcaaccgaggaggacactccatcattgaaatgattgagaaggaaggaattgatccgactgagtacatccgatggtacaacctccgatgctagtgagctttctcttattcatcttggcattaaatgtagtccatgtttgtaatgacaaaaactgagttacccttagcgatcgtatcaacgcacctaaatcttaccttgaaaagatggagaaagacgtgagttctgcgagaggctatatcctttgaatccttcgagatgtcgatcgttgaacagtcgtgcattttcttcttctccttcttgggctcggtgatagtctggggtcagctactttgaagcacagagtaggtccttgcttcgtcaatgctccttaggtatcttttacaagttgctaacattctcgctgtcttccacatttagtcgctttggccaagatctgggttggttcggacgatattggggataagcaaagtatgccattgctatcatttgtagttttcgaaacattgcctgacccagtcgaatctttaccgtctatcggggcaacaatcgatagccgatgaggtcaacatcaagattcctatggacgagagtggggaagttgatcagctcgaatcggccgatacaggaaagaccgttcagggtgttaaggtaaagtttcatttatcttaagaattctttacatcctctaaatttaagtcggtattgattcgttctcgagtcgacagatgcccaaaacagtcgaagaagcccaggccgtcattgacaggtaagcccactagtgatcttcggcgaactcagagcgtttatctcttattcacagttctttctcggttcatctttcaggttcgagaaagcagctccttacaacgatgatcaggtatgtgtactttcttcatctcttgtttggtctgtcattatgctgataagagagctgggttgacttgggcaggtcgaggacaacgttggtcaacacgcgctcaactccaaggatgggttgctcagcacttcgtaagttgagacgaagtggcaatggtcgatgcagcttcaaatctgttgcacttgattgatcagaccgaattgatattttgtttgaccgatagctggaccgggacgcaggaagaggagctcgaggcgtacatcaccgagctatgctgtaattcttctcttctgctctttgatacattgataaactgtattaaacctggctgagcgattgctttgtttgcgcttggctactgggtagacatccatagcaaaatcatgatcgtggatgatcgacgagtcatttgtggttcggccagtgagtaaagcaaacatagaattttcagtgtgtgcgtatgcgcttcttgcagcaatctctattttctgacacgcgtttgatccctcaatgttcgctagacttgaacgatcgatcgatgtgtaagttggtctcagagtgaatctaaacatcactgatgtctgcacaagctaaaaaagagcaagaggtttcggctgattttattacaggtggagatcgggattcagaaattgccttggtcgttgaagatatggataccgttgagatgaccagttcgtgaccgtccttttgtgcttcacaagaggtctgtgctttcatagctaatagtttctcaatgaacgtgacagtggatggcaagaaatatgaaggagcgaggtgagtaacctggttgatgttgatagagtacaacgccgactgaatatcactgaacgtgtttttggtcatcttgtatcgtatagatttgccaaacagtggagacatcagctcatgaaggaacatcttggtttaatcgtgtaagtcatgggcctcaagggaatgtgtctgtgtgtcttgacttgtctaagatattttcttcttcttttcgatttcttagccctcaaggtcatcacacagaaggagaaaagcctacgcgagaaatgatgcccgcgccccaccctcatactgactttttaggtacggatgaagaccagttgatccaggatccactgagcgacgacttcctcaaggtttgtttctccacggttcctcgtcggatgctcagaggaagaaagtgagtatgttaatctcgacgttcgtttttttgggactttcatggcagctctggaccgggacggcaaagaagaacagagagatctttaccaaggtggtgagtgtatctgagtaatttgcttgagtgaagaggtcgacaaattaataatgaaggtttcaccgtttcacagttccggacgcttccccatgatgaggtcaagaactgggaccaatacaacaagtatgcgcctagtggcaaggtatgtagggttactttgtggaaacgaacatgttgtaaagacgactttaattgagcacacgtgtgcgaaatacagactggacatctatcagaccccaacatgccgattgaagaggtcaagcagaggttgtccgaggtgaagggacatctagtcgaaatgccaattggattccttattgaggagaagcagctcgtcactctttccaatttgggcgaagtcaactcaatcacgcttgtgagtttgatggtctctcacttttcctatggttagacccgaatctgtcggttttgtgagactgagaatatgctatctgccttttcacagcccatatacctctgaaataccatgttatttgcttccgaaactctccgtacacttatccaacttgatcgtcttcttttgtcgctttaaaccgattggcttgctccttctatcgtcttatcttggcgtgagatgtgagatttgagggatgagatgtgatgataatttcgtttataaccgtcggcatgaatcggttgtcgggtttgtctcgtggctggttacccgggtggctaagagtgagagcgagaccgtgttcttccgatgagtaggcgtaaaagtggatctactgggagtagactagaaaaccgagtgaaaaacactatcggtctttttcctagatcgagcgaatttctcggcattttcgggccgcccaccggaagaaagttgaaccgggttcttacgcgagatcaagactgagatgggctagcctagacggatgcttggtatggttgcactctttgcttcttgttccgacaacttccttggtagatgtgggcatgttcatgcgtcgaatctgtttatttaattgtatatacttagatgtgcacattagaagagagaaactttgtatatgaaggggacgaacggcaagagaagagtgtgaaacaagcagcaatgtgcacaaccatctgatcatcggatgggcaccaaggaatagaaaggagaggaaaatccttttcaaacgtcagctgggcgaacgatggaccgaggcagacacagacacaggcagacaacaatgccgagaagaatgggataccatccatcccgaacttttccttctttctttctcactttctggtcagaccgtctttgtctgtctgtgctttccccggagccatagcatgaggcggtgtgtataggtctactcgttcaatctttaggttagatctcccttccggaggctatataaactcatgaatctaccttgaatcgattactcctctctttccatctttctttctccttccatctcacttccacactcgcacattcccaacttacacatagtcccattgaatatcacgaaaaatgtccaaaacgttcactaaaaagtttgaccacaccgccttcaagggtgaagtcactatcaacaccggtcttttcatcaacggagagtttgtcgaccctgtagagggaaagacaatcgagtgagtccttggtcttgtcggttggtcgattgatcagagaggaagccctgcgttttctcaggagtcgtttgtacggaatcgctaatcatggattgactgtctgtttcttcctattcttccgttctctcttccacttgtctcctctcttcctggtaatgtgacctcgcctttgtgtccgtcttgcacgcgctgcttccacctccaactccgccttccacccacgcccacaggacgatcgaccctacgaccggagaagttatcactgccgtcagtgcaggaactgctaaaggtatgtttcagcacccgcttcttgtccttctctttcacactccgactagatgcaaggagccggccactgatcaatcttctcattcgcagatgtcgagatcgcagtcaacgttgctgagaaggcgttcgaagaggtctggggagagaaggtgcctggacacgaacgaggaaagatcctcatgaaattggccgacttggtcgaggccaacgctgacgagcttgcggcgattgagtctcttgataacggaaaggccttctcgattgccagatcgtttgatgtccccgaggctgctgcctgcctcaggtattacggtggatgggctggtgagtaggattcaaaggtccttctccacgttagccaaatctcatcaaccccccctcttttttgttcccattcagacaaggacggaggaaaggttatcgaggtcgaccagagcaagatggcctacaccagacacgagccgattggagtcgttggacagattatcccttggaacttcccgattcttatgtacgtatcaaagcgttgtgacgttctacatctttgactcttagattgctaatcttcatgctcgtgctgtccttccgtttaggtttgcgtggaaggtcggacctggtaagcaccctctcttatcatcccctcttttgctctgactctgatcacctgctcatcattcgattcactctcttagctctcgcttgtggaaacaccgtcgtcatgaagccctccgagatgactcctctgaccgctcttcgaatggttgccttgatgaacgaggctggtgtgcccaagggtgtgttcaagtgagtggttttcgtttttttttgtcatccagccacgtttttaataaccgacaggcgctgattttaacccacgctttctcgtccctcgctctctagcctgatcaacggacttggtatcactgtcggagccgccattgcctcccaccctagaattctcaaggtcgccttcaccggatcaactttggtcggacgaaacatcatgaaggccgcatcggagaccaatttgaagaacatcacgctcgagcttggtggaaagtccccgaacatcgtgttcgaggacgccgatctcgatcaggccgcatcctggtcgtgctttggaatcttcttcaaccacggccaggcctgctgtgccggttcaaggatctacgtccaggagtccatcaaagagaagttcatggagaagtttatggcaaaggtcaaggcgctcaaggtcggaaaccccttcgatgatgccaccttccagggtccccaggtgtcccaggctcagtacgaccgaatcatgtcctacatacagtccggcaaggacgagggtgcgacattgcttgccggaggaaagcgacatggtgacaagggatacttcatcgagcctacggtgttcgccgatgtcaagcagaacatgaagatctccaaggaagagatcttcggacccgtcgtcgccatcgccaccttcaaggacgaggccgatgtcattcagatggccaacaagtcggagtacggtttggcttccgcagtgttctcccgagatgtctccagagcgatcaccgtggccaacaggattcaggccggaactgtttgggtcaactgttacaaccagctcaacagtcaggttccattcggaggattcaaggccagtggaatcggtcgagagcttggcgagtacgcgctccacaactacacgagcatcaagtcggtgcacatcaacttgtccggaggtaaccctctctaagcggggtgattgttgtttcttctttctgttttctccttctatctcttcttccgggtctacatgtgatacttgtactcttcccctctttctctctcatgtcagtgctgtgactatgaaatccttcctaggcttggttgtagtgatcgttgtctttgtatttataccattatgtgtcgccttgatccatgtctgttcttggtgtctcttttgtgactcgtgagaaagcggttaaaaggtcatctttatttctatcctgagatcaagtgcgaagctcgcgccaaattctggacgattgtcggagcaacgccgatagtaactctttcaacatacccgaactccatcttctacatacacacacttacagtcacgctttcagaccgaccacaggaatagagacagatgaacgtctatccgctagcatttggacttgcatcctatttggccaacagtggacggaagaaaggctcgttgtcaacctctggaggtgggtatcgttcatcttctcgtgtgttgaattcatcaccgagtcgggagcggcctcggatgaatggtcacaagcattattcgtaccactctcaaactcactcgttcttgggatgaaaaaatgacaaccaaaagcgctcggagcatgggtcgtgggatattttaccatggcgaacgacctacatgtaaggattatgctccttaccgtcatatgggcttgcgatggacatatcgcaggtcgaccgagctggattgaaactgacggattgagggttcgaatctcctggaccaaagctttttggagcattgatgatagtcagtccagtcttttggtttctcttcccaggcaaagtcatgtagacacagtgctgagttgcgtacgtgcgagagaatcgttcaggtgttttacctccttgggtcgaaaggcacgtttctcttcctttgctattacgtttctgcttttcaaccggtctgacatcgatttttcctgattaccatgtgcgcgcttggttctttactacttcttttggttcttccttcctgctgacccagctacgaaatacaaatccctcgtcaaggcgcaacttgagtctggccatccgtcatcctcgacaccatctgcaggccatcgaacgttcttccaggtcgtgtcgaattcgttcagtggcacgatcgttgctatcttttggaggatcttctatgggactgatggtgttcgtcacggtggggacgtgagtttctctttgcttgtatcagatcttgaacgtggggcgtggctgacccggttgtttgctctgatattctttctgcttttcttcgtttttgtttgattatctgtctgtctgtccgtccgaaaaaaaaaccccccacaaaaagtttctcgacttgaagaatagttgtccggtagtttccacttctgagctagacaggtggagtaaggtcttcgtttacgccgccatcgggtccgtgcttgctttctctcttcttcgttcacttggcttggctgggcgtgtctgatgttccaagaagatcaaactgatgtttctgtcgcgggtcatcctgatcttttgagagggaagtaggcatttcgcttgttgtctaggtgatacactcgcatcagaggttagctttttttgtgactcaatcgacacttggggaaggtgagagggttcgaagggaagaaagtgaaggcagttgtgaacactgcaatcagctaaacgactggagaaagaaaagacagatcgtgattaacatttttctttcttttctttcttttacttccctacccctgtttcggtgaccgcgctagcttgggattctgtctgtaagtatggttgtcgtgagcgacacatgtataagcctgtatcgttcgactttatgtctcctgtccggttcctttgactaaatttctgattacttcgcgggtttgtagaaatctcgcccgagacttgtgacgacgttccgaccggtccgttcgctctctcccctatccctcccacaaaaaagaaaaaaggaaaaactttcttcacttgggtgatattgcttagtccttgactgatcgtctctgttgattcatgtcttgctcggcgtcatgcgtcggaacgaacgaaccccatgcgcgctctaccgaatccgcacacacatacaggtcccccctggaacgaacggcggggtcagtctgtttggcctgacggtctccctcctcggcggcctgatcatctcgtcgacgtccgtgctcgttctgctcgcggagagtccggcatgcaggggcgagcctggtatggccgactgggtgcgtgaggtgatgaccgccgggatggccgccggtctagggggcagcctgctggactctctcctgggcgcgaccgtccagcggacggtgtactcggcaaaagaccgtaaggtcctcaccaccgagccggctcaagccgattgggaggaccaagcgttggtggtggtcgctggttggaacttgttgacgaacagccaggtatgtgtcaactcttttttctttttctttttctattttaaatctttctcccttcgccccctttttccattgattcgtgagaaaagaaagaagaaagaaacaaaaccataactgatcttctctctcgatgcgaccgggtttgttacgaaaaaaacaaaacaaaacaatcaagatcaacttgcttacaagcatggtatgcgcgcttgcgtgtggttatgtcgcctatcttagttgatcgtacatgtgccttgccggagtcataaatatgtgtgtgtgtgtacggccgagagctgcgcgtcaagtgagaagggatgcttgacgttgtcaaccccccccccc

SEQ ID NO: 2670 - DNA, 4050 bp, Xanthophyllomyces dendrorhous
cccccccccccttctttatttagtctacgtactcatggcattttgtcctttgtctttctcttcctctttttgagccaagtttgcaacctagacaaggaatggttcgagccgagagccgtgttatcagagtcgaacccagacaacggaaagcacagagcgcacgacgacgagtgaccgtaaatagaaatcatcaagagacaagggcgtaaaggagaaacgtcaagagtagacattgaaaagatgttcggacaaagagatcgatgaggaaacgttggcaaagaaaagaaaagaaaagggaaggataattgatggacgatatagagtacatatgacacaacgtggtcttcgtggttcgttctccgttttgttttcgaatgggtttcttttttctgttcttttatgtcttccctttgagcgaaaactagatcaagctgagaccaaagaataagaaaaagagggatagattggaaaaaaagatgcaaggaaaagatcataatgaaggggaagggaaaaggaaatcatggatatgaacaggccaaattgaatttggagatcagacgctctgctcggatgagccgacggtaagggcacctttggataagagaagagaaagtcctaaagtcagctcttcctgcctttgatccgcaaaacaaaacaaaagaacacatgatgatcgaatcaaaaaaagaagagctttggatgccgacttacttccgctcatcggacggaactctttgcgctcgaccatctccctggcccaatccttcataatgatccctccagaatttccggcctgaccacttggtgggttgttcacctgtgtgtacggatactgtgagtttgcgttggggccggtaccggacttgccaaaagacgcggtgggcgatcgctcgaacggcttcaagctcagactcgcctgtgcgcgtgtgcagaaacgggtaggtcggccggtttcagcaattcgatcactctcgacgaaacaatcataaagagggagccaaagagaaggaaacagagaacagaaaaaaaaggaacccttaggaaggaagaactcacaaagctcgtaggaaacaacgggtttcctggtccccgttctgaccgagggtcccaagtttcgtcggtctcttcgaactcgttttctgacgattgggtaggagggaagcccgattcgtagtttgcatgctgtgttaaccttccagcttccacgaggcccatgcctcgaggaagggatcctctccaagaaccgacgggcgttgcgtcggccgacgttccagccgacggcctggcgaagtccctggcaagcgaggaggacgagaatgaagaggatgagaaggatgaccgacctcgatgaggaccgccggacaggtcggacgggttggtgaacgaggagcacccaccggtatcgcccggtccaccggacagtccggtctgaatgggcgaggatacaatggagactccgacgtaggaccgtgttctcggccgcgtggaacccgtcgtgggcgaaggctctcgtccgtcattcccatcttgatcaccggatccggtcgcagagttttttcggtctggcttgatggtatcggaccggtcgagggagaacgctctctccggggtgcctcccatgggagtcttgtggccttcggatacgtttagagaggactgcttgagaggtgacgagccgggaagcttccccaccagagaatcgctcttgggcgtcgttgtcgacggggactcgaccggaggcgagccctcctcttcgtcctcaccgatgggttccatgatgtgtgacgacacgctggactcgtacgacgccgtggagggaagggagatgctgtctctatccgggctgaaggaagccccaccgatgatgccatcctcaaggctgtcaaacttgctgctccgccttctggaccgggagtggggcgagcggtcaagtgagtcgagctggtcatccgagtcgtccgcgtactctagcccttggatccagacgtccttttctattctgtctggacgaccgttgtcgatcgggtgagctccagcggagacgctgtcgaaatcaccgtcgtccacaccgaggagtcctttgagcttttcccacaacggctcgctcctgtactcgacggcctgttggaccttgttgacccagatccggtcgggcatcgactggcgctcgacctgagtaagataggtgaccaacgtggggaacgaccacgtcttgggatctgcctctgaagcctgaacgtttgcctcggtggagggaaaggcgagcttgagcaggtggaagagcgccttgtttttgccttcgtccatgagatctttgatctcggctccccgggtctcgaaagggaggaggacctcatcttcgagcgggacaaactcgaccggttcgaactcttcttcctcggcttggtgcctgtcccactgtcgagaagatgagagggctcggccggatggtccgaaggaggaagcagaggaagagctgaaggatctcgcatgaccggacgaggttgatctggccatgtcgacgacctcccggggggtcaactcgagcgcgttctcccgaccgccaagggaaccctgacgactgtgtgagggtctggaagggtcgtcgggaagagacatgtatgagccggattggaagccagaggcgatgtgggatccgattggggaaccaaacgaggaggatgcgaacgatagccgaggggacgacggtccggagaccgacgggggaggggggtggagagatttcaacggagagtggggcatggacattgccggcgaggacgttgcggatcgtctatgggccggtgatggccggttgaaaggaaatggggagatagacaaaggggatgaagggaatgagaaggatgtcagcctatccgttcgtacagataagagcagcaagaacatatgagcaccgacttgttttctttggagccactgggagctcggacgatggtcagcctgctgagcccgcccgggctgtttgtctggtcgggggacatggagatgaccgaggctctcctgcctggtgccatcgggtttgatttggacagggacctttctcgggtgtggtatggttccgaggggagggtgtgagaggccggaggtaggccctggtgatggtgatggtgatggtgagggtgcaggtccaggtgcgaatgcgatgatgaggatgagaacacgcatatatgaaagagaaaaaagaaaaggacataacgggatgaacaaacgtgaaggtcgtctagaatctctcaaagaaaggcgaacgaaacaaacgggaagacgtacctcgatagaactctcgctccaggtgtcgagcgcgctatcgtccgtcactttggattctggcctagggatgatctttagcttgctcaacaagtttggcagcgttttctgatggacacgtcagcgtacgggtggtagaacaagcgggagtgggagtgagcatccaagttccaacgacagacagagtacaccaaagatgggaagcctagagagattgaatatgaaagcgaggcggggaagaaaggcaaagaacagacctggtgttgaggggcgtgagttgctcgccaagactcgatgctctggtgagacatgtgtgtgagtgtgggtgtgggtgctgatgtgagagtactgatgtgagagtaagggagtgagtgtggacgaatgaacgggtcgagggttcgaaagaaagacgagtggtggtggtgaggaagcaagatgtggatcagggcggagatggggttggacgtcgttcaggcctcgtcaggaacgcttcccccacgcagaacagatcttggcctgccctggaacgacgggaaggcaccggaaggcagggggtgggagggcaggccagggcagggagggcgaggcaagtttgatcggggctaggctcgaggcgccacgcgtaggggcacggacactagacgatgctccaggcgccctggaggcggacggcaagatcacaaggccggacccgacagcaatcgaccggctggcttgacgtcatctccaaaagtctggaccttgaggttgagaaggggggggggg

SEQ ID NO: 2671 - DNA, 1072 bp, Xanthophyllomyces dendrorhous
gggggggggggagttcaaggcgaactttgtgggttgctgcgtatgacacggtccatatgagtaaaccttgtagcagcacgggagagaaggcacgttcgtttgaagggacggaaggaagagagtgactaaccgatgtgatttaatgggctgtgagtaagggggtaagctgggtaagctggtaagatcgtgagagtgagtgatgggtaaccactgtcgaggtcataagaaatcactatttgtcagcccagtgccgggggggaagactcggaagagaactcaagactcggcatgatcacgaatgggtgactactcgatgtgatttgttggcgataatggtacgatgtgggtgtgggtgagtgtgagataaggggggtgttccaaggggagttagtgagcgattaccatggggggttacacgagagacccaagacgagagagggacaaaactacgaaggacgtgcaaacgcaatacaaaggaggtatgaaggaataacaaaatggttacacagcggatggatagtaaacagctcaatcactcccaacggaacaggcacgagagcggaagagtggagagataaaggcgtctgaaggaaggcggtggaagacgggaagataggaagaggaggaaatagaaaataaaaacgaaaataaaataaaaataaaatagagaggcggtgtttttgtctattctattgctttgctttccccttgtgcttccgaacgattgaagaaacgtacgattattttcttttcttttctttttctctagccttgtgggtttgtggcgtgtctgagtgcggtgcggtgccgtgctgtgttgtgcttttctttgtcagctcctctctctcttgccgttccacactctctctgccctgttcgccctagtcctggccctgattatctgttccgctcgagtgtcctgtcaatctttttctcttgcctttctgtcactctctgtctgttagctcgccccttgtgcctgtctttgtgcctgtgtcctgtgccctgtgtcctgtgccctgtgccctgtgcgttctgcctcccttatttcaggcacaaccccctccccccc

SEQ ID NO: 2672 - DNA, 1500 bp, Xanthophyllomyces dendrorhous
gcccctgatcgtcttggctcgttcttccagtccgtccatcgaccgagcacattcatcctcattcacatcctcacccagcacatccatacactcatcctcatacttgggtgcttcgatagacatagacacatccatacccatagataagcacacccacacccacacacacacacaatggaagacctgttcgaagaaaaagatccattccggttcgatctctactctgagcaaaccacgatgctgagccctcagccagaccttctcccacacccccacgaccaggactccttttcgttctcagacatctcttccttctcctcctctggatcctcctctgccggctctgtgccgtcgccaggccaacaggcagatctgtccttccagtctacgtcctgcgatctcgacggcttgccctcggaagacgagctgttcgaattgatgtgcggtgctcacaccgccccctcgtcctcgttcgatacgaccgcagccatgaccgcaacgacgacgaccacgacgaccaccacagctcatccttccgccttgccttctgatggtatcgagctcacaccgggactctacccagatgatgtctttcaatcgtttcccatagaatccttagcctcgttctggaacggagtagacctcggaccctccgtgccgtctcagtctgtcaatcaggctgtctccttttcgtcctccacctcttcttcctcgtcctcccccgccttcggtttcgcctctgtcccaacctcatcaccgccaacgcctccgtcgtcgacaacgagcgaactgttcaactcgatcttctcaaccaccaggctggatcataccacgcttcctccaccaccatccccacagacactcgctcagctacagccagcgtccgtgtttttcgaacccccggtgcctcagccgcaagaagttccctcgttcattctgtcctatctctctcatccccaggaacagcccgtccagttcggtcgtcccgacccagtcgtcgaccattcttctcactcgaccggcacggctcataaacgcaaggctcctccctctcctccggcctcacactcttctatctctgactcgagcccttccgttcaaaatcccgtctctgcctcggttcctgcccctgctcccctcccgacgagttcacctccgagatcagttccgtcactcactctaccccaaccagatcaagacgggcccaacgatggattggcagcatccaaaccgccgaccgaccacaacgcgatcgaacgaaagtacagagacaacatcaacgatggtttcaccagactccgagactctgtccctgttcttcgagcgctcttgttagtatcatttctcttctttctttctttcctctgtcgcattcttgttctcttccacctcctccttctctcctctacttctccgcccaagcacttaccaaatctcattggtcctctatcattccgttttttcatcacactccttcttcctttgccccccccccccaca

SEQ ID NO: 2673 - DNA, 2194 bp, Xanthophyllomyces dendrorhous
acacacacacacacgcgcagtaaaacgtccaccccaatcaccctcccgctcgatacaccctccattcggaccggtctgatcgacggaatgcctcccgagaccaaacagggcaaggctaccgtacttggcgccgccagagagtacatcctcgaacttcaaagggagcgcgcccgactcaagcgctactctcagtttctcgagaaacgtcttggctcgtccccttgggaggtttgttcttggtttcatcctttttcttatctttacatccatttatagttctttgaactgacatcatgctcaaaccctctccgtttcctctttcttccctccccctccctcaggactttctcgccgccgactcccacgcgatccttgatccttatcttcaatcgatcactacgcccacccgcccatcggcagctccgtcggttcggtcccaaccgatttcttcttcggccctcactcgatccttgccccctccaccgccaccaccccctcggaagaaggcccgagtgacggccaccgtcaccaccactaccgctgccaccgcggctacggccggtgccgtcggtggaggaaccgtcatgctcgtcctcggactgggcgtcggcctgttcaacccgttcgatccgttgtactctgttgacaagaacccgggcgcagcggtcgtcaaaggaaaagtcattctcggcacacaggccactccctcatcctccctacacgctacccccccgcccttgagtttcgccgctccgacctgtttgtgcatctcgattgtcgtcctgtcgcttatgctcctcgcggtctcccgctcggccagacggaggttccaacgaggcgtctccaggtggactaagcttgtcgtccgtgggtctgggtccggcttcccgggtgaagacgaagagtctgagggcaaacaagatcgactcccggtcggttgggtcgaactcgaaggtggccaagtcagtggctgggttggttggggttggaaagcgggcgagagagaaaatcacgaatggatcagctgtggagatcgggagctcatctttgttcgtgtttcgtttgttttttattaatctttttcttgtgttttcttggtgcatatctttctttcttgccttgacggtgattgatgagacttgccttggtttttgttcttgtttttttcttcctttttcttctcttcgcccttgtcaatgtctctttctctgtgcagccgaaacccatcatctcatccgcccgagtacattgtcacacttcaaaacatgtcccgacgcaacctcatgcccttacccacccaaatatcaatcaactctacccggctagacccttgccgatgccattgcccgaccctcggatatcgtccacacctacctcgcctttggatcgaccgttctcatccctgacctcggttgcgataaccgggcttataccgggtcatgaggagcgtcgcctgttggttcggcctttagaatcaggcccatcaaaacgctgatctgatctagtttccttttatttttctcttcctttttgtctttccttctctcttcttccggtttttctttgccctgtgttgcttcctttcgtgtgtccctttttctgtctctctctgtctcgtcaatctcttcctatttgctcctctatttcttgttatccttcttccgcagcagagagaaggcaggccttcttgtttggatcctcgttgtatctttagtcaaccgcctctttcttcacccaataccctttcctctccttcgtcggcttcgtcctttcgtctgtctatatttatactgtctcgatctgctttcatcttttcatgcttccgtctgcccatcccgtcgtccgtctgccttgccagccctttttctttttctcttttctctctctgtctctcctttccttttgctatcctttctgccggcgaccaggacccgtcagagagccttgactaataaatcaatctatcatatgtaaacctttcgatcagcgcttggatctcgttgtgtctcctgttcttggtctcgtctgtcacaacaatcgtgcggagagccgaacgaaccagaaaggcacaatcaatcatccatctagaagagcgtcccggtgggggggaggagagagaaaaaatgattcaagagggatagcgagagagagagagagagagagagtgtgtgtgtgtgtgtgtgtgtgtgtttgt

SEQ ID NO: 2674 - DNA, 377 bp, Xanthophyllomyces dendrorhous
gtgtgtgtgtgtgtgtttgtttgacatcaaaaaaaagaaaaatttgaacaaaggacgacccggccgcttgggtttagacctgcttggctccccactgttctctgtaagccttcatgccctccaactcggtctcgagcccaggctgcgagctcgcccaatcgatcaggtcgttcagcgtgcagatcgggacgacagggatgttgtactccttggagagctcctgcacggtcgacaggctcgacgacgagagttctccaggcccgacctcctgtcggtccaccaggacgaccactcctgttagcgttgcgctcgacgggagaagggctatggcttccctgactgctttctgtgatttgcaagagagagagaaagagaga

SEQ ID NO: 2675 - DNA, 28688 bp, Xanthophyllomyces dendrorhous
agagagagagaaagagagaaaagaaaggaagaaagtgttagcgttgcttgacggatccttcacgaaagctggttgtttcaaccatggatgtgaacgatttaaaaggagaaagagaaaagaaacaaaaaatcaacccaccccactggtaaggacatcatcgatgatgaccacccgtttaccttccatcgacgcaccgaccagctggccgccctctccatggtccttcttctccttccggttgtagcaatactccttccggaccccgtgcttctcttccagagccatacaggtgatcgccgctagcggaatacccttgtaggccgggccgaacaggatgtcaaactcggtcgagaaggcggatgagacgatggccgaggcgtacgactgtgccgtcgtggagaggatcgagccattgtatagcaggccggcgttgaaaaagtacggggattgtctttgaggccgagagcaagcgagcgagcaaggtagcccagcaagaccgagaaggaaaaaaaaagaagaaaaaaaaaaggtttctttctttttaacaagtctacctcggaagaccaggatgttctggaaggcttcaaagacaatgtccataccggccactcttaagagtaaactccccgaacaggagagctttcgactcgagggagccctcgataaagtcgctcttgagctttgagatctgcttgctgtctgccatgctgtctgtatggatgcttgatggttgatgtgagccaggcttttttcccggggggaaattctctggcgggtaagcgcaagaaaaagaaggccgcttacgtaagcgtaaagtcttgtgggctccttccttgttgatcgctcgaccgaccgagagaacccaaaaaccatcgtctcccccatcaacagaagcaagcgagatatagcccacacacacatatggatcgcccgccctcgtcgacacctaggaggactcacctcaagacgctctcgctcgcacaggtcccgtcggtcaacactgccgcccgctcgttctccggtccaccggcgtccgcgtcatgtacgcctccgaacatgaaaacaacactggccgagacgttctccggtgacccacccggcacgccttcgtccagacagaccgctctcgcctcagctgactctttgcctggtacaccagccacacctggcacgccttccggtcgggtcctcgccagttcgctctcccgggcaggctcggtaggacgaaatccgatgaggaggaagccgtcgatcagctactcacctagctttcgagagaacctctcgacagattctcttgaaggtgccgtgcccaagggaagagcgtcgcccatgctaggtacccctagaagcacctccatgtttggcttggggatcagtgaggaagaacccttggatggggctgctcagtctggtgagcaggtcgggttgaccgagggcgttcggtcgataagtatcggaaggtctcctcggaggacgagacgttcgatggaagacatgaccgctcctgcgaccagtccagcaccggctgctcaagcgatgacacttgctgaaaagtaagatcctctttcttcttttttcttttttttcttcttacctctctttcttttaccgcttttgtttctcttttctctttgtcttgtcttgtttcgttctagtttgctctgttgtgatcttttctgaatcgagttaggctgaaaaatttcaccatatgctccccaaaaagacatgccgaccttctctcctttatcgcccaaaaagaatcaagatgtctagagcttagagagcaactcgctcagaacgaagccgagttggcgaacctcaagaaaaaatggacgaccgtggtatctcgagcgtcagctcgttcggccaacgaattaaatcctccgttctctgccaatcagaacaggacaaacaatgccggcaacggccaaggctctggtggcaacttgtcttccgtcgcaagcctaggcgctcatccggagggattgctcagctcggaaacgatccagagtggcaagagacttttgaacctcgttctaggcgtcgacctggacgagccgtcttcggtgtcaccttcttcggaatcgacgcctttgccgacgcccccgccttctgcttcccttgcttcagtgccgaactcttcatcgacatcatcatcttcctcctcatcctctccctctcccttctcttctcttacttcttcttcttcttcttcgtctacttccaactcggcgcccgttcgacacaagtacactagctcgtccctatcttcttcgagcctagaaaaagtctcggaggcaccagaagatccactctcagcttctctcctcaccaaacccgagtccaacgggtctcctatgtccaaccctcgacctgtccctccgtccaggccagcctcccattcgactcgccggctgtctctattgtctcaatcatctggttcctcaattgactcaaccgttcagaccttttcccagagctctgttgatctcatgatgggcaacagctgggacccagacttagtcttgagtgaggaaggagaggaagaagccggtcggagagaacggggtagcgcgagaggtctcatggaaggattggcagcttcgtccggagtgtccaccagtgggtggggcaaaaaattcggagagctcgcccagggtctcagcgggaacgagcactttttacaatcgaaacgagccaccttgagcttcacctctagtctttcctccgcgttttccttcagcccgctcggtggagggccgagcggcccgaacccctcgtcacagtcgtctgatccggatctgtcgacgtccccgacgccggtctcttcgctttcgaaaccgagcccgttgacgctttctcgttcaaccttctcgtccagtccttcgtcaaagctcaaggcgaccaagatgcgaccactctcaagatcgaacggattggctcaatctccagggtttggtagggccttgacgtctccgacgggcgtgcccagggattcgtccgactcgatagatggcgccgactttttcggaccggatgcgtcggtagagtcaaactcgttgcagaccccgttggagcctgtaggaagggtcgtcagtcgtggagacgagaaccgatcagcagagggagagacccggacagagaaccctctgatggagagtgagggggattggaattggtagtcgagtcatgagcacagactctctctttgcttttccatttttttctgttttcctttcttgtttctttctcttttgaagtaatctctttctttttctctatttttctttctttttcttatttctcaccttctttcctgaaattctctatttcattctctctctttcatccgcttagatgtcgtaacgatctagacgtatctgcaacgatttccccgtttcctcctctttttcatcttcctcttctttctttttctccttcatttcaactgtcctcttccttctcctcccccttacttcccctctcgtcttgcaaaagaggtctcgtcctcagatcataccgtaatctcacgatcctcctttgcctatccgtctctcctcgttctgtcttcttccatcctttcttgtccccttcccgattcccgtgttaaacgatacaaacgacatatgcgctcatgacccttctcttggttcacgtcttcggacccctctttctactctctctctctttctcgttctcgtttcatcctctttcttggtttgctcccgtgggacgatgcgagagagagattcggaaaagatgcaagtccgttgaaatcgaaggcagcggaaggtatatggtagaataaatcaaaacaggcacagacgaactagacgagaacagtggtgagaatgagtgaaaaggagtattatcaaaattgtaagcatgaaccaatttgaaggaagaaaaaaacacacagagttacgagacgaaatgccagggaaggaggaagaagaaagaatgaagcaggggaaaccccctatatagaaagaagcgaataaacatttttttaaaagcacaagagagccaaaagattacacgtcgatcacctcgatgtcgtcgaccaatctccttctggcttcctcggccgatttcaagaatcctccgatcatctctccgtttcccttcttttccaactctgctttcatccgatcaaactctcttctgatccaagcctcgaccgtcaacttgctctcttcttcggtcaacaccagaccagaactcaaagttgtgtttattgaccctgacggctgatcggtgacggcggacgggacgacggcaggttccgatatgtgcgcagccggaaaactacccattggttctgaagtcgtagcagagagaacggctttcgacactggctcaagaagagacgaagacggctgagaaaccggaggagcgttgaaaagttgatccagctttgaagccacccttcgcgcagataacgcgccgtccagaatgactttgtctctcggcgaacgaagctcccgtggcgtcaacggtttactaggtgatatccgcgccggaagatgaacggcatgaggcgaccttttcagctccaaacttggaccaggcgagagaagcgggatccgagagggtgtgaacgaagatgatggtggtttggccgttgttatcggagatgtaggaatcgccggcagggatttcaaagagctcggtttcgacgcgacggtcgtacgtgaaaacggagtggttttggaagatgatgaaggtggtctcgatgatgaagtggtagtggtcgtggcggtggttgcggatgatgatgatttcgtgcgggtatgattcgattgcagagcgatctttgatttagacgccgatttaggtggaggctgaaattccgacaggttattcagatcagttccagaacatcttctatagaacagagagaaaaatcactgaccgaaggcgctttcggtggtctgactatcagatgttccagtaacagctcatcttcatcttctgacagcgctttccttcttgctgttttcgctgatggacagaccttttcaatctcctctgtctccatttcatcggcctcatccgcctctatgacctctttgaccttcttcttggccgagacctttgtcttggttgcgcgtagctttgttgctgtagatgcggcgagatctgtcgaaggtgtcgatcgggtagccgaggaaagagcgcgtgaacgtgaggcacgcaaaacggaagtagtcgttgacgctgtcgaagctaccgtggaaggagcgttctatttgaaacaaatagaatgaaaaccgattaccatcgcgtgatgttgattatcagaaggctgctatctaacaaggattaaatttccgtcgatcagtactctatgacttacacgcaacgttcctcttcggcttttcacagcgggcgttgtgacgttattctctggggcttccaccatttcgtaatcctcgtcgttctcgtccactggcacaatatcttcgacttcggcctgagtctttcgactatttgtcactctgggcactcttggttttgtcgcccgagaagctctggaagatgttgttgattgagaagcagacagctgagagggtggggcagctgggaaagctttatgaccgaagaaagcgcatttgggatttctatcaaagtgctcgttgctattgatttccagtcattgaaccaaggtttgagtatattgagtttagactctcaccagaaacatagagcatctaaaatagcatggacttactagggaacatccgttggctcccagcctgctaaagacaagtgacaatagatacaagtcgctctgtctgtatcttctggagtaggtgagtatatgaatcctcctttggcaagctatgtttccgaacgggagaaaatcgaacaatgaagaaaggaaaaacaacacgaccagcgggtagaaacatcatgagcttacttaaatcaagatcctcctcaacaactgaatgtaaagcaagaacttaccagtttggaagtcggtagccaagccttcttcttgtcatgcggccaccattttccgaacgtggctaaccttgccgcctcaagtgacttgtccgacggaagctcctccttctcttccgttgtcaacttgaccgcgtccttcggcccctgacccatctccttctttctcacttccacccaacatttggttctcgcccatccacacttgttcagcccgtcatgtcctagatgttcaacaaacggatcatcttgctcttcccaaccacccaattccttggcgcagagaaaacatttgacgaggtccggctcagctttcgttggtcgaaagtaccaaccggcttgagctagattatcaggcgtaagcttgggatgagttgctggttttagtggccaagctggatgggcaggcagaccgtgtttctttgtccgagaggcggcgaatgttgataaacgggtctcgtagacttccatcttgatgtatgctggtcgaagtgcgggtttacgtgttgggttgccgttgacgttgacgaagtagaaagccaaatcaagaaaacaaacgcgtgagcgggagggtcgtgtaaccattatgtgtaaccataacgcactgctgaacaccatcgtcctcatcgcggtaagaagaaagaatgaagatagaaagatcatttttatatcttggctggaacgatagaaaagagagaaaggtatactcagcgcttgaagttaaaatacaaagtaggaggtctagattaaacagaatgcttctggtgaacaggtacagaaagatagagctagacgttaaacaaccatgctacacaagtttgatacacgatcgaaagtgtgactatgaagatgaagagatttcgtatatattgcatgaaagaacataaaagatataagcataggagaaaagaaatgaggctgggtttgtgaaatcgaacaagcacgatgtaaggagcgttcaggctactctctgtgtttgcttagctgacatagggctttggttctgtgtaggggacaagctcgactattgaagtaaacaatcacaaatcatgagtcggcctcagtcggaaagcatattgaggtgaccaaaggaagaagcagagactgacccgacttcgagtgggagatgacaacttttctgctatctgctcaagctcgccgttcgtctcgctttgatcggcgagcgtctcgttgatcatctgcattgtcatatcaagtgaccgacgacgagtcgaaggtgaggttgtcgttgtgcctaaagaagctcgacgaccatgcccagctgaaaatttgatcgttgccgaaatgcaaaaaatcagtttcgaatgccatcgaacacacgctcattatcttatgggcaggagatcgcttacgcttccaaggtacctggtccatcgaagacgaaggagtgattggagatgacgagatggaatctgaaggactgtccgagcgaggactagctgaggacacaaagtcggcctgtcgaaagaaaaagcaaggttagatacccctggtaaaatgatgcaaaatgtataatgacgggcttacatctacgagatccggaggaaggcgctcattttcaatgtcgctgacacgactgcatcgaggaaggtagaaaaggaagacagattcgagcataaacttccgggcatcattttgactttccttcatggaaggagcacttacgcatctttgaagccatgaaccgaatctcgaacctcctcggcaccatccgccagatgctcagatatattatctgatgagcctggtcgtttcaactccgagttactctccgtgtcctctcttaccgaaggtggaaccaaacaattctccaataaacaccacgcgctgaatttacatcgaaggtcgttaaaaactcacctcatgagcgcgaaaactcgtgacattcgaccgatagctaatatctttttcttgacaagttttctattctctgttgaatccttggtaggaatctcaatctcaagcgatgtatcgccatcttcctcggattcatcaagctcttcctgggtacagcaatttaggattgaaatcaacatgtcggtgactaaattcatgaacatgacacatgctgctcgttagcatttcgatcttaattgccaaacagataaaaattagaaaaaatccaacacacttttttcaccgacgaaaggcaaactccaagtgaaaacgtccataaaatttggaagaaagtaaggatgaggagttgcgttaaacctgttcgaatcaacgacaaagagaaaagttaaaactcggaagtccgaatcattagatctacaaaagacaaggcaaagcattctcactgtcgtatatttaatacattttgctcgtgtttaagcacagcggccttattgccataaacatcgactgtcgaacgtagtttatacccgtagcattcagtcttgatgcgcattccctacaacttgtagacgttacaattggaataggcactcacgctataaatcagattgatgtaaaatatggatgctaattggtcagaacaatggctgatagcaatactaagtccacggtaccaggtctacatatacttacataatttggcgcagagaatatcgtcaaaacggcaggctgatgatcgaaaatgccagcaaatcaatcaagttagcactgagaagctattatatgaagcggaggaactgacaaagccccatttattcttcttgtacatccgaaacccctatatgatacaattgaagagatccaatcgcagtttagtctgtcaatacggtttagattattaaaaaacttgagctgttgacttacttggtcttgggcttcgtgcgctctaattacactcaagagtttgtttctctctaaaaagtcacacacagctttgaacctgataattatgtttggagttgatttgttcattgtcagacaaattccaagcactttttgaagacgcgatgattgacgacacatacgaataaaagtagctgcatccccgaacagcgttatgggtatagccattcccatgtgtccccttatccgaatcaaaatcctcgagaggatcagaccaaagcatgtcacaaaagacacctacatgcacagcgtagtgagggttggtcagtagtgatttggatggaaattggtctttataatatgaacctaccggatgtaggagggctggtaaaccataaagtcagttttgatcggtggtatatattgtcaagaacaaaaaggcgaagtgagcttactctctgaatcgatcaacctgttacgagtatcatacattggttcatgatcagtgcctggaccgcatttgataattcatgaatgatactaacatctcgaatgtcatccaaagtcatgatacctgggctcaaacctccatggacacataagaactgcttgttcatgactgccgctagcggtagacagcagaacgcttccatgcaagcctcatagacagtctccgagtacttgtatttgcctagatgacgtcatcaacataatggtaagatttagcgcggatcatctaggctatatgatgaaggtacgtacactctagtttgaaggtgaagtagtcggttagatgccggcactcatggtttcctcttagtaagaagaacgtgtccggataatgaattttcaaagcccaaaggtagagaacacactgttggaatcacccacatgaccgaaagcagcaagatgagcttatccgcgcttgccttgatggcaagacaacaggtcaacatacctcgatcgagaaataacctcggtcaacatagtctcctaggaaaagataacgcgtgttctctggattaccaccgatctcaaatagcttcatcaggtcgtactacattcgcgtttgtgaggagcatcagtaatgttacaatcactaatcggtatgatagaacactagaagatcgcacatattggccatgaatgtctccacacactaaatcgtggaatttacgaaggttcaagttatcgttatggaatacgtgtcgacaggagttgcagtcaaatctacttacctgtaaccggtgactctacatccaataggttgggttccttcctcagcaactctgcgcccctagaaacggataacaaagatcgcttgacatgtcaacaggtggaatttttagaccttgatctgagaggaagtagtggaaaaaagcgccaacttctgtagaatgaatagggcctggtcctcagtcaatctaccctcccgatatagatggtccttcaggaacgcgatgtttggctttgtaggatccgactctgcatagaattgactgtctgttgggaggaaggtcgctggtgcttgaaccttatcatcatgttaagagaaggaaacagaaacacgatcaagaatgtcaaaaatgaatccattcaggatgcacccttgatcgggccatttgagatagcatatagtccactcctcgtacctctttgacaaatctaaagtcgagatcaatggctcaatatcgtcaacgacaacaagcagcagattgtccgagaacccctgagagagctcaagggcgagatcgggatgctaacctctctgtcgtactcgctatctctccagtttcaagctcatgcttagtgaagtcgatgataggcttgttgaaatcgaaccccaagattaccagaaaagtgtgataacatcaaaccaaaccgaccatgattaagtgatagatgagaatcagcgacagctaatctttcagctcacaagtctttccaactctcaagagtctgacgaccggtaaatattttcatattcattcttggaaaaacaatggaaaaagggggcaagacccaccaaagcgttcttattggtgattgcagacaccgccgctctcaaatgctcactcttaggcgccattctgactttcttcgattgagaagactatttaagaggggtgtggtttggttatctctatctatagtgctgttatggtggaggcgatggcgggtgatattgatgttagaggacaaaggccagggcgtgtcctgccaggttataatcgagcgcaacgaaggacagccgagtagtgataaagacgaggtagcagatcccgtcatcgactgcgctcactcaaggggcaggtcacgtttcatttcgagcgtttaaatcaatcgactccccaaggtatgagagccacaacggggataagaagcattgtacaacaaatcatttcctacgcgcaatattacaacaaaaagaacttgaagagagaggagagacagtcaagtagcaaagtgaaatatgaaatatgatacagaactgaaaagccacacgcttgaaacagctgagagcacatcacttggccgacatgttctcgcgaaagaactaacaccgatcattgggatagcatcttcagctcgctatctttcgaaacacaagagtaataagaatcaagaacgtacctgtgggaggaatcgaccagagtccttgacagttctctccatcgtctcaaagtcaacgtaaacgcacccaaaacgagtttttatcccggaagcccactggtaaagaccaggatgtcagttatatatgcaaaatttcagaaaacacgagggatatagaagttcatcatacttcaaagttgtccgagaatgaccagccaaaataagatcggacatccactccatcttcgaggatagcctgcttgacggcatcaagatgtcccttgaagtaatttgttcgatcggtatcgtctagatacattaaagcaaggcaatcaagatatttcaactatagaattcgccgagattttcgcggccatataacaaggacttacggattctgcatgcaagacatagccgtaacagtatattcagaattaatttcgatgacaacaattagaatgatatgcaaactcatccgtcttaactcacgcttgttccttctccattttgtgttctcccttgacagcaaatccctgcaaacgatgatataaagattagtcagttgatcagctcatcgatcacagaaaaatattagatcaggtgctacgggtttgaaatcacgtacattctcagtcataaagattggtagcttatatcttttgtaaagatagttcagtagcgcccttaaaccccaagggacgtcttgcagccaatctgcctcgctctgaactccaagttctctgcccgaaccgtctggtcgctggaaagacagaatagcattgccatcaaactcgtcacacccgccggcgacgatcgtgttggttgtgctgttgatggtaagattcagtgtcaaacatgtgtttgtaattgatagaacgcagggaacttactatgtattacatccataaaactacaaaagatgatcgccaaaatgtgttcagcatcgactcagtcagatgtgatgatattgaaatacatacatcggaagaaccatgaaccaatttgatctcgtcttctgtaaatttaggcaatcgatccccaagtctcttgaccaaggatggaggctataatttggattcacagacacattcgttatttcgggtcagatgacggtagacacttggttgatgttgagaagcgtagagtcatggacgctctgtcggcttcagcaaagattcctctggaacttacatagtggcctaagtaaatcggatcagcaaaccatccgatagccacgtccatcttgtcctgggtcgctttgatggctaaaacaagacagaagtgaaagaaacggaagtcaatattcggcatgcattgttgtcaaacatatttctcgaacagttcgactgactctcgggcctgttgtcgagaggtatagcccaatccccattcagtgtgattccgatggtaccctgtatgacaagacaagatgagtaagcatagattcagccttgactcagttgatgcttttgtttcctatctttaacattttagaatgcaaccatataagctattaccttttgagcggacttgtatttggtcctgtataacctggtgactttggcatgagctagaatgcagtggtgtccaacgctagtttttgttatttgagtttttgtttaccatggtcagacttgctctcaactagattcaattgttgaaaaacgacgcacatccacggttcaacattagaaacatgtcctggcgcaaacgccccacgtccatggcctagaacggccacacacctgtaatatttgaggtaaatataggccagagttagtgttctgtcttgagatacggaaccactgcttatgatatggcgcaccatggctcgttcaatgtgagccagtgtttcactctatcgccaaatcgcgagaaacatagatcggcctgttttgccgcaaataccaacaccagtcagcactcgaagacaaaaaatagctgagggaaatagaagggattgtacatatcgctcgaaatcggagaaaatatccctagatagccaaccaccataccgttcgtagagcgcaagaggtaaatcccaactaagatgattgacaaacaatcaagaacgataagcagataaatgagcgtatttgacaatgttcaccggtataactgactggtacaaagtctagttgtgtcgattgacgaatgaatgtgatgagcacttaggaccgctttcaatgcttaatgcataatacaaacgtaccgcgaaaggagtgatcccgttttctaggagctcatcaactgtgcataccaaatatacaagcatgagtcggataatcatcattaaattaaaatgagcatcgaggacgcacttaggtcgctgtagaactgaatcccttcctctgaaactggatcatctttacctccctttgggatgatcctagaccaagagaatgagaacctgtaagagttgactcctaaggacttcattactgtaatagcccatgaagatacgaatttaagaccaatgtgagtatgacttgtatgaacacaagaagcttagacagatgtgatgaacgtacgggcaatgtcctctttgaagagccgtacatggtcacacgtccgagctacagatgtgccatcttgaatcttgcccggttgggtacagaatttgtcccaaatctatgtgcgatgacagttcatggaagattgtaaaataatggtcccagtcaaattttgatatctgaggtgaatggagtgaatctaagagaaaccccatactgaaggtcctctctctccttcctatgaagatggtacaaaaaaattagttttgtgctactacgaagatatcagaaacagagacggacttacctcggctgcagattcaatctgggctgaggccgaggcaaacccaaacaggaaggaatcaggcaggagaccagctggatcagctgggccattactgttggaggaactatgaccgtggccatgaccattgctatgaccattagacgtgtggttttcagcgttgttgccgttgagcccgtttccattgactaaaagtacagaggtaggtacggtcatgattctgcaaaaggcgtaaagacgaaagtgttacgggaacggtggacgagagagaaacagtcaagagaatgtcgatgaatgatctctggatgagtgcaaactccggtctgaatatgcttctcaagaaccagaagcagaggagtgatgaatgtttaaatggttgtccggtcaaatgaaaggactaacttccgaaatcgaatcagggtttatccgagaaaactccctgtgttgaaaaccatgcttcatgaaatgctcgggcaattaagcggcataagattgtgtctcttctctttgcattgtctgttcatctatacctctatgtaaatttaaatgagtattggcacgcactaacccatgatagagctcatgtatgtgtgtccgactttagatgagaaagtatcatcattttgggagtccttgatcagagtcggtaattgaccggtccggagcccgattcctggaactctgttagggttaccttctattttctccttctgttcatttgagatatttgacgcgtttccgacgcgacgcgtttctctacgcagccggtctttcaacgatttgtgagctttcactttcgatctcatagccatcttagtgcctcacacatactacgtattccttcttcatctgtttagagaagcaagatgagtctcatgtatggaaaggagccagccggggagaagacatctcttgatatgggtaggttctgtgttttctcgagtgttctctcaacaacaagctgacccaatgcgtcatatagataatgccgccgaggtcaactttatccgacaatttgagaatcttcccaaggttagttggtctggctactttttgatgatggagaaaaggtctcggcatttgtcgaccggttcttacaatccgataacacaatagaaattagatggaacgattcgcctattcgaccgcgtcgtaagtgtctatcgtgtctttaatgctcaggagtgccagatcaccggagttcatcgtctgttcaatgtctttacagaattactattcctgccacggagaagacgcaattcttatagcgagcatcgtctacaacaccagtaatgctataaagttcatcggttctaaaaccaagaagtggccgttgggcttgccgagtgtgactctcaatcagaacgccgctaaggggtttctcagagatgctctcaccgccagacagatgaagatcgaggtcagtcaatctgtcaagatgaaatgctctccaaatagcgtctgactgttcttttttatttttatttttttacccttgtcatgacagatttatagtcaagagggaacaggaaggccaaatcagccttggcttcttactcgtcaagttagtctaaatatgactactaatcaacgatgtcgcccgaactcaatagcggttgacctaatcattgatataacacataggcttctccgggaaacatatcgcaacttgaagatcttcttttcaccaatcacgatctgctgacttctcccgtaaggctgtctttctgatcgactgctctggttcttcatacttcaactgatatctgtgtgcactaaaccttctgaaattcagattgtcatggctatcaaggtgatgactaaggacggggttcgcacagtcggggcagcctttgctgatgtatcaagtagagaacttggagtagcagaatttgccgataacgatctgttctccaatacagaggtctgtacgctttcctgttatacgatcaatatctcgtgtatcgagcaaaacctgatggtcttttctaattaaaaatatcgtatgtctactacataacgacctattcagagcttgttaattcagctgagcgtcaaagaatgcatcatccaggcggacgataaacgaacagactatgatcttgcaaagatcagaacgatgctcgagcgatgtggggtaatcgctaccgaaacccgcgccagtgagttgtttaccatctctgtgccaagttgaacgtctgctgatacttagatcgtaaacaggtgaatttaatccaaagaatgtagaacaagacctgaacagattactcaacccaaaacacgccgctcagtctcttcgtgagcgatcctgctaattttgctctgttcattgaccatcgactaaaattctcttaatatgttcacgatatctcgttcctctttagctcaactcaacctcaagaccgcgctctactctgtctcagccctcatttcccatctctcactactgaccgatgctactacacacggaagcttctcattaagaacccatgatttatctcaacacatgaaattagacgcttctgctttatctgcgctcaacttgttaccaaccccaggtgacattggaggaaaaaacagtagtctgtatggtttgctaaacaggtgtaaaacacctcaaggtcagcggcttttaagggtttggctgaagcagcctttggtcaacaagcatgagattggtgggtttcatatctgtcttctcagcaaagaacggataagaagagagcaagactgaatgaaaagactttgtctctctgtgccttgtatctctctttggcgctaaaagagagacggcagagcttggtcgaaactttcgttgaagatgcagaagcaaggcgcacgcttcaggtaagtctacttgtttttcccttcatccttatgatcgaacttatctgacgacgtcttctggtgaccctctttgtcaacaccactaacttgaattcaatccattagtctgtgtatctcaaagtgatgcctgatttctctcgcctaagcaaacgacttcagcgtagaatggcctctctggaagacgtagtcagaatctatcaggctgtactcagagtaagccagcacaatttcatctttgaacacatacttatgatcgtatcaccagagatagactaagctttctgttattcagttgccggagctcattgatacactggaaggtattcagcttgataaagaagactgcaagataattatcaacgaagtgtttgtcaatcaacttaaggttagaatttcgtgtctccacctcatctcttccctactcgcattttatttaccaaaccttctctcgtattgtcaatcttcattacggcttccttcaggaatattcgaccgctcttgagggttatattgagctggttgaatctaccatcgatttgaacgagctaggatctcacaactacgttatcaagtctgacttcgatgacactctacaatcaatcaaggatcaactgattcaagctagggatggactggactccgaacatgaacgagtcggtagagaattagggctagatatcgagaaaaaattacatttggaaaatcaacaggtttatggatactgtctaagagttaccaaggcggtcagtatgaatccatctttcccttcttttgaccggtgtcaaatcgttgataccaaactttgcgttcatctggatttaaaatctcttaggaagcttctgtcattcgaaacaagagagggtatattgagcttggtactcagaaatctgggacatacttcacaacttcagcgctgaaggagttcgcgtcatcgtaccaggatttgtcccggtcatatagtaaggcgcaagacagcttggttaaagaggttgttgaaatcgctagtcagtactccagtcttgcttctttcgagcgttgtttcacaaaacagaacatcaacagaaacctatcagtagctgatcaagagttgtaattgggtttctcaggcacgtacatccccgtgtttgaaacgttagacactgttattgctaatctggacgtgattgtcaggtaagtcagatcttccagtgatgccctcgttgacgcttaagatcaaatcacgttcctaacctaatcttgttttttctgtagttttgcggatatatccattagcgctcctataccttacgtaaagcctataatcaaggagatgggtcagtcttcgatgctacctctgtattttcattctcatgtacattcgaatgcggtcgtaactgagttctatcgatcaaacttcctttccactgttttcaggcagtggcaactgcatcatcaaagagggtcgacacccatgtctcgaagtccaagacgaagtcacttttattcccaatgacgttgaattcttgagaggtgcgcttcagcgttcttttatcgcaaataaggcggtcccattagacttgcaggataattgatatcgagaacccgttctgataatcgtgatgacagataccgccgaattccagattgtttctgggccaaacatgggaggaaaatccacatatcttcgacaagtgtgtcttctatctctgttgcgaatctcttccattctttcttgattctttatatttacgcttcgatctgctcactcttcaggtcggcgtcatcgcgttaatgtcgcaaatcggctgtttcgtccctgcgacggaagcagagatgccaatcttcgactgtgtattggcccgagttggagctggagacagtcagttgaagggaatctcgaccttcatggcggaaagtcagctgactcatctcttcattcagtattgtccgttcaaggactagtacgagattgtacttactctaatctcacttaatcaacctctcagtgttggagacggcgaccattcttcgtgtacgtgtcaaggctatcattgtcgtatcatgtgattggccttattcataaacttgccctattccgatatagactgccacgagctcctcgttactgctgattgatgagttgggtcgtggaaccagtacatatgatggatttggcctggtaagtcactcagcaaattattcgcttctccgtcgatctaacaagtcctttctccttcacgctacacacaggcctgggctatcagcgagtgagctttgtttcatttcatttcatcatactatgtcgtttggcgctcctgatcacgaacctcaaatctattctctacagatatattgttacgaagattaaagcattctcgctcttcgctacacatttccatgaacttaccactttggcacaccaaaacccaacggtccgcaatctgcaggtcaaagcgaggatccaagataaagatattaccttcctctataccgtggagcctggtacgtaacctcgaattattcttgttacttgcgcgaatcatcgtctttgactatcatgatctgactaatctcttcatctttgtataggtgtaagcggacaaagttatggtatccatgtaagtagatgaacaatttgtcaatgaatggtcatcatatccgactgaccggtctctatcatggtgctcaggttgctgagctagccaaatttccagaaagcgttgtcaaggtttgtcaacatcgatcgattaattggccgatattaccacttgtctgagtctcttgatgtgtcatttgggaatgtagatggcaaagcgaaaagcagatgaactggaagacttcggaggtatgttggcgtgaaccctttgtacccggggttactctatttcgttttgctgatctgtcgaaaccccatatttgtgatttctcgatttgcagacgatgcggaagttactccagacgattcaaacccgttcaccaagtattctcgagaggaaacggaagaaggaacgaaaatcgtcaaacagttcctcaacgcttggtcttccagagtaccttcgtcatccaaagactcaggggttgatgagaagagccaggcaacgttagaggaggaattggcgattctacgcgagatagcggcagaatacagagatcagatcgaggccaacccttacactaggtcactccttgatagcttctaagtttcttattcatatcttcatacttggccctaatcctgagggagttttggtccttcttcgcgctcttttccttgctctataagtgtctattcgtttcttcattttatctttctgtccagactctgtgtacaatatccatacatgttcatcatctattcgtccgcagctttgacagctacaacggcctcctcctggttcagagctgccgcttcgtcagagacggattctgaagcaggctcggaaacaggttctgatccctgtaacccagatcggggtcgttgaggaggtctctccaacacaacttctttacccctgtttaaatgatgcgcaccaaatacgaaggtcaatatagaacggagaagtacaagaaagacacagttatgatcagtgcgagacgtaccagattcggttggaaagggccctgttgattgtacaattttgtgaaaagcaaaaggttggtattgattacaagctctgcacaagtcttcgaagaaatggcgtaacgtactgcttatcattcttggccaacatcaatgacatcgagtttttggccttccagagaggcataatcagatcatgcttcaagctatcaatagatcaggaaaccaatttagtatatctactaagtattaataaaacgaacagagaggaagatacacggaccttcctccatctaattctccggccttgatgacgaaaatcatcgatccaacaggcttctcagcaaagatagactttgagggctcttcaaagttctcaatctattacgacccaatcaagcatgcgggttgttcatatcaagtcaggtcattacacattgtaacaaacgagttgaaaatctgatgactggaatttaccaatgggtagtacgtctccattaaccgtctcaaatccttgattgatccaacgacaaatttactctttccaacataaggcaaaaggacctgaagaccctcctggcatgctcgccacttgcactgcatagtctctcccggcgtatcttgtcgagcaaagagcttgcaaccggctgagacaagcctgactcgagtgtattcattgttctcaatgatagcctgatgggtcaagaatttgatgagtcatttaagatgtaatgtgaaacgcctcttaaatgaaaaaacaaaccttgcccatttcacaagtatgatagacggatcggacggcgtcaccattgatgtttcgaacatagagagtggatgttgggaactccgagctgagttcaaagaagttgctgtgaatcgacgtgtattaaataaagggtgaacagcaaagtcagcttgacatgaataggaaggtaacttgtgaggcaaactctaccaacacagctgctttgacttcgtccgaatcagcgttaaggaaatagtagggatgctcctgtgagatgaagacatcaatctgatcagtttacaacctgtatgagtttatagacaatgcgtttcagtaggtacaaactttgaatgtaggatccggctttctactgaggttgatctccggcactccatttacactgagtttgagtgccatagcttcctgcctcgcttttttggggactggctggcttgtctttgaagaagattccagcgacggagaagctccgcgcttgataccagcctcgacagcttgcccagtgaccctgtttgtcaatacaagtgaagtcaggtgacagatatgaagagatgagaagtgctgttcgcgatgatgatacttactccaatggttcttccgaaggagctccagtagatcctggctcagtcttggcgatcgaatcaacgacagctatagttctggaaacaaacatcgaccattgagaaggaacaaattatcgtcttgagcattcagcatgtcttcagccaatatatcggatattatggacagatgtcatgctcgcttacgtgggctcctcgagaatcacttgatctttctcatcattcattgcctgcttctcctgaacgtcggctccgcttgggggcgaaggtgcagcagattcagatttctccaaaacgacgacgaagaatcctccggtatcctgatgatgagggtagagtctcatgctatttcgattccaattttagaagaacaatatgtagaaagatcaacatccaagatgacaacctcatgcaagccagaacgtaaaaaacgaaccatctctccaagccaagctccttctcgttaccgaccggccagtacgttttatgaatcttctccttgagctcatccgatgtctcgggatcatcaaggaactcttggtatgtatcgtagatcgacatcgtatccttaccgactccggctttccaagtggttaatccagggaatctcttcaaaagaggatatcgatcagagacatctacaatcttgaaagctgtcaaaaaaatggggacatgatatcaacacacacatacacacaatggcataggttacgtgattgttagcttagtccaaagaacaaaacacaaaccagaattgttgtttagggcagcagaaatgacggcctcattctccaccggattgaaggaacacgtcgagtaaaccaatcgtcccccaggcttgagaagatccattgctcgaagtaaaattttcaattgaagactacacaacattatgtttatgcgacgcttggttatgttcagctccatctgttcgtgcgccgctgaatggtatgcatgcaagatcagagactgtcaacttacgcatgaagaccattcccatcgatggggctccatttgttccaaatctgtatgttcttccgcattgttccgtctcccgaacatggaacatcgcacagaattcgatcaaactgaagggttttcataccaaacttctccattccatcaggccccaaagagattttgggaaactgaatacaacatataaagatagattcagaatcataaaggtgcaaaaaatccaaggcgcgacgagatggaaagaacaaaccctcgaggcatccaagttcgttatcaacacatttgcactcggtaacctgttgctctggtgaaccaatagatgggatctcttaagatcgctatcgttagccactacgaggcctctcttattgataggcacgttggtctcatccgccgtagacgcatgaagagcttcgaggagctgcgcggtcttggatccgggtgcggcacacatgtctaggacgaggtggtgggggaggacgtcaaggaagagaggcggaatcattgaaacagcttcttgtcgggacaagttaccctacaagttacacgttatgagcgcgcgagccgacaaaaagaatttatagagagcagagtgaagggacaagacgcgtagcttagcgacaagcctcaagacagcaatataggatattgataaagatttggacgaacgacctcagtttcgtaaaccaaaaattgttgaagcttcttgtactctggattctttcggatcaacgactttccggcgttgacctgccatcccaaaccatcagggtacctattatgatttgaataggccggtttagtgctccgttgagattaaagagttaaagagtgaacgaaccaaggtatctgaaaggggggaatcgtcttgactccctcatcctcaacatccccaatcctggacacgaagttctccttgaaaagctcattcaggtcctgtgcgtttctgatttagaaacagtttgacacgaatcaaaccgagcaaatttgttaggggaaaacaaatgattatccagaatggaggtggagtgttaacaatcagagtcttaagagaacttgacgaactttttgctaccggtgaatcggaaggtgacgggtaacggctccgtcaatttgtggtagaacgcatcccattcatcctcggggacgaccttctgagcctacaaatcccagagacacaaacagattccgtgcagatgtttaaaaggtcaatataacagaaacacaaaagtctcgcccacttgggcaagaataatattcctctcaaactcgatgtgtgagcgtctcttggatgcattcaagaacggaagaacgaactttataaaacgtcgcgaatttctcgttcgtcatctcgatctccttccaattaagcttgtcctgctgccattttgccttctgagcatcaccctctgcaccagtcggtttgacggatccagtcgagttcttgttcttgttcttgcctccctttcgctacagcaagaatatagaaggaagacaagagggcagaagaaactaaatcagtctagaccgttctcgaccgctgttcctatttttccttacactgatacgtaacaccttaccttgttgtttcgaggcattgcttggaatagtttggcagaaggaatataagaaggaagaagtcgtctagtgtagtagacgagttgtgtgttcatcgtccatccgtttactcttaatgggaaagaaaagatcaaacagacaccaaattcatgttcacgtgatggctaaagctatgcttcgccacatcaaagatacctttgctctgtcttaaatgtcttcatgtctcggaatataggctgatagaaccatcagtgaaggctgctggaggagaaatgatagcgaaacaatgtgtataatgccagcaatacatggtagaacaaatgcctaggtaaagagtttgccaacggaagtctgagtgccctcggcgttcttcttgagaacctctgtcgattccaacagataagtagccaaaatattaacgtatgaacaccagggtaacacatggaatagcaattgtggacaaacttactagcaatagccatctcaaaatcttcaccgcctacatgaacacgcctctctcgaagagcgtacatacctatacaaattgtataagaggacatcaaagtcaatattcgaggctgggaaaaagtcaaaggcataagtaacttaccagcctcggtacatatacccctaacttcagcaccagaacagttgcccatcttctccgctaatgctcggaaattgattcctcgttgcagagacatctacaaggagaagaaaaatttcaataagtacacgcatatctaccaaatcaattcgggcgcttgcagtcaaggcgtacctttctggaatgaattcgcaagatagacactcgggcttcaggtcccgggggggggaactcaatctttcggtcgattcgtcccggacggagcagggcagaatcgagaatatctatcgaatatgcaaaacacagtcttaaaagacgatataaaatcgaatagattgaggaagctctactttactcaccaattcggtttgtagccatgattacctgatcgatgcaaaatcaagtggtgagccgtaagcacgttgaagcgtttaccaaaagctaaaatcacgtaccttgatgttctttgacggctcgaatccatcgagctggtttaacaactctaacatcgttcgctgaacttcagagtctcctcctcctccacccctcgaacttccaatcgaatcaatctcatccatgaagatgatactaggcgcgtgctccctagccatcacaaacaactctctcaccatcctggaaccttctccaatgtacttttgcaccaattcacttccagaaactcggatgaaccgacaatcggtatggtgagcgactgctcgagccagtaaagtctttcctgttcctggaggaccatatagcagaactcccttgggctgggcgataccaagagagtcaaacaactcagggtgtttgatgggaagctcgataacctccttgacttcttttatttgtttgtctaatcctccgaccatctcgtatgttgaatccgggactttttcgaccatcatgagcgagacaagggggtcgatcttgttgggcaatattcggtgaagtttatatgaatccgaccggagggccactcggagatttggggtaagagagttgatgtcgatgtcaggagtaagatcgaccactgaacgtgatgatgaatcgtaagaaatacatggtcagaatctatacctcaactgacgaatctctgcgagatgtgtatgggaagggagtactgaccgtatttgccttcaggctgaaccttgacaagcactttagtcttgcccatcaccttgattacctctccgacatagcttccaggctcttgtaagagctgaagctcttctctcagtaaacgaactgacgaatcaaatgtcgtatttcatttgtcagtaacgatattcatagtttctgagagagcattgagctcaaataaaactcaaatatcagtttatgatgcttacctcgagcgttcagggcattcctttgagcctccaaccgacgaaggttctgagtcttcttgttgatcgatagctctgctgcagagattttcgaagtataatatgaagtgatatccccggttgtcggttttgattttgttactgtaggagacatttctcaagcgatgatgatgaatgggatggaatgggtgattggcagaagagatgtggtctaggatggagatgagcgttgagcggtgcgtgggcgcgtggaagtggcaactctaggctcggctcgattgacttcaacaatttctttattctgttctcatcttacgttgatatcactttcttctccatctccactttatctatctctatctttaagaatgacttcccacttggcctcctgtatcttttgcaagatcatcaaaagtggtaagtgaaactttatgacatctcaaagcatcttttgagatcatatatcagaataaagaaacaaacacgaaaacttgttaatacgttatttattgcggcttctccttgaaagaaatcccatcactcaagctagccgagaccgagctctcgtgagtatcatttggttatcatcgtacaaccttgctccttgattgattgcctttcttgcttgtagctatgcttttcttgacattggacctctgtccaaaggacactgcttggtaaatctcttgatgttgctccttgcctctcgcttctaaaatcattgatcagaatgattgtatttgatggtatgatcaggtgattcccaaataccatgccgcaaagcttcacgagcttcccgacaaccacctcgcagatatcttgcctgtaaggaatccccgatcaattcaagaccagctggaaaatatcaaatcgactgacttgtctgctactttattctcatgcttgtttcactctgcgcttcaaaaaaaaatcagctggccaagaaactcgccatcgccactggagcggtcgactataatatcctccagaataatggtcgaaatgctcatcaggtcgtcgatcacgtccatttccatgttcgtcctatattctctctttatcatcatatgaatttccttcagactccatcaagttcttgagagcgtgttcaccggtttcgaatgctaaaacgtatttctgtgcgcacatctacaaacaaatctaggtcatccccaaaccctcggagagtgatgaaagtggattgggaatcaagtggcctagtaagtggctcacgccaggttgtcattatttgcttgtgaatcgtctgttggactcataaactcaatttcttattcgctactcatagctacttctccagtacgttcaactttcgatctcgtccaccttcatgagccttgaattgaattatatctgacctttttactctttcataataacttctgcttctatctcctttgcttgctccgatattcagtccaaagacgagctcaatgttgtatttgaggagatgaaagccaagctttcgaaactctaaaagcttgtgcagtcgtttcatcatcatctgttgtgagtttgaggtgagtgagtgagtgagcaagtggatgcattgtgagtgaatgagtgagtagacgtatgtcggagattgatgtatcgttatcaagctactttttcggtcttcgttctaacttttgaaaaaccacgggagaaaagccattggccaatctaatcgatacaacttaattctacaaatatccacggttgaaaggaaggcaagggatgagaagcacagacaaagacaaacttcactcaaaactcaatgaagctagagcgacaagaaggttgaaaatgacgatgaggaaaaagagctgaatgagaagagaaagagggagatggaagaatcacaagaaagcttctagactaactacaaaactaataccatacgaatgatcgtcaggtaagactcaagtagatggccaaatcattctacaatgtcttctatagttggcaccccttccttatcgtgctgcgaatgatatgtatcgttggcttcttcaggatatctaggtctcgtccgttcgatgctttatgccggcgagaattgagaagatagctactttattatttatcgcgcaaaaacagagaaaaagaacgatgcagaactcactcctcgactatgtcatggtaacaccattctaccgcctctgccgcccagtagaaatcacagtgctcgctcagatcaatcttcttgattctgattacttgaacatctggctctttttcc

SEQ ID NO: 2676 - DNA, 7150 bp, Xanthophyllomyces dendrorhous
atacggaccccgaccaaagatgcagagcgatcaaaaagattagcagaacgcccgaggaaacaagggcaaaattaggggaagagaacgaacatgatagatggacaaaggagggaatcgatggtcaaaccatcgatccaacgaggtatcgaacaaacacttccgagtagcgaaccctcctttaccagcccaccagaagatcgaggccgaactgtatacatggatgatcgattgagcacgtggtgcgataagtgggaatctgaaaattcattgttgtgtatggactaacctgacaggagatggcgtaaaccgaaacatttttcctttccgtctagccagcctgtgttccgacagaaggaacatgcaaacgagttgtcaaaaaaccaggtagatgagtttggtatcatcacgaatcatactaaccagttggcatccgtccagtcaaacaagaaggaaaacatggtgtatccaagaaaagcctgcgataaaagacgcgaattgtaagcatcttgaagaggatttggtcgcttgcgagaaactcacaaagaccgactgaggtgcgtaatcatacgcccatgtcatgattggaataaagtctaaaacgccaaagaatcgtctccaagatttccaatccattctacctaacgtagtgaatggaaacccatgtgtcaacggccccgcaaatacagccggggcaagcgcgatgaaaactgagagcttgggtccaagttctggacatattccaagggaaagtgaagtgaaggctgtcccgttgccttgggagtggccaatgaaagcgatctgataatgaacagatagatttgaagcgaaatgagatgtatttatcagatgattgtcatgctggtctaagggagagacagcgatgtaatcctgaacttacctgatcatacccagtgagttttcggacctcttcgaccagcgcaggaaggtcgtacaaagcaagttctctgatagtccagtctgtttagacaatttggtacataatcctgatcagatcttgagactctaatatacaagtactcttcggattcgtcaaggattaaatgaccaaccccaaaatcgtgcctctcctctactgtaagttttgtgacccattccaaagactcctcgagtgtttcctaaaaagacttgatagcctctgttcaacccgacaagtcaaatataaggtggtatgtttagcggacgatcgtggacgagttggtgaatatcactgactgttttgccagccaaaaagccaaacttcgctcctcactagtgatgaagcttcctgaactctggaacagaccatgcatgagaagaattggatatccacctctgccatccgatctcgcaattgggttgggagggacgactcgttgaagtctaagggcaacccgtaaggttagtcataggtcttacgccgtggatggtgcatttgttacagatagcgaaagatgcatacctcaacaagaacccgtcttccgtttctaccacgagattttctaagtcgaaccccacctgcctggcatagtaggctggatcgttcgtgatgacctcatccttccatcgcgtcgcctcgtcccattcaaagcttggcggcgtctttttccagaaccagcttggcaaagttttcttaaagaaagcagccgtcaaggcatatgtaaccactccagccagaaaaattgatgagagaatgagactgcctgtttggagggcgaataggtcaaggcgcgatcgaagggcgctcagaaaggctaatggccctttggacacagtcacaggtggtggtggcgtgtatggtctctgaaagatagaagacgacgagatctgaggagtcgttctaggaattgtacaacaacaacaacaaggaacacttagaaacgttcgacaggcaaacgagaagcatatacttacggccgctcgatcaagattcccagctccccctcatcacctctattccatccatcatcgacattgggtctgattctatctcttggccttgttatcagcggctctgtatcctctccatgatctccggcgtcttcggcgacatagctttcgccatttgatccagaccagggcaacacgttgtcccacctggtacgccctttgtctttactgatcgtacctctacggcccccaccagggatgcctggtccatcggccacgctgaccactttgagagatgactgatcaggtgttactgaactgattgccgtatcatgtggcctttgtttgagaagagaagatgtctgagcaggactcaaccttggcaatagtgtatgagaagaagccaacgaggacgaagaggggaacgttgaagacactggtaccagctgaatggatgctcccgctcgatgagggatggtagtatcacgatccaaggagatacctgatggatatgacggaggagacgctggcataacggccttttcgatcaggactcttgtgttctagatgtctacaatatgactgatgagttcgatgcaagtttgaatgatgggcagtgttggtctactaacgtgtgttgggaactcaagcgcgtttatgctcgagttcatcattacgtaatcgaacgctttccttctgattgtcgttcctgacgttcttgtatatactaagaaacatcaacacgtcaagaaaccaagcagtccatgctgatgatgaagatggttgtgtgtttcgcaaacaagaattcagatcagttggaaggtcaacatagagaggaagccttgatgggagatatcacttgatcaaccctcgagagacagaatcaatgatcaagcatgaaaaagaatctcgatgaggaagactacaattgaatcttgttcaaccaagatcgtctttccagctgaaagtttgtacgctctttcgggaaattttgtgtgtgtccggtcgattgtctgtgatggcgctgatggttgtgtgttctaatcggtgttgaccgtacgaattttgtttaccaaaaacgatttttcttgatagtctttcactctcactttcatattgaggttctgaaccttgcaaagcagagagctatgagaatactttgttcagcccgtgtctggtcaacattagcctgcgctcgttctcggagactgctctctaggaatccagtccaggcttacaatacgcgtgccttccatgacagccttcctgctcttctgagagttgatcctcatcgacgatcgttacaagatcctatatttaaggacacgatctttgctctagcaactcctccaggaaaagcaggcgtagcggtcattcgtatatctggtccagctgttcaagacgtctggcggttgatgatatcgtctcctaacaaagagggtttaacacaaaaccaaagcgagaagctccctcagccgaggcagatggtccttagggatatcaaggtgccatctctcaatggtgatggcgagatcattgaccaaggcttagttgtctactttgctggcaagtcgaattcactatggttgatatgaagaactgttaggatctgacatggctttttacgttgactctctcaaccttcagcccccaagtcattcactaccgagcctcttctcgagatacatacccactcatctacagctgtgatctctaaagtactgtcctcccttgctcaaatcaatggttgtcggccagctgagagaggagaattcaccaagactgcgttcatggcaggcaggatggacctcacagaagttgaaggtctgaaggatttgatcgatgcagagactgaaggtcagagaaaacttgccagaggattggctggggtgagtctcagattatctcttcgtctcaccgagagcctaacatattaaaagcatatttcacgaggcacttcttatagggagatcacagaattcgatatgaagcgttaagaacagatatcattcatgccatggctatcgccgaagctttgattgattttggagaggatgacaatattggagacgaggtattcgaacaaggttcgtcaacatcttcttcccatgtcattccttagttcatttgtgaactttttgtgataaatcaggaatgtgatgctcacattcactcattacttagccagggataaagcaaaagagctgtgtcgggtgatggagggacatctaaatgactcgcgaagaggagaacttatgcgatcgggtgtcaagatcagcatctttggtccaccgaatgctggaaaagtcagtgtttcatttcactcgcttcagatagacagcccgtttgtaacatccatgataaactctcaatcttttacttcaaaagtcatccctcctcaaccatctatcacaacgagatgccgcaatcgtctcacctatagcgggtactacgagggacatcgtttctgtcgccttagatctagatggcatcaaagtgattttaagtgatacagctggattgagggtaacagaagatcagattgaatccaaaggaatcgcaaaggccgaggccgagtaagatattcgtcttttcttccctctttccttgcttcttcaccttgctgatgattgaaacacctcttggatatatagagtggttctgtcggatatcagaatattggtcctctccttaccggtatttgcctacccatggactcagccccaggagtacctccgtccagttatcgacttggttgatcctgaacgaacgatcgttctgttcaatcagtctgatctattaccttcttcgttctctataccggctcgtgttccctctgcttccgaccctgcattgacatctatttcagtatcaacggaaataagctgcacgccaaaagcattagctgagaggattgtacacgaatttctgccaagagggaccaagatttgggtgggcagtttggaggagaaagatgacggcttggaaagattcttaacagatggtttagggaagagcgtaaaaatgatgtgcgtctgtttttcttcacttgcgctcaattcgaggtttatcaattttaacgataagattcaataggttcgaaacaggacaaggaggatcaggagaggaaagtccgttgatcactcatcaacggcatcgacatcatcttcagaagagtttacatcatcttcaatcgttcctgggtttgtcgtttgtctcttgtttcttttatcatatttttatgtttgcttataccttcccctcgtttttatatcatcctgaatctaatgtttttcgactaacctcacaaaacagctgaaccaccaagcaatatcattttagcaaccgaatacctccgcctagcagctcgtgagattggaaaggtctctggacgagaaattggattggaagacgtattagatcgcttgtttggcgaattctgtatcggtttgtctcatcctctcaccgacttgcttgtttgcttttcgatcaacatctttggcgaacaatcgtaaagagctgacttttctacggtttcatgtctaggcaaataaatgatatgaagagcatgttgttccttcttttaagtctgagaaaacttgatctttcatattatcctcctcgtcgcattaatcaacctcccctactgcctcccacgacactccttctccaacctccacctccgcctgatccgttcccgttgacacctcctgctgtgcccgctcgtcctgccaaagctgctttctgagcactcatcaccaattctgcaatcatcccgttcgacacaatcgattcgtcttgctgagcatcgcggagttggagaagataagagaggagattggaagcttgggaggaacgggtcgacagttcggtttgaagagactctagtttatctagtgagagcaaggacagagagtctggaattttatggcgaaagagaagtatcaaacgggtcagatttgatgaatcaatccaggacggaacgtcatgttgaaaaccgaatgatcacagtcagaagaactcaccactttccatcaagcagagctcctccatagtctcccatccgacctctggcatatttcctaaaccgtacgttttcgctttccgaccctttgctcccagatcgacatctgatcccggtccgacgacgcctcctgccgtccgataggggctcgttcctccagaccgaactccttgatttgttgatccagctcgtctgggtacgtccaacgacgtcgggctagaatgggaggacgaagcattatgatggggatgaccaatggtgtttgctcgcttcgggccagaatataatttatcacctggtggggtagactgaggtcgcatcggctggtttgaatgttgattgagatgtgcactattggcgagtcgggttttgatcatcagtggcggaagggtaggttgcctcgaggttgctacctgtgaaagacagagaatatacatcagcagatgcgcctgtcgatcttagaaacgacagacagctaaagagtaaagacagacttcgtccaggttcacaggtacaccaagcgatatgagatgttcccttctcactcgactacgcgtccagtccagtggacgtaacggtacaggatcaaccaacgaattgtacagcgctcgactgaagttgcggagaagagaacgaactggacgagttaggtgacgaatgatgattaagacagacagaaagaccggattgaggttaaatgtgaacttgccttttctcatcgactaagacctgactaagaccggcgacgtccctgacatcctccccagtcatgcttacttctggatctatgtttggatatatcgggctaatgatccgttccagagaaaagcgtaaggtctggagatcagggaacggcgcgagtctcagtgatggcttttgagaaatagttgtgtatcaaatagagagagcagaaaagggtatgaggattgtaagttgatgtgcataatttctgcttcgagtttcagagagagcgatacacttacgatactcggcggaggtggaacatgaacaggagcagtctcaacctccttatcaaagtcaccgaacccttcgtcctgtacttgatcaaatcctccatcggccatatcaccaaatcccccgtctgctccttcatcgaaatctccgaaatctccgaaatcatcatcagtgggaaacccgttgttgggattggatccgaccggaactggtgctgattcttcgtcgaacgaatcaaagccatcgtcgtcatcatcgttgaat

SEQ ID NO: 2677 - DNA, 2098 bp, Xanthophyllomyces dendrorhous
tcatcgttgaatccgtctgttggaaaggagtttgacggaggaggaatagtgaaactagatgagtctgctggtttcaaaggacttgatgcagagtctcgcgttggttcagtcgttggtgatggttgttggccatcactctctggctgatcgagttgaagtgagacgggagagaagtcaagctgagaaggaaactgctcaagtcgaacagtaggtgaaggtggagaagatggagcgtctgcccaaggtgactccttctcttgttcgggagatgaagtgaggatgtccattagagattgaaacaacccggcgtggtggttgaagagacgaaagttggtgcaggtgacgatgatctttcattaagagaacgaagtatagtattagaaacagtttgtaatcatacatcaggggaaaacgtcctgttctatcattcacatctcatctctctctggcttggaatcttgtctgatcgatgacatcgatctaatgaacaacattgacaaatagatgctatccttctgaccaagacgttcgaattctttcttgtggtgaagagaaggaatgtactatagttgatgattaaggaaatctcttcggtacaattccgaactgttcccgatgtaactttgaaagcttctgctttctttctgtttgacatctctgttcatcttgctctcttctacctctccctctctcctatcaattcagtaagacatcaatcatgtctctctgttcacctcagttgacttcagtattgtccccagtggcttttgtgtttggaggatgtggctcgtaagagtgtccattccttgtctcttactttatcctgatcaccggagctgaccgaatgatgtaaattccatcagcaacgtctttgccttggaatccattctcaaagaaaactccagccttgggttggttctagtctttcggatgtctgctgatgaacctcatactgacttctttgtggttgtcttttcgacctttcctgtatcgtaccacagtcctttcataacgttcatccagttcatctttgtcgcttgtcaatccctaccttcgaacatcaccttcacctatgatcgcaaagtcactcagaaagacggtgaggtcaaacttgagactcactcgagttggataccgcgtttgaagaaacgtaaggtgccgatcacaagatggctcgttcaggtagctctttacttcactgtgagcacattgaacaactgggcattcggtttccatgtatgtctaggttctttacttctgtttctaatatcagactagtcaatgaggatttcacatggaaagaattaacctccccatcatcactcagattcctgtcgctctacatatcatcttccggtcaggaggtaatgttcttactccctaggaacacgtcacatacgtttgtcgtattgaccatcacttgattaaacatgattcacaggtctggcgatttcgatgctcacaaactacatgttcaataacaagcgttacacccccatccaaatcgtctctgtctttcttgtctccattggtatcgtccttgccactttctccgctccccctcgatcgccacgtgcatcatcgccgtcttcgcttggcaaggtcgacagcccaagcgcggcaggcctctcactatcggcagcatggcaagctttcgatccccaatatctccaaggtattggtatcctcactctcgcgctcttcatcggcgcatttttaggtatttggcaggaaaaaacgttcaaattacatggtagagattgctggcaggaaagcttgttttattcggttcgtatctcacgttaatgtcaatcttcttttggtgccattcgacactcttactccaaaccttgtctactcttttccggatataaaacatagcattttctatctcttcctttgtttgctccacttttgccttctctcccggcaacttgtcgagagctcaacgcttcgcctccccttcaactatctctctctccattcgttcctacctctgccatggccttcctcgtcgacacgttcgataaaggcgagaagggcgctctcactttctggtcgcccgatcaaatatttaacatcttgaaatatataggcg

SEQ ID NO: 2678 - DNA, 8597 bp, Xanthophyllomyces dendrorhous
atataggcgtagacctattgatcgagttacctctacccagagtttgggcgtgggtcggtgtgaacgttctgacgcaggcagtctgcgtaggtggtgtcaaccgattgacaagtgtacgtttaggtttcatcacgatgcgctgaaacacactcactgcgataacaatctcttcgttcgattgttttgtttgctatgggggggtcgaaatgtgtagaaagtttcgaatttgacgctgtcattgatcttgacggtccggaaggcgttctctctcctcctctcggtttggtggttccagggatttgagaacttgagttggggtatgatccttggtgggtctttcgtcatgggtacgtgatcttctatttcctacctgtactcgtttctatattcctagcttccgaacttagtcacgagagcgaaattccgttaaccaatttttgtttgggtaccgacgatgatgatgactgtgggatttgggatctatagttggaacaggcttatattccgctgcttgaaacatgtggacacattctcgaatggtcgccttctaagctctctatcgtcaaattctttctaccttttgaatctattcgattattcataaatattttggatctgggtcttcctctagccttcgataccaaagaccttaacaaagttcgacgcaacaaagaaaatgagaaccccaaacaagaaagtgtctgtatgccctccaatagattcatgttcattaaacttcgatccatgatcccatcggtaaaccttcaccccattcttcttcggaaacgaccgaccatcctgcttcactcaacctgttttctaggtttgaatctgtttgcgttttaggatggggaggtgatggagcaaaagacgaagcagttggttgattagaaatacccgatgttgtaggcatgcctggaccttggcgcgtctgatatacccgaagaatcgataattcagggggttagtaatgactccaaaaaaaaggcgtcgactaacgatgactagagatgattagagagagaatagagagaagacagaccaaattccggatttgttcgagccgagcttccatttcgcccaaaagatcatcggaatcttctgtcttatcctcaagcggggcatattgaaccgggacctatttattgggtgtaaagcttaggaatgagaagcgacattctggaggaaagaagagacaagctggaaaacagaaagacgagcgaggatacggacaagttttgattcaagcatatctagtaggctggatacttcaaattcgaaattcggatggctaagcgaaattgcccggaggactttccttgacctatttgttttccaaaaggaaaaggaaaaagttcaatgaacagactttaagaaaaatacaaaagaggaaaggaatcacctctcgctatcccaagcatttctgatcaagtctttaacgacgcccgtcctatcctcatcctcaagtaacctatcgaacacccaaaccaaccagctcgccaatgtatcctccccgtcgtctttatcacgcctactcctcggattctcaagaacagttataattgtgtaagcgagcgtagaagcgaacgagggatatgttgaaggaataagtgtgagaagaggtgtgtagatctcgaggagcaaagaaggaggataaggtgtctcgggagtgaaggaagaccgtttcctgtgttaagttgttttatcgttgaaagcggtcagtctgatggtgcaaggattagttcaagcccgataaactgacttttttgagataggtatcaaaccaccagcctcaattctatcatacagcccttcttgatccgattcgaatcctactaaggcctccgctaacactttcactcccatccccacgcctcccctcatctctgccatttccaaccatctaagaatgtttctctgaagctgcctaaaagaagtttgagaagttgagtggtccttagtgatcgacttcgatagagttttgtattgtttgagaaggctcgggaggagcgctttgtgcgattggaagaatggagagacggtgtgcattgtttcgaacgattgagatgacaggttaagcgtcggcagaaagaacgatacattcaggtagtttaacgcctgttcgataaacaatttttttaagtatttattgttataggcataatttctcctgattaaatcgatgattagaactaacctcttgactaccctccgttaagacctctaaagacggcaaattttcgtgcgttcctgcatgtctcagttcgaccaaccagccaggaataccgagttctgctgagatcatcgctatcggtctagcaaattggccggtctgatacgggtcgacaagggtattgatgaacctgacgagtgaagctgcaagagaaagtcggatcgaatgagggtccggacggggtacggttgtgaggagggaaagtgaagagagaagagagagagcggatgagatggcgattggatgggtagacggatgaagatgaacccatgttttgagctgtgtgataagagtcagcaaatgaaggagctcgattaggcaaggaagaggaaatagacaatggaagcagtgaatgaaggagaggtgaaggaaagaagacagactctattaagcccttgctgtcgggcttgagtatcatgctcattgtcgaatatccatccctgcacctgggcaagctcatcgagcgacctccaagggacttttctaggcataggcatctttgaaagctgacgatgaaacggatgtaggatggcagtcaatgtcgcatatcaacaaattgagcaggtaatatttggatgacccggtttgtcgcgatactaaccagataagtcaacattttgcccagcaccctgtactttcgttcttccttccatcatcaacatcattcacacactctttctcaagacaaatggcaaaccaggcaacttacatctcgctggaagatcagagcgagagtgatatattatggatgaaagaagctctcgtcatggttcgttcgacataggttcatgtatcttctcatagtcagacctgtcttttagttctcgagtaacagttccgtcttgtacaattgacttgatccgtccaggccgaggaagcgcttgaagccaacgaggtccctgtcggatgtgtttttgtgaaagatgggaaagcaatcgcccgggctcgaaatcgaacgaacgaatggcgtaacgtgcgttctcaacttgttgagcctatgtgatatctctcatactccgattgatccttttatttcgctctttcttctctatcttctaccctgtcgaacgagataaataggccactctccatgctgaactagaagcgctcgaccatattctccctctcttccccgctccgttatcagaggttacactatatgtgacggtggaaccatgtattatgtgtgcgagcgcactccgacagattgggataggggctgtctattacggttgcggaaacgatcgttttggaggttgtggaagcgtagtctgtgtgaaccaggagtacgttctatcctctttcttctcttcatgatttagagtaacactgtgatgagttgcagtagccaatgatgcttgtatgagacgttagtccgagtatagactcttttaagccatacccggcctggggtggatactacagagacgaagcaatcatgctcctccgccgtttctatatgtcagaaaattcaaacggtgcgacttttatactacaatactcgtggctttcttgcttgttctcatatcatctgattatcatctgtcctcttttatctctctctcgatttcgatcgccgtgatttacaaatgttctcccttatcgtcaacagcgccaaatccacgaaagaaagcaaccagagtgctcaagtttgagattcctcccactcctacgtcaacatccaacaccagttcctccgttcctagtagatcaaactcagttcctcctccgctgaaaaaagccaagaccgagaccgaatcaaacgcagtatcaagagcagacgacaacagcttatcgatatgagaggaggcttgtgggcagatggaaggggatgaaattttgggttcaaaaaatatctagtcaagattgatactcgatcaatcgcttgaacgatgtgattgttgtgaggctcaagaacgcaaggcattggtatgaacagaatgtgcccgtcgacaaaaattcttccaattgggtgatctatctttacgaaaccgatacaaatcttgactagtctacatcaacacatccttagctcatgtctttatgcatgatttgaaagacagataaaacagctggctcaagccttggtcatatcgacaacacatcggatacagcttccagactagatgagaaattaaagagtgaaaaaaggatgaagcatgagtttgtcgtatctcatcaaatgtatcaggataaatatgaactgacatgcatatcgtcgaatccaccgttgatttccttgaaaggtcgctcatgagagatgaattcatccacccaacttcagatcattcgagcaatttcatccaaagagaaagaagtcaacaaacaatcatatgaaagaaaacagacatccgcttcagatcacggaaagaaagaaacatacagcttgcctgccaggtaatcctcaacgatgcctggaatttccgttcgtcccttcacaccgccgaatgcagatcctttccaagttcggccggtgaccagttggaagggtcgggttgagatctcggcacccgcgggggcaacaccgatcacgttgcatacaccccaacctttgtgacaggcctcaagagctgaccgcattacgtcgacctacagtagatggatatggaaagtaaagtatacaagtacacaccacatcagctatgatcaactagagatccagaaactccctaaatgtacgcggaaaagctcttacgttcccggtggcatcaaaggtgaagtctagtcctccatcggtaatgtcaaccaagtgctgctggatggtctttccctctgggaggtccttcgggttgatgaactcggtagccccgaacttctcagcgacctccttcttctgagggttggtgtcgaccacaatgatccgggcagccttcttggctttagcgccctgaacgagcgccaatccaacacaaccggcgccgaacacagcaacatttgactcgtctattgaagtcaaacaaagaaaattgttcaaaccccggaaaatgatttcccaacatcttcatactattagcaagaacgactcaagaacctaccaattccaggagtcttcgtagcagctccatagctgaagccgtgaaatgtattgagttatgtttgatgagcttaagagcacctatatctataaacagatagaaagaaaatttcacccagtggtgattccgcaacccagcaggcaggccttctctaatggagccttatcgttaattttgacgacagagacttcagcaacaacagtgtactgggagaacgtcgacgttcccatctgttcaccaaaaacaacttatagatcagcctatactcgatcatttgatgtaacttagtgaagtgatatcacgaacgaagtgcttgatgtcctggcccttgcatttaaatcgggaggtaccatcaggcatgacaccctggccttgggtagctcggaccttaccgcagagattggtctttccagacttgcaaaacttgcactcccggcactctgaagagcagaaagagaatcagattgcgatcacgcaatgactttattgataattgaactaaccagcagtgtagagaggaataacatggtctccctttattaaattaaataaataaaaacagtttatcagactagaggggtggatagagttcgaagtacgatgatcgacactcacaacggccacgctagttacaccctctccgactgattcgacctacacaacgcaagatcaagttggtatatggatcgcgcatgtcagcgcaaacgaaatcgcagagaactcacaactcctcctcctgatgtctcaaaagatgtatcacacgtcagctaacaagtcgcgtatatgaatgttgaaaggagaaaacttgccctcgtgtcccaagatacaggggaaagcaccctctggatctcgtccggagagggtgtaagcgtcactggagtaaagtaacatacctcatcagttgatttttacttaaccttcccatgtgcgagaagagttgacttacgtatgacagataccagtgctgcagaacacaaacgtataattcacagtcaatttatcagttgctagatcaatctgttgattatcgccttgatcagcaaagtacaaccgccagactctctcacccgccctttccgatcatctcccaattatccggcggcgcctacgtcatcaggtcggttgagtagaggcaaaaaggatagatttactagagaacctggattcggacttctccagcttgaggaggagcaacctctacatcctcgatagagagaggcttggcggcttcccaagcaatggcagctgttcagatagagaaaggaatgagtctaggctggatttaaaggggaaaacatccagcaaaggagaaagaaaagaaaaaactataaagtacccttgcaagtgatggtctgtgtggatcgataggtttggagccagattagcagacagaaccttgtaaagggagaacttggtcagatctcttacttttccttcggtggacatgctttgtcagtgaacgtctgatcaggtatgtgagtggatggttgttgatgataaagatcaaggcatgagaaaaataaggaaagtggaggtcaaaaggatttgtcatctgttagggttattggccggtgatttaaactgacatctataacgaatgttgaacgttccatcaccttcatcaccactttcatcatcaccatgtcatcccctacagaaatcacatccgtatcccaatggaaccagactctccgcaccggtttgtatcaataaactgctaacaaagtctcgagatttggaccggtatatcagtatcaatatatttgctcatccgtttttgcgattctctctagcaaccgccgagggaaagactgtattcgttgactttcacgccggttcgttctggttagccgagagtttatgtaggtgaacatgtgtctgtggactgacagataaacatctttaaacctctatatgtaatgcacagtctggtgtggaccttgtaaagtaagtgtgctcctcctctatggatctaacttcaaacccgttgatcgagtgtgccgacgacccgtccactcatcttctcaatctactgccactttggaaacgatagacaattgcaccaaaatatgagagtctctcgaaatcgactcctcagtcggtctttgttcgagtagatgtcgatcagcagagagccattgcctccaaatagtcagagcgttcacctacaaaaacccccttgaacgcattcatctacgaccattcaatgctgaccaagctgtactactttctttacagtcaagtctcatctatgccaacatttctagccatcaagtccggcaaagtcgtcgaaacagttcgctctcttttttttgcctttgcaactcattcaactccatgatgtcgattgtccctcatcataaaccctcttaccacattcgatgggaaatgtgagttagattaaaggagcagacccagcaggtcttacacgactcgttaaaacccactccggaccgaaccctccagtagctccattgccgcaagaagcagaagatgccaaaacagcaggtaatgtgagttcaagcgccgaggcacatcactgcatagcattgcgaagccacgttttcgaggtcgtgtcctgatggtcgttgtcaaacttgtacctgaaacagacggccttcaaagaaggacaatgggagaaagcaatcgaacattactctcaagccatcataattgctgtatgttcctttctgtgacctgacttttcaaattcggatcactgattttctcgatctttatgatagcctgaatcggcaaccctccacgcgaacaggtcgttcgcttacttcaagaattctcagtcagacaaagcgctgatagacgcgagaaagtctgtagaacttgatggaaattttgggaagggatatgtaagattgggagatgcgtacgttggagttggtggaaaacaggcggaagctaaggaagcttgtatgtaatcttcttcttcttcttcgtctctgccttttcatgaggtgtctgactgatagaaaaatggtttatttcctgctttcatggatttgaacggttgtagatgaaaaatctcttaccctcctcccagcatctatgcgaaccggtttgtccttcaataatcctctctccagagttatctcctcaacagaacatcttactcacactgtttccgaacgatagacgtccagtcaaaactcgataaactcggcgcataagtcacactctttttaacatgaaacattctcagacacacttgaccgattcatgagaatcatatgacataattggagctatcagatgtttgattcggaagaaaaaagtggcactggtaaaactgaaagaggtgtgtgagagaagaa

SEQ ID NO: 2679 - DNA, 2254 bp, Xanthophyllomyces dendrorhous
ggtatatgtgacataaagatatgtatagtgatggtgtgccagagatgggcttgtcaggtcttgacaagaattaatgagaaaagccgacgattcagcaacaaagaacaggttgagcgctgaaagctaccgagacatgtcgcctcttggaccaaaaaggtttgcaagaacgcaagcgaataaacaagaagttcatcacaagtcgtagaatatatgtatttatgcccagttgattattgtggtttcccgagaggaacggacagagcagaacttgacgttctcctaaagaacggatagctcgatgctggagacgaggtgttggacgaagatgaaaaggtgcgcgtcctaaaagacggcgatgaaggcatgagcggtgaaggggcgaggtcatatgtcgagatattcaatctatttcgtagagagatgagcctacgaataggaagcagaaatgagaggagataagctacggacagtcaggttagcccaataagaagacaaaaagctcactcgtctcgataagcctcgttttgacgagtgactcggatgaagccgcgttcggcatcagctctataaaagttttgcatccacgtgcattagctttctgtattgaatgatatcatacacaacaatgtcactgggcgacaaaggaaggagagaaagtgggccacggacagtttacttcgcagactctcattctctcgtttgagagcctcggaaacttgctctgtggaagggttcatcggatcgtttcggcctaggaacgtgttcagtccgggcgagctcggtgaagaggatagagtcagagccgaggtggattctgaaaggggttggagttgcttagaagaggatgggtccgaagacgggtccgactgagcggccagttgggcccgaagtgtttggagttgtctgaagatttgaagaattgatcggttagtgtcgataggttgaactaaggtcatgacctccgggtatgcaaccttgtcgacaagaaaggactgaatatctacctttggagtcggaggaccaacgcctcggcctccccctcgagggcattatgaaggttggccgtgtctgatctcatctgtatccgagcttgcacgaagaagatcagttggtcgttcatgttgtgcgcttggcgcttttccaacaggagggaattaaatactgacggcttccatctgccttccgagcacattcaccaaccgttcctcctcagcctcgtaagcgttgacgatgtgctctctgtcaagaatttcttctcggtcgagtctaagcatgctattggtagatgagcctcgtcgaaacctctgggggaccaatgggtcgttgtcatcatcctgatgactggagattgacagagatcgcctaggctttgaatttgactgtggcgagttggaacagaggaggggaaggcccaagagagatatttgagtaagcccatgacagatacgagacactattgccaacaaggttcttacggttgtatgttccatatccaggaaaaaatctgagacagagagagagaggatatatctatgtttgttgagaagactgaatgggtaagaattgatgggaacacaatatgtcgagtatgtagagcgaagttagcttacacaggcatgtgatgaaaacatttttgaaatcacctgcgtacgaaccttacttgagaggaacgtgggcttaggttaaggatagattggacatgagcgtcgctgcgcttcgtgcctgccgatcgaccgatggcatcgaaacgtacgatcactcgttatgacaaaacgcctgagagttctagaccttttcatcctgcccctggtagtgcccgatggtgcctgatcgtatttatactattccattcggtgcccgacggatgcgatacgtgcatctgtgcgtcattcccctcttttgcgtgcgtgagtgtacccgtaggtggctgatgacgattggcgcgctcgctattaaattagttaaacacccgttcggatttattcttgactggcctttccttctcatgagtcctcatccagcgtctatcattcagaaagattgagggaagatcatgtcgctcctgctagcgtgttgcgcggtgtgtcgcctgcgtgcgcgccgatgacgtcgatctttacccgaggcgataattgctcttcactcgctccacgacattcaacgatgatgtcctcgacaacttgtctttcgacagccagatagccagccacgctctcagtcgtccaagagtacaaatacaatgagaccaaatcca

SEQ ID NO: 2680 - DNA, 1793 bp, Xanthophyllomyces dendrorhous
ttccagttcacaatggggacatcgcaccaccacccatcccacccactaggaggcacagattcgctcagcgtagaaaagaaagacaggctcagccgcaacacctaacgaaacgtacggagtggaagaatcactttgtggccgcggtaggagagtttgttggaaccactttgttcctcttgtttgcctttggtggaacgaatgttgcggttcgttctgtttcatcagttccagagtcctcggtttctttcagttgaactgatcagatcgtgtttcggtcccttgccctctggacggatacgtctacatgcagaatattccctcggtctcaatcactagtgatgtcaacacgtcccagttactctacatctcgctctgcttcggtttctcgtaagtctattcctcttgacggattcaatacctgagtatgaccaagctaatgacttcccttttctgtcccggattgaattcagactcgctgtcaatgcctgggtattgtaagtgttcaattcttttcttctgattctctcttagcgtcaacatccgctcactcatcttcatcctattccacgaacacagcttccgagtttcgggcgggttgttcaatccagctgtctctcttggtctcgccctcgtaggagccatcaccccgatcagagcggctattcttactgtcgctcagatccttggaggtatcactggcgcagctatcattcaggctgtcttgcccggcacgctcaatgttaggacgacgaaagccggaggaatctcgactgcccaggcacttttcctcgagatgttcctcacttccatgctcagttcgtatttgatcgattggacagttgtttcctttcagtctttcctcatttcacctctacgaggtgccatacgctaactgttttgatcgtcttaaatgtaacagtgttgacaattctattgcttgctgccgagaagcacaaggcgacattccttgcaccgatcggtatcggactcgcgctcttcatcgccgagcttgtcggaggttagtctcgcctcttgatttgcacaaagactttgtttattttaacggaagatcactactaatcaaaaccgtgtgcctcttcctattctgaatagtatactagtgagtgaagcctttctggacgtgattcatatccttctcccatatgaaacacatactcatctccctatttgtacctgcatctgttttaatcagtactggagggtaagtccacttcttaatttgctcaaattagctactgcgctctttttaaccgttacctttctctacgcgtcccttcgtatagttctctcaatcccgctcgaagctttggaccggacgttgtccttcatgagtttgcttcctatcattggatctagtgcgtatctcctccatcacatgtatcgttcgaatgtacagtctccaactgactttcaattttttttttcatgtacagctggctgggaccagcattgggagcaatgctcgctgctgggttctacaagttcattaaattcatgcagtatgagacggtacgtatctgatatcaagactttgttctctactatcactgttgtatacctactgatcctcatctccatctatcttgtacgtttactatctcaggtaacacccgaccaggatgcagctgatacttcaacgcctatggttcccactacgtcggataaactcgcgaaaggcgaaaaaccgtctcgtacgttcctttcattttgcctgtttcagttcccctgatttgttctcaacttatgatatgcgattctctttttctattatg

SEQ ID NO: 2681 - DNA, 1814 bp, Xanthophyllomyces dendrorhous
attatgtagtgtcgcgaggacagtcttcgacccgacccattcctgctcctgccgctcctatcgtacctgtaaatcaggtaagtttagttctttctgtggttccagtcaactatcgttgatttgtgataatctgaccatcttttattcgtaattctatccctcttaggttggtctcgacggtctctttgctcaggaagaccccgctagtactgcgtttgaccttcggccagatcgacatggagttaccactgagcgactggacgagattgaagacaagcttgatatcatcctcgctcatcttggccacgtctcctctgtagcaggcaaaagcgctcaagcaattgccgagctcgatcggtcggttattcatcctaaaggggagagcagaagaagtagagtaccggcacctagacacgtctctttagatggatcaccaactatgcacaggctgagtcttcaggatgagacggatgaggcgacagagtatgagagggatagtggtgaactcgatgctcctatcgctctaggccgaccgagattctaaataaaatttcctttgcctctcttctttcgttcttcccctgtctcctctctttccttcctctctgaaacttcaacgcgattgtatatcccgctatttattctgctcggaccagtttcatatctacgactaaacttatttgtaatcctcataccttgtgttctatttcgactcgtaccgtcttgttctgatctccaattacctcatggtttttggtatactctgatcgtatagctttgtgttattcttccccttatgtgtatccataatcaaccccttcccatgtacacgttcaccgcaaacaaacagaagtatccctccattagaatcataagaatctatgagagccaaaaagaactaatgattctaaagagacccgatcagtgatgaatataacctgacgacctctttcgttccattttcactctcctctgggctggcagaccatgtcgttgacaagagtacgtcttcgagttcgtcgaacgtcgtgttcaacttcgaatcaggaagagagagggattgaaggatgaggtacaggttttccgcggtagctgctcgaacctatattccgtcccaagatcatttttcccagataaacaccctttggttccttgcgcaagctaaagagaaaaaattcataaagtacatacagttgggaatcggtggtttagtagtataggtagtgtcttgagagcttctgaggcgcatgcaggcacagtcaacatccccgttattctgatctcccaccaaaccaaatccgtaagcgcgatcgtttacgacgaatccgaaaatcaacaagaatcagcgtcaaagaaatgcggatgtacacgatcagacaataaactcacatcttcatggaagcttgtactctctgtatatttctgattcgacccagatctctgcacgctatggagtagattgaacggattctgtttaccacaacgcccgattcaatttccgtttacaaccagatgtttgatgccctccatcagcttccagctgcttaatgagagcgcttaaaccaaacggagagaaaaagatagcgacagagcttacgtgaccttgccggaagcgatgtcagctattcgtgatagatccccatcctcgaatagtaagacgagcgtatctaaaaccgggatgtagaccctgttcaacgtcacgttggatttcgcaatatctaccagtgttctacagatcgagagtaatgacgcaaccgccggtgagggtgatgatggaggaagagtggataagtaggcgaggaaagattgtgatg

SEQ ID NO: 2682 - DNA, 11897 bp, Xanthophyllomyces dendrorhous
ggaaagattgtgatgtatgtttatgctgtttggacggttatgaaatccagaagaacggatgatcagctgcttgcatatttctcaataatatggtaaatgcacagaagagcgtacattgccttctgacaaacttccgatgctcagtgtcaacccttcgaggagaggtcgtcgataagtctgctccgacactaaatggactaatcttgatatcaccgcctgtgaattttgccatcggaccggctcgggtctgaatccacagcaacagaattagccttatccgtttacgaaagaaagatagagagaagaatcgtcgaaccctttgtagagatttcgcagtatcgaggacgcaggcaacacccactccggcttttgtccatctctcaacacgatgtccttcaaacactctcccgcgacttttctgactccatccagtctctctgccgctaacttcagagtcgttcctactactcgatgataaaccgtttgatcgagccattcgccgattgagtcaggatttgaatcaagaagactacaaacgagggaggatgttccccggatacatgtcattcggatccaagaaccaacatcacccctttggtcggtcgtataatcatcaagacctttgaagagagcttcgaatacacggttgatcccagatacggcgactagttctttgtttcaagattcgcgtatacattaaggtttagtaagaatatcagctggtttgcatatagaaaggtgacttaccaggactggatcctctacaagaaggacgggacactatttgacaaatcgcttcgaatgcattccgacgtgcttccacatctgaaacgaagtttttcgactaatcaaacaagtgaaaccaggacggggcgccagaactgtatataagcatcaggcaagatcagaaagaagataacaagccaaactcaccccagactcgaccataccaagcaatcgctcgatcacgctccaagctacaggtgtcagctggaacgacagtttccccagcactcgggctagtgtttgctggagttctcggttgaatgtcttcatcaaactcaggaacgtgatgagaatcagaaaagattagattagccgcaatatagtgtgcaatttagagcagatataccgatggaaaagaagggcatatctttgaatatcttcctcaatgctttgcaattcgctgatccgactccacatgcaacttaacgagtcctgaacgatctcgtttccattcgtcaaacaaagctccgagagatttctccaggtcacacttaactctggatcttgaagagtagatgtcatggcagaacgggctacgataagacagcttgctgaaagttgttgatcagctgagaaggaagtgaacagcgtgggccgtaaccgagtcaatgagatgaagatctaagttcatccaaaaggagaaaagtacaaagaaaagttgagttcgagcaggtaatccaactggtcttgaatcaacagtacggaacatacttttctgagtacctcctctttcttcggagatgaactgcggtcgaatgaaagcgcaagttctcccagggcaagtaagataccatggatccatgtagagtctagcgtgtccagatgagcaatctgagtttatcatacatagtcattgagcacgttagctttcctacctgtcccctaagaagagaaagaggtcaagatacgtcaggggtagggaagacataaacgtaccagcttatcgactaacgccggtcccatctcatccaaatcaatctctacgatcgatttcaatgcagccgctcccagcaccctcatttccttgtcccaatggcgaagcgtgatcgtcgaataatgttctaagaggtacgaacggtatatctcatgtctgctgggccgaaatgtgtaaaaaaatcttcagtttggaacgatgatcgagccaaaagagtgggatcgacaagaatccaaagggtcataacacgcactgtgcaacgagaggagcggctgtcaagaacgccattcggcgaattccgactgagtaaaaatctgtttttgccaaaacatcgataccatgcgcaaacaatccctgcgtgccaaggtccacgcttagggtgagtcaccaggatgattgacattgataagaaaacgaaaacaaaggaaagtattcaccatccttcccacgttctcctggaacgccgcgcttcccgctctcctgattgtcacttctctatcactaaccgcaagcgttatcgaagctctggctagtttgagagcgtaaggctccatatcggtcttagagaatgctcttggaagagaccaaaggatgtaacaggcagcgtctcggacagatgttccagtagaatgtgacgatgtccgcggatcgaagaacaaagcctaatggataattacaatcaagattaaagcttggcttaagaaaacgtcgatcaagaaaagggcgcgaggataaaccttcaatagccaaggcaagagctcatccaaacgatccttcgaaagaacacctcgtcgtgctaattcggcgatggctaacgaagcaccatgccatgtcggttcttttactcctgaaagatccatcgtctgttgttctttctcctcgccgtctttgacagtaacgatagttgacgaagcaggaccggtaaagatgacatcgtttgcatagagtccaataacggcttctgctatctggtctgcaaacgagctgggcagaagaattgagagacgagatgtatatttggccgcggaccaacggacgatcgtgtccttttcgaagaagacacaaacaatgattgtaacaaataaattgatgatatcggtcaggcatgtttggggtgcaagaatatgaggcgaaacaacagccaaagcgcaagatatcacgttcacaaagtttatacgagaaaacaaaagagaacagaatagacatgcatatagagcaatgtatgcagcaagcaaataggtgaaattacttactttgtcttgcaacccgaccattaaatcttccacgacatcctccacttcttgcggcacctcgatatcctgctcctcatgctcctctcgcgcttcggtatctgcgtctcgtccttctctaccgagagccaatcgacctttcctaaggcttttcccctttccaagtcccgcgcgtcccagatcaccctgggcaagccttcccagtaccttcaccctaagctttctacacaacccgcttttctcaatgtctgcttctgaggagacattcaaatgtacccactttctgatgagcgcgctctgctcaaccgatgctgaaggcgccaagtttgccatacagcggagaacggtcgcttttagaaagggatcagaggacgggcgcgtgggcgtaggttgtatacgagtgtcgcattcggccaggaaccggtctaagagaggataacagtctgatctggagaaaagtcgaccgagcagacccgcagctccgtcaccttcttttcctctgccactccaaacggcgcgtgtacctatagtgaacaattttcctatcgtaccctcccctccaacggaatctagtgagaaagggatcattgacacgagtgagagccagatgagaaggatatatcgaagttgccatgaggacggtggaaggagctgaggatcaggcacaggatgataaagtttcaaaagcaaggggagcgatggaagtgtcggtggaaagaaggatactgtttcttagaatttaagtttatcaagatgagacgaggatcgagcttagaaagatgtttcaagagctttaggccaagtgataacaagaagagagttggactgacagcatgctttccaacctcggactttaagcacccaccaaacgacagttcctaagctagccaaacggttgggtctccaatcaaggccatcttgttccaggttacaggaagaagaagatgggccttctagttgtagagatactgtttcaattgagggacctatgtgccctggaatttgctcagtaccttccagtagccgttgaatagccccaatcagaggtggaaggatgagaccgaggtgtgggtcaatcaagggtggtgcaggcaagtatatatcaagctatgattgcatggaaccaagatagaatcaacagtatcaggaaaaggctatatgcttgatagtacagaaacagcaagaggagtgacaaacgatagatcccaaatcttggacaagtctggcttcttcctgggctggccgagtgggacgatgatcgagaaactcgccgaggagtctgaaaaaagcgtccttgtgggtgaaggaggtgaacagttggtcttcctcctctactggttccatatgtgagatagtggttgaatgtatctataccaatcaggattgatgtagatgaagacggcagtgatgaaggaggtgctggtcgagtgtgtggtaaaatagttaaaagaacggattagagaagtttgtaataagctattggaagagattcaagatagataatacaagtattttataataagatactacagaaaagttgtaatcaactttcgtcccgttaattagcattgacttgtcttccatctcttctgtgacctcgtccatcgtccacgatatccatcactcggtctctactcctttccatctttctctctttttcactctttgactttcattaggctcgaaagccagcaccagatctcctctattccttccgtttctgaacaccatgtcttttctagggtacgtcggtcaatctgcccctttatatctcacctctcaatgttctatcctgcacttcctgttttcgtatatcccgctcgccccctccgaaagctaactctgtttatttggtctatctttccctatgttcgtctctttcagtcgtcttcgagcacccaaacgatctcctgcaggcgagcagccgcctcctcaaaatcaacagtactcacttcccttgccagcttcaaacactctgccaccccgacctcaacagccacagagctcgcctgagcccttgccgctctacttaagccagccgtttgtgaggagtacgatcatcactggtaatttcaagacactcgttacccttcccaagtatgtcgatccaaacgagtgggtcggtgtcaatagtgggtcactttcaagtcttttcaatgccgactttctggaaatgctccttacaccaccactatcctttccttcctcttctttcaatacacagtcttcgattttttcaacaacctcaactacttctacggtgttgttagtgattatgacacccccgaaacttgtccgacaatgatgtgtggacctgggtatgcttgaatctatatgcgtcgcttctctttttggtcgtcttacctgacactattcatctttccccccccccttgaatgcttcactttcagcgttgagttcacatgggtagataacaacaagcgctctgtgcggctaccagcgccaacatacatcgattacgtcttcacgtgggtccaaggcttgcttgatgacgaaaacacgttccctacgaagactggtgagtttcggttgctttgcaagtcttgctcttgttaacaaacatccgtcaagtctagaggatctgacctctcaatcactcacaactcaggccgagaatatcctcccaactttgcctcgactgcaaaacatatctatcgacagctcctcagggtgtttgctcacatttatcacgcccagtttccggtaattcttcatctctcccttgaagctcactggaacgcactgtttgcccactttctggcttttggaaaagaatacgatcttctagatctgagagatctaagaaatcctcaagggttcgttcaatgtggacttgtcctctctttccatagttttgaagttatcaaatccttgtcaagctgactggtcatggtcatttttcacaatatagaagtcttcaaggtggagtagccgaattagccgagagatggcgagagatgcgaattcttgacgtctaaacgatccttatcttattctccatttctttctagtgattggtttctatcttacgcgttcgcattgtcttgcatcacttcccttcgcattcgtacttcactcacttcctatcgttttatgtcttcctccctcagcaggcgcaggcgcaggcgcaagcgtaaattctccgttctttctatatcttctctttgttctacttcacgtcttatgagcgttcccgaattactctttcatccgatctctcgattttctctacggcatttctttttctcgcctaaccctttcacagtacacttggttatgctgcctagtctttataagtcaaatccttgttatatcaagaagattatttaggggagaagatgaaaatcacagaagagacagagagaagaactatgattatttgaatgttgaatgaaaattacacattggagagtttaatgagcaacttctttctctgaaagatttcctccacgttcaagatcctcatcgtgcttgtccatagacgatcattcattcctccgtttctcctcacagcagccttggcattcaatcctccgctggctgttcggatccatcagtgccttcgagacgttctcgatctgtccgggcttgcactgtttttagaaaaagccttcctcgctgtggaggttgcctgcattctttcccatcaaatcgtacattgatatacgcatacacactctctcgatattctttgcattagactatccaaaccatgtcaaaaccatcaccaacactcgcagaggtcaaagatatcctggcgtggtgtaaagcgagagagcagccgggttgtacagccgatcggttggttgctatgcagtcattccttttgaaccatacctcaaatagagaaggggaggagtggcattggttctgtcggtaagtccatcgttctattgtccaatttttttttggctcgtgtctgtaaacacgttctttgctgatacgacatcttttgattcgatgttcttctcaagacttacggcgcatccatctgatgattcgatatcaatatcaccattgtcttcagcagtcgatgccgccgctcaaagaaatttctcgactattacagaagtagcaacctatctgctcaccttgcatacttataaatccaatgcatctatccagacgtttaaagaccatctgagtgggctactagggagatgtacgggctgcgtcgaaggctatctgaaagcgaaacgagttctggaagaagagtaagtgattaatattcctaggcttcatctcttatacagatcgaactgtttatcaagaactgacgctgtgttgttgtgaaatctggtcaacagttatctctcgtacacttcagctgcgtcgcttgagaacttcttcacatcgatagctcgttgggaattatcgtttatcatacctcctttgtctccaactattcttgaccacgattcgactccaacgaagacgaggtttcctcatttagtcgacattcctccgtctcttgtgcacctcattcttcagagtcctacatacttccaagaaccttccgttcgtgaattttttgaacaggaggccgcaaacctagcacaggatgaagataagtacagcgtagaactttcaggtgttctggaccattcgtcattccctttcattggcgaaggtcaccttgagttgctcatgtactcttggacggacgcctcggaagagggggagatggaagaggcaagagaattgagagagaagaagtcagagcgtctcagacgcctgggttccctgctccttccaccaaaaaagtcactgccaatcgaccggtttccagagacactaccgaccatcgaacgaattttatctagtctgttctctcctgccgcttcaagagaaccagcgcagataacgacccgcaaatgggtcgccttccaaatgatcctcgatcgtctaaccgaccgaacaattcgagaagccatagttctgaaacttctacaacctgacgatccaaccggtctgtttttcaaagtcgaccgaggcgaccggtgggctgaaaagtactgtcgtggaaaaacaggccgatcgaacttgattgtcactttggtttgctcgagattaggggttcaagaccaatcgttttatcctatcttccagtgttttcatctgttgttcaacccgacgggtagattgttttggataaatgcaaaactttcaatgagtggtgtatcatcaaatgcgcctgcaccgccaaacccactggatatctttcggacgatcaaagataatcctgcatttctcgataagctgtcgttgagctccgacgaatttggagactggcttgactgggtgacgacttttgtcacgagctttttacctgtgccaattgaggagacgagagagaatccgttcgatctgacgttttcagcaaagggaaaagggaaggacgtgctggccaaaggggagattgactggttttcagaaggactgaaggaggccatctattttctgatggagagcgcacagcatctcaggtttgggccgactgtccgagtttctgctatggaaaaggctttcaaagtgagttctaattgattgataggctttaacgtgggtggtgaatcgaccgatctgatttcctgatctctcgccggaacagattctaacgatgtcgcatcagtcactggaactctccctcgctctctctcctcaacgatcggcgctctcctctgtatacgagatgtatagctcgatgattgcaggaattgctttatcaggaaaagactatcatgatccaatctggcacgatattcgatcttctgctagagatgttcttttcaacgctctcgtggaggatgaagcagctatccgacttggtgtgatggccttggcaaatatattgcaaacggccttcgctgccaaaaagtcctctgcttctattaagggatctacagccagtgcttcgccaactcctctcgttgtgccctttgtcaccttcaaaaaaggactctggagcaacatgtatgatgctctgggatcgaaagaccctcaaggggttgctgtgctaattcgcgtcatctcaagattttctcatcttgatcttcttcccacggcatccgattcggcctggtcggtacttcatgtttcatctgatcgacaagcattgcagaaggtgatcggccacatcaatgaggctatctctatcactcgacgactctttgcccgttcgatcgaacgatttgcaaacttaagcgataacaaaacccttctagagctttggtcgaccatagacgtgacacccagtgcgcttagtctacttctatcccccaacgaagagatccacgattctgttcaagccctcatacaacaatcgtttaacgacgtcgtcgacagagctgactgcttccgggcgcttcttaagcatagcccggaagaaggtttagagggaatagatcgatttctcgatcagttcgtcaagtgcgcaacaatgtttcccgaggcttgcgctatggctaaatggatggttcgttgtttgacggatgttatagacgtactttgtcatcacggaggtgctcttcttcgagatgatgcgttcatcgatcacttcgctgtcaggaggcttgtaccagaaatatggtcaaagatgtgtgacagtttagctgtcatctttaaacggacgagcgagtggtcgaaattctacgaaaacgaagttatggtggattggatgagagacgcgctgatcttcgctagattgatggctgctcagacgagaacgttcgaaggagcgactgtaccaccaagtagagagtctgatagggaaggtttagagatcaacttgtctcaagctagtccatcaagaatgagtacggtgggaaagatgatgatttctagtttgcagaaagtgttgttgaatctcctcaactggttacggatcactgagtaggtctatttctcctttcaaataagtttggtttaatatatgctgatcataggaagattatcttagcgtggagacactataccagtctttcgaattaatcaagacgctcctcgatcggttcaaacgatcacagatcacgccagaattggcttcgctcgagaagctcaatatgttcactcaacgaggggaaaagcatagatgcaatctcaaggactctcaactggccgaaatttcggaacttctcagcttttgggacgtgtccgatgacgatgttgtcttctcttctttctctagccgctcatcgcttcggctcgcgccatcttccaaactcaaccaccagggtcagtcgagttcgtcgtccagacagtcaagcgctcgaccactcggttcagaagatgagttcgacgatgagtttccggacatctcagaatctgatcttagggccatcgataatgccactaaaaacctcgttcaacgacaacttcccttcggtcctctatcttcctcctcaaacagagcgacacgtccatcgggtcctaatctttcttcatcttcaatgctttcacgagcttcaggcggaactgggtttggaaagatatcgaaaagtacatcgaaggataagaaggccaagtcgtcgtcgtcatcgtcttccagagcaatgaaagagcttcgtaaggaatttaaacgctcggtgcctacaattcctgctccagggatgaaagtcgggtttcagatcaagacatctcacacaaaatccgagatcgaaccatccaaagcgaacaggcgaaccgacaccgctggttcctcttcttctgagtcttcgtctgattcttccgatacggatgaggaaaaagaaaaacagggactcgccgcgctttcgactagtggagacaagcgagcgcctgtggttcgaaaactggcgcctgctcagcctgttcgatctatcaagatgatgaacgacataccgatgaagactcctgctcagatcagagcggctcaacgagaagcagcacagcgaacacgacttcggttgaagcctgacatggacgagcttcatcggattattctgaaatgggaaccgaaggacgtcggtcaatatcccccgggtatggagccaaatcagctccgtaagataccagctcagttcaagaatgcggaagactatttggctatttttgcgccattgctcatgctagagtgttgggcacaagttcagaaggcaatcgaagaaagccagaatgaagaccggattgtggtcgccgtgactggaaaacagctgatcgatgattgggtcgatgtggacgttgctgttcctaccggacaaatcaaccaaagatattttttgacggacgttgatgtcgttcaggtctgctctgtcgatcctcataaaccggcctcgttctttgcgaaggtgacaaacttcaaaaagggcttcactgatatccaggtcactatccgacttcactcatctcgaaatcatcattctttcgtgagccgttctaaatggagattacaaagagttcttaagtaggtgtcttgtttattgtctctttttcaaataaatcagaagcagatgcccaactcagagggtgtttgattcatgtatgagcaaggtcacgacactaatatttgaagtatcctatttattcattcgcatttagcttgagtaccatgcatagagagtttgctggtcttcggggattgccctacttcgacacgccactttctaggaatccgggtgacacgctcatgaatgctgttctcaaggctgaatctttcccgcctctccaattctctagtcgagatattcaggaggctatgaagacttatgcagtcaatgagccacaagcaaaagccgttctcgccgcaatggatcagagaacgaccggcttcgtgctgattcaagggtgagtttcacttgacgtatactcgctgtggatcaatcctcatcgagacgtaaactcatcgtaaacttttattgttttggatctatagaccgccaggaacaggaaag

SEQ ID NO: 2683 - DNA, 3671 bp, Xanthophyllomyces dendrorhous
tgcgctccctccaatgctgctatcgatgaagtcgccaaacgattgaaggaaggtcttcgttcgtcctcgggaaagattattgttccgaagattgtccgagttggaaacgacgacgccatcaacatcgctgtcaaggacgtagctcttgatgagctggttgaacaaaaactcaacggagcaagttcgaccaagaacgatggcgcagccgacgtggaaaggatacgaaaagaactcaacgagctcatcgcgcttcgaaacttgaaagtcgaccaactgaagcagttcgaagatgatgcccaaaaatcgcgcgcattggaagatgatatcatgaaaatcaactctcgtcgaacggtcattacctctcagctcaacaaagccaaggatcaagaccgagatgccaacagatcgatgaatgccgctagaagaaaggctcgacaggacgtcatcaacgaggccgacatcgtttgtacgacgctttctggagcaggacatgacctgcttagttcttgtaattttgaaacggtcatcattgacgaggcagctcaagctgttgaattgagcgctttgatcccattgaaatatgaatgcaaacggtgtatcatggttggaggtatgttattatcttttcattgcacccacgtatatcgcagcttgatgaaaattattgatggttgtatacattggtaaatcgacatcattcaagatccaaaccagcttccaccgactgtcttatcacagacagcagataggtacaactattctgaatcactcttcgttcgaattcaacgtcgagctccacaaaatgttcatttgctcaggtaggtacctgtgtctattttgcatttcatcatcactgaacttgctactcatgtttcatctttctctcacaatagcatccaataccgtatgcatcctgatatcagtaaactaccaagcaaagtcttttacgacggacgtcttgctgatggcccagagatggcgaaaaagacaattcaaccatggcacgcatcttccgccttttctccttataggttttacaacgtcaattcgagtcgagagatggctggttctctcggtcactctctcaaaaatactgcagaagctaccgttgcgctcaatatttatagtaacttgaagagccagttcccctctgtcgatttcgattatcggattggtatcgtcacgatgtacaaggagcaaaaacgagaactcattcgagtgttcagctctcagtacggaagaggaattacttctacagtagagtacgtttttttagttgaacgtttgagctcatacaggattcgaaaactgatccctcttttggcgatagtttcaacacggttgatggtttccaaggtcaagaaaaggatatcatcattctttcatgtgttcgtgctggtgcgcctggatcaaatgcaggaataggtttcctgaaggattcgaggcgtatgaacgtcgctctgacgcgagctaagtcttcgctgttcatcattgggcatgctcctaccttggaaggaggaggggcccaatggtatggcatcgtgaatgatgccaagcaacgaggagctatgttggacgtacgcctacgttccttgattttgattttgcacgatcctgagattaatagcgttctatgttttgaactcgtcctatcagtatcatcagtacttttcattctcttctgcgcctagagtagatatcaattccgctgcaccgctggttacgtcagctcccattccacctccggttgcgctacctcctcgctctcctccgtcggcacctgcagccatgctaaaagccaattctcccgggccttcattaattgaactttcgacaccaaaagaaatctcacaagctcattctcatcttaaacggagtcgacccagtggctccaacgttaacgcaccggtgaaacctgagctttcttccaagatgaatctcccggaaattacaaggaaccctaaggcaagtttgacgaatgggattgaggaagagaataagccgaatattatcgacgatcacccatcgagcgacgtcgaacaggcagacattcttcctcctttcaagaagcgaaagccttttgtagagcatcaaagttcgaaagcgtcctctgaaggaggacggtcttcttcaccaggtccgatggccatgtcggatgatggacatcgaaatcgagtaccacctgtcgggcctagaaagaaaggatctgttcctaaagcaagagaagctcctaatctgttcattcctccaaagcgaaaggtatgcactcgacccttgttgtcttgattcaatatgtctgcctcagtttctgattgtttggctcaacactatgttttcctccgatagattgtaaagccacatcccgctcaaccactgccttcgacgatcccgaagacaacaccaaagacaaatcccacgaccacttcgtccattctaccaccttttgtttcatccgacgccccagcgaacgacagcgcttctgctaaggcaaagtttgccgcctttgttcgtcgacctgggggtccacccgggagaaaaagataagatgaggtttgcactctatcttgctcttccatttcatactgctttttctcacccttctcaattgtccacacatcttctcagttatccgcacatcttttttttcttgcctttcatcatctatcagttctttcatatagataatcgtctcgactcttgttcttccttttgttttacattcgtgaagatatcacacattctgtctctgtacacttatcactaacgatactattaccacttgcatagcccttatctccccgctcaactcttgataccatgtttcagaactacagattcaaatcagaacgatttcgcataatcacatattatagatacatgagtcgttacagaacgaaaagggaattacagtttgagaaactcgacaattaaataggaagatggagaaaaaaacaccactagattgaatcaagttttgattaagccaataaacctgaccgatcagattttcggactctagatccataactgatcccaacaactagcttgaacaatcttgacgcgtccttgtcgccggagaagagatagtcagctcccagagagtaagcggctgcgaatccggaagtgacagcaatctcgtgcatgttgagaaccgtccaagctcctgcatatcttgtgtgattctttccgttgatgaacatcatcaaagctacacagccgatgtagtgttgccatcgatgagattgctgcttccaccattttataccaagaatcttctcctttcggatgtcattgaccgtccaatgttcggaatcctctttgtttaaaaactaaaactcgcgccaatcatgaagaatcaatttaatccccagttgagtctcgtcggggtatatggcgtcaagattaaaagataaggatataaagacgaacgatagtctgaaaaacatggtctccaacctctctctcaggctgctttgccttgtcagattcatcccactctcgcttaggacccgccttggtctgattctcgaattgaggttgatctatgagaccacagaaatgttttcagccaaatttcaaatcctacaacgaacttgaagactaaaactcacagacggtcaagtcaaaactcatctcaagctttttccggtcctctggataactatgaataa

SEQ ID NO: 2684 - DNA, 4278 bp, Xanthophyllomyces dendrorhous
cagaggattccaaggctgctggtcttctccgccagcattgtcggattttaggttttttggctctttaagctcgtagtactaccaaacgaatttattcaaacaagctgatcagtcaagtgttcagctgagaaacgaaggacaataagaatgtgatactttttgcatgtactcggcgtcttgatgggtgtaagttacatcgtaaagacttcaataactcaaacagaacttagcactgatctcaaacaagtgtgcaaaatatcaggttgagatgcagacttactatttaacgtttccaagtacaaacttttctctccacgtagcttgttttccgaggatcttgagagcagcatcggcatctttgatagatcaaacatagatagtcagtatgcgttggtttgcgaccatcccttgacaaaaaggataagaaaggtatacttaccgcaagcaaacacgatttcatcgaaagcctcagtaccttcgtcctctccttctttccatcggatgatacatttcccgtccttgcctttgcttgacctagtaacaatctctgcgatctcttttccgagaccccaagtgaccccatcctttccggctcgaagactgacttcctcttgccaacgtttatagaccaaggatagccgagggaaagccatcatctttggaacggaatccaaaaacgtctctgaagaaaattcgaagagtttcattgacggatcggaaaatactctcgaaagtatcgtcgaagggataaaaggagtttggttgccggttccctgttaacaaaatgcaaaataaacggatgagaattaagctccgaatcgcctagggtacatgatgagttcaacatgatgtacaaactgacaaagaatagcgcgaccaggggatacacaatgaggtctccgaattctttgtcaaacaagaagatcttgagaagtttctgaacagagacgaagacgaaaattggctccgagacctggatcaccttgaggacccggccgaacttggcaatatcggacttgaagcgctcgatgagagacgacgggaaaacatttgtccaaaattcttcttctccttttccgaatgagatctgcatgttgacctctgtcccttggtatccgagcatatccagcaccttgatcgtgctgattgggttcaaagtacgcacataagtaaaagaagtgactaccgacttagtgttatttcacaagaaatcttatcgaaataggttatactcacttgtaaaatgcgggactgcacccctgaactccatcattaacccaattgcttcctactctctcactctcttggtctttcgatccttccttgaactctaaatcagcagaggtggccatacctccagctacctcttctttgtcgaacacggtgatatgatacctatctggatgagctgagaatgccaaggcggtagacataccggccgcaccagccccactacagttgggagcaaggacagcacagacaggttgacaaaggggagttatgatcgatcgggatcagctattttacacgttgaactttgccaatccctcccgtaagatcgaagagtgcgcggataatgagaaacatggaagaaaggaaaagcgtacatgatacagattcgcttgcgatcaggcatggtccgtgacagttattttctttcggtcgagggttctgaagggatggtgatgagtggctacgacgacgatgatggtggtggtagtggtagtggaagaacggatagttgtaaagtcgttcatgtttatgacgatcgggaaggaaaataaatcgggtatgtcgagatcggtcgatgacgtattaagattagataagaaaatgttcatatcttgttcgtgttcacctcaaacattccgtttcggatcagtttggttgatatcgtcactctgatgtcgatcattcaatgatgtctaggtttgcaagtcatcaagcacataagtttgtgtagaactatctgattcgtcgatgtatttacactgaattgtcagtgctatacatttaatagtccaaccacatgtgaacggtgcgttcgagcagactgtcctttctccttcgccttcttgaaaaaagaaggaacatcatcacaaacgacaaaggagtatcggccggtacagccaagaaagagttttcactgtagaactagtctttggaacttccgagcccccatcgggccaaatcaaactcctccaacgaggtcaagacttggtgggctccctctgaagcaccggagttaaatgccaagagctctggatctgggatccagcacactatgatcaatcaatacagaacgcgttgaagagtgaaaccacgttgttcatattgtgagtatgtatagtgatggcttccaagttgatcaaaaaaaataataaatcaataagtaaaggtaagtacgaaccattcattcccgctctcaaagcagcctgaacacctggcaacgcatcttcaaacaccagtcctctctttctgaccgctttctcttgttccgatacaccttcgctttcatttacgccgacgtcaaacccgagtgatcgagcagcggcaaggaagatgtctggagcgggctttccccgggttggttcggtcgagggagcgacaggtggagagtcggaggtgaggacatgaggatggaaatgttcgaaaagaggaagatgtgactactccaacgaagataaatgtcaaatgacaaagaaccataaattaccgttggtcgacggttgatgagctattggtgtgttgacgcgatcctaagtataaaagactcaataatggagcaacgaacagttttggtcttgaccccttcgatagtgcttcctgtggcaagtgccattgggataccggaatctctcaaatcctcgattagcttgaccgcgccaggcaatggctggacgactctaaaagcagcgtcttgcaaacgaattctctcatctagataggcctcaggagtgtattccggaggaaacgtcccttcagggtagcacgaaaacaacttctgagcggaagcaagtgcggctggaaaaggggtaaaaagcatggtaagctgtggcatagatgtcgtcaaccacggctggtttgcaagatattggacgggagaatatcactcacggagacccatcaagccagacttgatgctccaggacattgtctgcccataccgagcaagaatatcattggtgactgattgccacaacatcccaaggcaagtggagctttgtcaatatgagtagatcaatagcaaacatcgggattatctcaatctgatggacgcgccaaaactacctacctttcgtgtagatggtttccgtgtcaatgagcgtgccatcctaccttacattcccatgaaggtatgttacatcaatcttgaacatctttcgaatgccatctagagatatatgacagactaaccatgtcaaagataacataatcaatttgttgcttttcctcgttcgacatgatagatagatggatatatgatggtggttgtgcaaagaagcgcgagtcgtttcgtttgagaaagaaaacttgttttacatctcgccgtaacgctggtgttccccaacaccatgtcggcaaacaacgcacatggaaattattcaaattactacaccaagcggcaggcttctcttattgttggagatcgtagggtagatcttctgcctctcgagtggattcagagtaagaaggtgcttgatataggatgcaacgctgggttcgtcagtgttgagatcggtagattcattcatttgtctgatttaagagctttccccttgaggtgtgtgatgttgacttcaacctgttcttatgagaatgcatagctcagagaatgtctcctgaatctgtactcggcgtagatatcgatccaagcttaatcaaacgatgcgagactcatctcgcctacgtccattctctacaagctccctcggtcgatgagaattatcccactgttcctcagccgaactattttcctattgcgctcccaaaaatacatgggtttatcccgttgtctgagtccaggccaagttcaagaacagggtttcctcgaaacatctcattcagagcggctgactgggtggttgatactttagaggaggatcaagctggttatgatctcattttggcgttcgtgccgttttgctcctcctgcttccgatcagctctcaggatattcttttctcacgacgaacctttggttttatcacccagactttcgctcactaaatggattcacctgcaccatgccgactctggtttgatggcgtttttcaa

SEQ ID NO: 2685 - DNA, 1893 bp, Xanthophyllomyces dendrorhous
gatctacacccatcttaccccaggcggtcgactagtcctcgagcctcaatccttcaaaggttacaaagacgccgccaagaaagctggttctgcaaactcaccagacgggtcacgtttacgatctaatctgaagaccttgaaactgagacccgaagactttggagatgctctcgttggcttaggattcaagagagcaggtgcgttgagagccggaccgggggaggatagaatggaaggtgagggcgaagcggatgaggagctcaaaggtgtgtctcgaacgtattgcttggatgagttcttgttcaatcgctaatatacatcgatgtgttttttgtcttatcagggtttgatcggccaatcgaagtatacgttaaaccttcatcaatcatatgaatgcgcctcgtcgtacttcccatcattcgcagttattcgttcttttggtcacgtcgccttcctggtacgaaatcgatgaaaagactcggatcgataagaaaagacatgaatggcagaatttcggatcttacaaatagaataaagacatcgacattcaagtaaagaatcaagacggaagggaaggaggcatgataatgctcgaaagagtcaaggtagaacaaggcaagaatctgaagcaagcatcaatgaaagagagatatttcatcattcagacttgcatggagtgagccatgatagcagccacaaatgtcaaccgaagcttcggcttgtcctctactaaatcttcagccacaacgaataccacaccgcccaactttcggagaaccgaaatggccagtcgagcgttgagcttgcactcgtcctcgttgttaccctgttcaaccaaagtctgatcgactattcccggcctcaaactatcgactagatccaaaaagaagtgacccgttcgaagggtcggatcccgaagactcctcatcgatgttctcttaccagccttttgaacggtgtcgtttgcccatttgacgatttcagtatcggttacccccttcccgttccgagagatcgaggccaaagtcttgtcaatgttgagtctatagagggaggagagaaaaacaagtcagtatatcatgtcaagtgtatagagcatgggcataaagaagcataccgcatgagttgccagaccaaaccaagcaccagagttcttgttccatcaacaatgtccgccccctgaatacctacgatcctcatcccgttcgcctgggcgagatcgactgcataatttgtgttctccacagctttgaatcgggagatttcttgtccctctttaggcttggtcactcgtcgccagatgacagagccgggaacaaccttatcgaacgcttgtaagataaccgatccatcctaaggagagatgatgagggttggataaaaggggagaagcgatcttcatcagcaaagtgcgcaaaactcaagacattataaacaagagtcaacaacgagacaaaccttgagatcctcaaacaagttgtaaactccaggctcgacatccaaagaatttaaccagagggtaaataccctggcctctctttctccttctgcgtcaaagtcctctaccggtgggggagcctcagcctcatctagaggttccagacaaggccaagtgttgaacaagttggcgacgaatgcaaggttcaatttcggatttcctgccaccaaggacgaaggcgacaaatactttcggcacccgatcctgtcggcattttgaagaacctcttccgctctttggtgtacgtctttggtttgaagaggcgctcgagtgcattgctctggcttgagctggttgagtagaacagtgtagttttctccatcgttcacatcttttgagaagttggtcactctaagaaagtgtatgaacggattgattgatgaacggcatctgtc

SEQ ID NO: 2686 - DNA, 8106 bp, Xanthophyllomyces dendrorhous
catttgaccaggagagataaattacaaaaaaatgctggaataaacgaaccgtcgttgccatccagcagctttgagatggaagttgaaccatctgagtagaatctggtccggagggagtctcaagaactcttccaactgaaggaaaagaaaagagaagataaaattaacaatcgaaacctctactagatttgagatcactcttcagagattcaatgacttacagtttctccatcatctagaagccgatacaactctgggtgatacttgatatcaatcttgctgagcaagccccgtcggatgatttgccacataagtcctaggatgagatgctccgttccatccgcgatatcactcggaccaatgttgacgaccgagcaaccgattcctttggccgacgagattacgatgttgttgttttccgtgatctggaacgcgttcaacgcttttggcttgccttttgagacagttggcttgttgaggactcgttcatcgattgtgtcgggtacagagtcgttgataagcttgcaaaggattaaaccgtctatgacaagtttaaattgaaggacagtatcagcgtgatgttcttaacggtcattggaaacaatagaaagagacggggagactcacctcgagcttcgtcgaagatctgcatagtatgctctgggatgggcaaaagatgcccgatatctttatctccagacaatacctaaaagctcatattgttgatgagagaatgtcagccgtgcatcattcttgttatagaaacatgtgaagggaacggatggaatcataccccgttgatgtgcgctgtgaaactggctcgctcatcctcgttcatggtgtgactagcattgcttccagccgttcccttcaccgagatttttccacctttggtggacaacaagggcgcctgggaggatgaatctcgaagggaggtgacgagctgttgcgatcatccaaatttatcaattggtctgtaagtttctcggatctgggcggaaaaggaaaggaaaaagaacgagtcggagggaggaaaagatgccgctcaccgcaacccaatcttcgagctctactcgaccggacgaatcgatgttgacggtcttcagggtctctcgaatctgtttcggacaatagaaatcagatgttgtgtcaatggatgttgtaaatcccaaggagctcattctcttcccgttcgtctagatgaagctatcgagtgatggattatgactaccctcatctcatctatctcttcatcaaccatttacaaagtccgctgggaagatttcaagaaaaccagagacggatggacagacctgatcgtaagatccttctccagattcctcaaggcctgcgatgacttttgccttgtccagacttcctttctcgtccacgtcgatctttctgagaaaagcggtgcgatgattatgatgaagagttatccatccggttgacccattgggtatcagaccaacacagagagagcaaaaaagagagaacttgtaagcttccgatatggactcgatccatttgctactcagtaatcgtcttttccagggaggattccgcaagatataatgagaagaacaaggaaaaggagtagaaagacagagccccggacatacgcgaattgattgatgatgttgtccatatcggctggcgagacctgaggatacttcctgcccagcttcatcttttgtagaccggtggccattattgattcagagttgagtactttgtaagtgtatacaggtgtgtgtttgggtacgatgagtgattaagatgatgggactggtgttgaaaagggtgatgatgaggctcggcaagaggcggttcgacaactttgcccgccttatatgaaaaccgcctttcgtcatcaatattcatattttctccctttttctcgttcagatttcttggtcattgagtctctcatgtttggctgaatcatattgcactccattcaaaggtcgacccacgaatcattctgtgaccaaggatcacgtagaaagaagcgtttcaagattaaaaaggcaaacgtagtctaagaaaatagaagctcattccaatcaaatgatccaaaagccaaacccaccaccacgatcgctactgctgccaccaccaacaccactaccatcccatcacacactcagctctctcaaccaacaacagatttcttccttccgcaaacaagctgagaaagtcgagcgtcaaagacaaagacatttatgctccaaactcctcggaggctcggatgttggtcctgtgtgaagagtgtatatcaagatgaagacgcaatcagtaaacacgatttcaaaagaggctgcagaatatgtgttctgaaaggcgacgcacttgtcgttgtggaaaagggactatagaggtgaaagacagacgtgaagaagaaagtcgaatgagttagcttggcaaaggcgacatcttgtacagaatttgactactgcaacgaacctggtttccagacctgaagaatcgatagcaagcatataaaataacagaacatgaagaagaggtccaagacggtcagtaacgcataagaggtttgtgtagatgtgaaaatagatgaaagtttgagattgggattgataaccaaaactgaccaggggaaaggctagaatgggttcgatgatacacaaaatctgttagaacattgttctgttggaagggaggcagaagattttgagggatactgaccttagttcgtcggagcatgtactcgtaaacaactcgctcaggaggagatccaccgttggcctcactaagagtttcaattgaagatcatggaaagtgagatgtagaaaaaaagagcagagccggatgagttatgtgcaatagtcgataaggttatgaacacaaggaattcggtttatctgaaagagaagacaaggaattgccgtacatctcgtgttcgatgtgagcggcgtgctcggtctccttcttgtaggtccagataccggcaacgatgacgcagggaagagcgacgtagtagctgtaagacaaaggaagcagagagcaatgaatgttgagcaaaggaaggataaaaaggaacaagacactatacatcaaacgtttcgtattttcgctttccctcacactctctccttcgccctgtctaatgtgactaaaagtcacgatctaaaaaaggaagaacactcacgtcacttttcgccaaagctcagaggcctctgtaagatttcagatcgaatcgtattggggagagtcaagcaaagagcaaagacaaaagcgagatttaggcaaaagaaaaaaccaatcagcatccttcccattctttgacgtgctgaaccggtctgaatagacgttttttctcgcgacccggaaaaaagaaaaacggaagaaagagcacacagcagcaaccaaggaaaggatacacgaaagaacttgaactaaccaggagcatgatccctcatggcatccctctctctgctccaggcggtctctctgacgggaagatcggcctccttgatagccttttgggcgtacatggggacgcatccagcgggggtaaaggtgtgaacagagtttgatgaagctcggagaccaatggtagccctaggagctcgagcgatggtagatcgaaggatggaagccattgttaaaacgtgttcaaaacgatgaggagaatgaacaaatggccaaggtcgattgtctggggtgagagagagaggagagaaagagaaggcgaggaagagagaaggcagaagaagaaataattcgtagccatggttacaattgagtccgtaaccacgcccaatcgtccagcggcagcgatctcagccggcggcgcttggagttgatggaaaccccaaactcccatgatggataaagaggataatccgactggataccaatctggatcatagtgatccagaccaggcagacgagccggcccatgcccgggactttctcttcatcccaaattgctctcgccatcttgccgatctcacttggtagctgtttttcattctcttgaaagtaaccccttctgttcctgttgtcttttgtaacttctcgatgtgtcctgtgtctactcttcactgagtaaaccggtcccgtgggggagaaagacagtcggtcaaaaggcagggtgctcttaaggaagaagagagaacaagagagatcgacaagccaccattactaccctttattggcgagggtgagaagagaaaggccgggacggtcgtttggaatagatatctgaggagttttcattctcttcacactgtccttgtctttctatgttatttccgtcatctatcatgcttgtactctttctatgctatacatattcccacgtatcatctttttcctcctcttccttctcgcttttttctatgtgatattatatgaggtgtaatgatggcacatggtgagaaatgatgaaacgaagcacgtgacgaacggcaggctcgggcctgggcaaaaaaagaaaacaagaaaacccgacagcttgaagaacaacgttttcttgtttctcatacccagaacgactgactggccttccgttcttccttattcccatcattctttcactcagtataacatctatcacgcttcgggtagctcctctgtttataaggaatatgtctgtctccacttctgctgtcaccaccggcccgaactttaccagagtgagtgtgtatctgcttggcgtgtatttggaggcattagctgacagtgatatgatccctgtgttgatcttgtttctttcttttcggttcttcacctagcccctcgtccttttcggaccttcagggacgggaaagtcaacgctgttgaagaaactttttgaagagtttcccggaaaatttgggttctctgtttcgcgtgagttttgggttgaatctcttctattgcatggaaagaagggttgagaaggtccactaaaccggtcatgctgtaatctttggatacttttctctttccttccttcctccctttcttggccgatccttcagacaccacccgacaaccacgggaaggagaagaaaacggaatcgcttaccatttcaccacgagaggcacattcgagtctctcatcgccgacggagcattcattgagcacgccgagttttcgaagaacctgtacggtacaagcgccaaggctgtcagtgactttgaaggtagtggcaagcgatgcttgttggacattgatactcaggtctgtcttaatcttgaaagcttagatagagaaaagaagagacactggaagctgatcaatttattctgatactctcttgcatctgatccctacagggtgtcaaactgatcaaagccaaccaccctgggttgaacccggtattcttgtttattgcccctccgtctttctctactcttaaggaccggctgtccggtcgaggaactgaggtttgtcattcatcattctctaggaggcctctcgttcatcgcgcgcatgtctaaagattgcactgtctttattttgcgcccttatctcccgctgtgtgctctctctaacccaacaatcgaaatacgcactcgaaacagacggagcagtctctgcaaaacaggttggcagccgcccagtccgaactcgcctacgcaagtgtgcccggctcggctgatgtgatcttggtgaacgacgacctggagcgagcgtacaagatctttagagacgttgctttaggcaaccagtctgtccagggtgatgagttgcctgctgacctcaaggtcgtagtttagaatagagcagtctttcttttgtcctactacttatcaattttgggtatttgtatacgggtgtgtgaacggatcgaaggcacgaacatcgtccgactagagagacaagcgaaccacgcaaacgagtgacgaaagatggatagagagaatccacatagacactacgagaggctcgatcgagattatctcacaaagctcgactaagaacatcaaaaatcagactaacaggaactggctatcaagatactacaagaattataatagataaataaacacgtcatttctacaggcggcgtttgacgcgcagtaaaattgatctgacaggtcccgcccctgatcgttttttctctcgtctgtccttcatctcgttcctcgcgttcttgaccgtctactctcaactcccatctcttccgttcagccaccctatcttatttttctggcattggtcatccatccaggccttagtacatcatctagatggatcgtatcgcggctagaaagaatccgacgtcgagtcaacgtttgttgacggcagtcctgaagtaagatcgatcatccattcccgtcgccctgtgccgttcgtttgagtcgtggctcaattcagtcgttctttaccatcttttgcctttctgcccgtccctcagttctgaaaaggcacacgtcgacgctctctttcaagctctcgctctctcacacaactcacaggcagcactcgcggcttatgcgtctgcaggaagggatgaaccactcggacttgccgtcggtggtgtcgtcggtgtgttgggtgaagagtacgagaccagacaagaggtaagtctttccgttatccgttaaggatcccttccccatcttggtctgattcagattcagtggtggagagtgataatgctctcctatgacgatcttgactgacgcgtcaattctgacgtgacgaaacgatcgtttttatcattcttcctcctctctttttcgccctcttcgcaggcctatgcttcctctctctcgtccaccagactcgctctcaaagagattagagacgcggaagactctctcgcaaacgtcatcagagatcgtgacatcttgtatgttatttttttcttccttgcttttccttgtccacttcgagactgtcctcccgcctgacatatacttgccgaaccgttcttagagtccaacggatggtgaaacaaacgagcaaaaaaccatcgaaatcagatcttcggaactcaacgggctcgggaggctctatctttggactccatcactcgagagactcggcttcgatctcgtcttccaacgcctcacacgacaaggcgtccaagctcgaagaggcccaactcgaactcgccggttgtgaagaaactctcaaaagagaacaagttcagctagacgcgatcagaaggagagtcatcaaagagtgtctcgagcaccgactccgaaatcttgaagcgctcggaacgagtactcaggcggccgcaaaaagggctcttgtcgaattgcacacttatcttcacgagggaggtttgtctgttcccctgcatctctattcagtaagatgtgttacgtacatctaggttgagctgatgcgtcaacttgcttgtctatctttattcagctccattcgaagatcatcacaacatcccccgacagcaaggtccgtataccccttcggttgactcaaacacaccttcgctcgcaccgtcccaatcggcctcccagattggcagggaccgatacgactactcttcagatgaggactctctcagatcgccatcggcctctatcgcccgtcgacaggccaatcaacactcaagcgctccgatcagaggactcgcttctgtcatcgagagtggaggcagcagttccgaggatgagacaaggttgaaagttgtggaaaacacagccccaagacaacgagcggtctctcagccgtctcccttggtcaaacgtaccggaccgaccgttcctccacaggcgccatcttctcgttggaacaacagacggtctgcctcgtcgatcaccgataagaatttagctagcagagcttatggttctggctctgattctgacgatggtaccctccgaaacggacaaggaagaaagacacaatctgatgtcggtggcagaggaaagagaccgtcgatggggaaaagacggtcatcagcatcctcggtcgcttcttcttatgcaagaggaagcgagacggcgtccatcaaacgaaagaagggctttttctcgtccttcaagagtttctttggtggtggtagctcaaagagatcgacgggtggtagcgaagtaggaagtatcagaagtgacatcaggaataccagcgctcgtcgagggggaagtccagattcgctggtcagagcctctggt

SEQ ID NO: 2687 - DNA, 13659 bp, Xanthophyllomyces dendrorhous
ctctggtggtgcttggtccactcgaacaaaccgaaatctccgaaacgctggcagcggagggttgattcctaagcgaggcggtggcaaaaatgacggctcatcatctgatgaagacgcctcacacggtcgggccggcttagtagcggtaactaacgtgaatcgatttgcaggaggcaagggttcaagcaagagggacagtgcgtctacggccgtctcagcagacctaggagagtggaaagttgagaacgtaggacttcaacgaccgggggtgaagagaaactcgagtagcaagaccacgctcaaaggtatcgctgcgactaccaccccgatcaccccagcggcggccaccagctcttctttctcgggtggagtatctcgatccgcaaccacaaaaaccctcaagtccaaatcgggcttgtcgaacggaagcccagtggaagcgacgatgacgtcccaacctccggctgccatctcttcgaagcccaaaattatcaagcgttcgtcttcaacctcagcagcttcagcgtcagcgtcagcaactggaaagacgagtggcaaccctcgtcgatccgcttcgacagccttcgacctcaattcgaccaaaccaaagatcctcactacgtcgcagacgagcggaccatcgctatcgtcgttggttgaaatcaaggctccgaaagggttgaacccttcgttaggattgacgttgcccaccgctcccggcagctcgatcgtccgaccctccgcttttgaggtcactactcctatcaagacagctccgtcgccgtcgtccttggctcctcccaagtcagtaaataacacttcgtccttgacgacttctccttccaaacgatccgtcaaatcagcttcgaattccaacacaggttcgtcaactagacctctatcgactttttcaaactcggacagaaaatcagagaacacgcatgtgccctctcatcgatcaacctcccctcttcctcgatccgcaatgaaaccgaccagacctctcgatttatcgccggagcctcgaaccggaaacgcgaatgaacttccaaaattgatctccgctaccgctcctcctccgctatcgttccaacccgcccaagttagtcagcccgttcacaacccagctcaggcagcgatctccacgtttgatgatgcagcgagtgtgtacgagaccggagttgaggacaacaacgaggatgatgagcaagtcaatcctgtttctgccggtttggctagcttgaacctaggaggtgttctcggttcgtcgcccgtatcagctgccactacgaacagcaatgttcctgcctcggctgtttcctccaactcaacagctcttggaccgagcaacggtaacggcaatgccaatggagaaaaccctcagaggagaaaatcagttcgaatggcggtgccgccgtcaatgacggagtttccatccgaagacaacttttctaaacgtgaaccggtcaattccaatggagttccggtcaataacggaaacggatcgagctacgtccctaccggttcttcgcacagggatgatgtgtccgccgtatcaagcgcctacaacggagcatcctccaaaccgtcaggcagctggaactcaaagatcgatacagcttctacaggtgtctggggagcggtcgactctagtgaggacgaggatgagaacgagacggattatgcgatcgccagacgagcgatggaacgtgcccaacggcattgggagaaagctgggaaggacaagggaaaggacaaaagaaagggaaaggaacgagcttaaaccgtaggatcccttagctctttcttttctctatggtttccctcgatcgagttttgagtactatgcttcgtcgtttcagttcgtggtattgtgtctaaactacctccctctacacaatttagttttatttatttatttcctcttcctcttatggagttgctcgtccgtacacgcttaagaaatgagaggacacgaagtagattcctattcacgtactttgttttcctttcctttcctctttcctttcagctcgatctgtattactggaccggctagttgttctttttcgcttttcttctctttccattaccgaggcacacgttatgataggatcgggctgatgcgtcgagatctgaggtggtttgtttcgtttgtttctcactataatatgatacgattaacttctcttgtcttcattcatccgtgcttagtttgagttctagcgcaaagacgtttgatcgtgaaagacgaaaaagagatatgtgaagtaggaaaccagaatagaaaggaaaaatgaaaaacgaaacaagtatagaatcgagaatacagaaaaaagaagtgatgtttcacatcgggagataagccaagaggaacgcaggaccgaatcaattagaacagacagaaaagaaacaagtcgttcagaatatatcataaagaaagattgctagtcatcgaaacaggtcttccaaagtcctttgctcttctctcgctttcgactggcgctgatgctcgctagcgtctctgccgcctgaattgatagcgcctgcatctgagctagagcttgcgtaatctgaagatagtcaaagacgaataaccatgtgaaaatatcagacgcttatgcatttgcaacgatgtatcaataaagaagtacatactttctctgtctcttcgctaagctcttgttgaagagaaccagtccggtcaacgatgatggagctagaggtgagaaggacttggttcatcgctcgagcttcggttgtgagctgttccatcgcttcactcgttttactgtttgaatttaacaagaggatctgtagtaagcgcgagactagcttctacgagggaaagtatcgctagaccgtacgttcttcctgtattgatccttcggaggaattttgagtaaatctcatcattgatctcatccaaaacctgacgaattggatacatacaacattttgatgagctattaaggacgaacatgatcgatagcatgagaaaattggccaccacttactcgtttgaactctccagcgtctactcggtcgtttgcagctttgaaatccgtagcagttggctgacttaaattgtgagagcccaatggcttcaggaccaaaccttcggtgtttcgatgaatgactgatcgaacgtagtatatcagtcaggcatacactgtttttacaatcgccaaggatattatcttacggtgtatcggtgaggctagacctgagccctgcgcagatgtctgagacagacgatgcgatggtagggggagaggtttcgtagtttgcctaatcatactttgtggactagctgggggatccctcagatgaagatacttgggctgtcttagattgttcatagcagatgtcgtgattacctggggtgacctaagagccgactgtagagcgtacccagaggttggggcaggtccatgaataaccgaccgggtcaaggaagccgtggtcgttcccgaggaggaagcaccttgtatagtatcacgcgacctgttttcgagtgaagatgagaggcctgaggaaggttctgaaacctcaggttgagcgtgggacgatggagcgaagatgggggctgaaggaatatgggcttgcgggttggcatcactcctaaaatgacaagatttgattttcatatcattctgaatcacctcagcctaacgcaaatgaagaaaaatacaggccgtgtgaatgttcaatcatcgaaagcatgtgagtagaaagccttacctgagagaggattctgactgttcgtggagtgaacacctcagtggctcgagttgtcgactggggttttccatcttggtattcgttgacggtatcttcattcaacagcatgctaggtccctccttctcattcaagatctgagcttgacccgcctctggatcactgaactcatcgattggttcggtcccagctctttcctgttgagttgacaaacttttcaaggcgctcgttgtggcgatagagtctggttgcgttgcatcaacagcagtgctgaggtactgaacagacgaaatggctgaagtatccttgcattccttaagccgacgatagagcccaggcgtagaagttgtccaaggaacggatgatcttgtgatttcaggactcttgaaggtctgatttgaatcacaaagttaggacatccacgattaataatattgtgtgtgtgaacagtgtgtgcgcacctcatcgaaagcatcgtcgagaccttcagcggcaagattatcctccaaatacatttgaagaacggtaggagaatctaaactgtgttcatccgaataaggcagaagtgacacttctcctgagatgctaggctgtggggaggcggattcagtattggtaagagagctacagatcatacaacagtacaaacctttggtgtttttccagggctttcatccgtatacagagtgtttttcgaagactttgtgaaaacgaagcaatgaaacttttttagctttgttgctatttcttttattgagcgttcatagcacggttaccttggctatgggggatttgacgggaacaacgctcggctcttttacggttatgcgcttgactggacttggaattgtttgcacctggtatatttgatacccaaaggaagaatcaggtaagttaagatatggaaaacatatgggagacaggacatgcctggatcaagtctttcagtctgaaagttttagatttaggttttttatcaacgattgaggtctgttcaagagattatatatcagttacttgatactcccgcacttagatgaagcaatcttacctttcgtgagacgatattctgattaacctccttgatctgcctctttgattgcgtatttatgaggtagtcagcaacggaactcgacaccccgacggcccaagataccgaaactcactgatctagacaggatgagactcttgaatgggggttgctgaggctttttattgttgatgctgatctgcgaatcaaccacattttgttgggcaggatcgatataaatggccagctgctttgtcaaggccaaagaacatcgtcaaataagcgtttcggtgttctggagattttcacaatcatatcgtgcgcatatggcttaccttttcctgtgcgcgggcggaagttctccccagatgtttggtcaaggttccagtcgcgtcgtgactcgtggaagcacttgtggttatggtggtttcagatgccggttggactgctataatgagggtctcatctactgttacttgatccttcgtcgattcagatttctctaggttatcttcaaactgtacatcgaagaattaaaatcccgtcagaaggaaacacttgaatggagaaatggcgttgttgtgtattcgagaaagcatgatttcacgaacctccatttcgtcttgggagtctatatactccatatcaggcacctttagatccgatacagatatgacagaagtggtattggattcgaccctcggagaacacgcatgggatccgtcagcctcggacagatctgtctttttaggtcttcccctctttctaaccggcttgttcttcttatctgaagaatcagttgattcggagaccggtgacaaaggccgtttacgaggtcttccacgtccgcgtttcattgatggagtctcggcatccttcgagagagatttgaatatcggatcaggctggggtatggcatcccaatcaactttggactcggtatcaaccgattcaacctcttgatgagcaagatacaatgccttcttcccacccttcctggactttcgaccggtagagtagatgattttggcaatcgatcggcgcttaggagtgaggtcgaaagaagaactcggatctcccgagacatcttcagagcaatcttgttgcttttcttcttcgttggacgcatcctcgactgtgactgatctcagtctctcagagaatgattcggacgcctcatctcttctggacttcttattattctgctcatctgtagttgtcgtctccggttttctcttggtgttgcccgaaacaggttgggtcttcgtacatctggaactatcagttactgaagacttgtgagcggaaagcgcagcggatacggcgactagattgacattcgggtaagggctagactgtttaatgggggatcccagagtagacgggggctccgaaatctcgctatccgtacaagcgccgaaagcctcgacgtctagttgaatacctccatagtcggtcttgccgtggtgatttgcgatcattgtgtgcgacgcgacagattctgggccgcctgaatcttcaggcaaggacgaactcacgtggtcggaggtggttgtattattgtttacagagttagtttggttgtattgagtagactcgtaatcctgtttgtaaggttcggcatccatcccaaactgatcatcttcggacgatgtcgctcctggaaaccaaatcatgttagtctaagagcgtaaaaagtcaaatggtacattgaagcaaatgaacgtactcttccacatttcgtccgctttttcaagttggcttgacagttgaacatgagaacccgtacggccgatcgcaagcacagatgagtgggaatgcggagggagaggtggggatttaagtaagatacctgcttctgttggaatggataccttgatggatcccgttcttgaaggcaaagtgggtccaatctcacacggctaaacaagaataggtagattcaattaatcccccgttcgatatgaaggtagatacaacactcactagcttccggttgagtagaactcggcggagatcgccttcttggcaattcacttcgtattcgtatctcgaggttttggtggttatacagagctgcgtgtgatacgctgaaatcattacgagatgatgccaattggtatagtcaatccgatgaagcattacttagaagagacgaaaacgatgatgatcgaacgtacactcagaatagtccccttgcgtcaacttcaaagatatgatttcggaaagtgatacgctcggatggtcctatgaggaagaggatacaaacgagagtcagtcaataagtgttcgaagcatatctcgaactatcgagttgacgcaaagagccataacatatatagtggcaggtacctctatcatcccttgactcattatcactacatggattcttgtcgcatcgatataaatcagattgtcctgtagcctgttggaagtgtctgatgtctcaaaagcgtcacggtagatcacatcatcgaggtatcggaagcctgcaagcgtaaacactcgaattcgttcagggtgacctcgaccaacaagaacatgaattttccgtttgcacttcaaaatagatcaaaggcaaagactcttgagtcatacgagctttacgaccactattaagatgataaggatgatcgactcactgcttcccaatcagcggtcttggcctccatcaatgcatccgctatgccatcttttgttccaggcgagaatgttcggaatgttaatttcccgtattctttcttgtctcgcttcttaggagggcatgtgaaaccaataatgttgaggaccaggtccgttaaagtgaaagctaattgaagagagatggaaacctgagttaagcacgctcgcgccgtacaggagatgcgctctggacctacaatcagtgcagcgcaagaacagttctcctaatctcatactgcactcgccaaaaagataccattgaggtatcagactttgcttcattctagaatatcaacattttgtcaaaacttacgggcccaagatcgatccaggtccattcgatctcaaggcgagttgatttagtcgacaggtagaagtgcatagttcgataagctcgattatcttgatgacgtgatgaagattcaattatcatcatctttacacaattcaatactggttcaattagacaagtaatgaaaagcaacgtgttgcgctaacctcgtgtttcaacttgtagcttaaccttgggaacgatggactattaataattttgcacaaacatggaaataatgcttttcctatgttcaactgatctatcacagagagagaagatgggtatatgcggagcccaaaggtagattagcatcaggatttatcagatgctgtcgaaatacaacttactttcattcagctcttgatctaaatgccagttctgccgtttccacagatgtacgtcatccgaacaaaccaaaaactttgagcaccagcaaactgcacagtaatcgggtcagagatgaagatagcaaacttacataaacaccgttgatggcgccgctcaatacatcctcccaaatcagcatttccctttgcctgtcttcaggaattgctgtgggatcgatcgagaagaacactccaagtttgttgaccaaaactgaagggatgaaagctgcggtgactgctagtgctcgagagggaaagaggcagtatattggaatcatgtcctatcattcaaaatatcagcccccggtattgatcagtcgaaacacaatattccaaagagcgtatatgctatcacatactaccaggaaaagatcgatcagagctccggaagctgaaagtgtagatcgagtctgtcaagaagttttgaaggtcagaagaatatcgaatagtcaatagagtacaccctgaagcatagccaagtccatctttcgacaaaacctggtctagcttcaccgcatgaagcgcgttcagaactgtggaggaaagaaacccatcaaacgctttgaacgaaccagctggtgaagcttaactgcccatgacttgacctttcgagtcttaacagaatcatgtgtggcaactgcctcatcgactagcgccttgatcgtgaggtccatagctgagggattcttgatctgcgccatgactaggcgaaatataatcaatcttgtagactagggcagaaagagaacagagatgagaaaggaggaaggaacaagagagacaggttgggataagagaagagaaaggtgaaaggaaggaggaagagaaaacaagggagacaggttcttgaattggcaggaggtaagggaaagcacagaccctatcaacgttgacaggttcctgggcgtgcctgtttgaataagattgattggacgtgtaagctttgatcccggtcagtcaatgggtcagacagatctaggtcagtcagtgttctgattttatacagtaggcaacatgcttcgacgctctttggactgcatatgatacgcagactgccagtgattggtaggtgaaaaggaaatgagtaacaagaagtagagcttgcttgagatgagcggatgatttcgttggcagaaacgaagtatttagatgttttcttgctatcaagtttcacctaagggtacaataccttctcaccaaaacactttcacgcagggtcttttgtttcttgcctacaagccctcgcgcacgttctagaatgcacccgccactctacttaccatacgcttcgatggtagcgttctttacactcgctctcttactcctcaatagactatcaatcacatgacatgagatgggggaacacaatgtaatgtaggagcgcgggagaagagagaggttagagaatcgacgaggatgtaagaaggaagaggtgggagatgtaggaagggtcgatagagacaaagcaaacggaggtttctacatctacaaatactacgaagcaaatatcctaacgccaagatagacaagaagagaaaaaaagaggaaataattcaagaagagaagagtgaattacagaaggacaacaaatcaaagattagaagaaatggatggaataaagagcgaaggacaaagacagacacaatggaggttatcaggttgatgggaaagaaggttgtaatccgcataggagaaaacagacgtgaaacggtcacacttacaatcaggaaacaaaaatgaaggatgatgggttggaggagaacaagaagtaagagaaatcaagaacggaaagacaagaaggaagaggggattcgaacgagatgcaacaacaagtctaggagcggcgaagagttggctccaaaatgctagatcaacaagagattgagaacaggatataaggattccgttattgaacatttgttcaataaccctcgcctgctaattctgcctcaatggccttgcggccagcctcagtcagcctaggtcttccatcgtcgatctatgaatccaatcatgatacaacgcgcattcccgtttttgaaagaccagattagcaagctaatagaggaaacacatgttaggaacgaagagagaagagaaggccaacgtacattgggctcaaagaacctgggttcaaattcaatcccctccttctttcgctccgccgcccggtttcgttgatcttgctctatcgcttgttttgccgtagtagcgtcggtgtagttcttggcgagcatcttttgagtcacgctgtcccagagacgtctcgattcgaactcagactgagccgtcagcggccgaacattcttgggaatcaccgctagtatgtctagatcaatcaacatccgggtttcctagtcgagacaagtgtccaaggcaatatgtcagcacgttatgaacaaatctggggaaaaagtttgcccaagcaagatgttagagacaaactttggtagctttcagtttgaaagtgatctgcttcctccagcagccctctaatgtgccgacaacctgggcagccggtacgtccttgattttattccaactctcggctttttcggcatcagcggtcgcgtacttgtatacaactccctcgagcgcgaatcgaggtttcgagatccagctctaaggatatacgatgaggaacgagtagtgatgttagcgagcggcaaccagtgagtcttgatcaaactaaacatatgagctgacttcgtctttgtactcgatgatggttctataacgctctgtgctggaccctcctctgcaagtgatggtcacctattgggttacagaggtttgaagaaaaaagataaggcaccatcatgattaaggttttgtgaggaaaaaaacggacattgtctgagatggttccatagtaactccctttcagaagaccgttgacgttagctgtagggttcgtgacctgatatctatggacagcgtcaaaagagcaatgaagaagagaagaacattgttcgtcaacataactaaactttcagtgggtgtgagagagtagtctacttactcttcatcggtcttcttgactcgaataaagacaccctataaattgaggaaatcgatgggacgcgcaaacagtataatcagtagtatagactaaatcagatacctctgtcgagaggcgctcactttattgtaaactcccggtgcgatcttcacagctgtatttttcctcaagacaaagaggaatgaagtcagtctctaattgatattccagagactatgtcaaccgctaccacttgctcatcgaaagatggccgactcacacatccccgagactttcgcgctaatttgatcaatctatatggatatccaaagggaggtcgatatcttcttttagtctcttattcacagattaggaaactagaagaaagtaagataagacgaaataaagcgcacagctacggcctccactcccttctctggacaagagtagtacgcggacgagattggcgggtgatgggatatttgctcacactgtttaattgaattgattgcatagttgattgaaatagaattcgagaatcgccgtgtttatcagttcccaaaaccgaacctggagatgtacaagatacaagaagtagggaagatgcttaccaagaaggccacttttacagaagagacattgtccgcgctgacatccaatctcgattgactcttcatgctcttcattgacttcgaactgaagctccgaatcgatctgattggcaaatggatacgagttaggactgaacagcatatgatgatcggataagaagacgcacgaggtttcgctgccggctgcctctcctggtgtgttgtaaccagagatcgatggatcgcccacatttggttgatggagacatgtgtttatcacgggctccttcgtgtccggatcaactgtggaaggcggaaggagccagtgacaacgaaagtgctcgcctgtgaggaacgcggtttgatcgccatgaacacatggtgagcaaagatatgataaaaatttagatttgagacaaaagagggaacacgaaccaagaaccgaattgtagggcttgcaaacttttcctctctgaggaacatgcgagcaaacatcaagaagaagatgcctcctctgcatgagcgatgcccgtaaagagagtcaagttgaagatgactgggaatggacttactacaaacttcaactggaacgtgaaagaaaatctcaagacagccagcatacgctcaagagaatcttccgaatctccaattctaagcgcattgatgacgaaggaaagtcagtacaatcatttatctaatgagcgcctgtgaagtccaagagcggtcactcacgcggcaaacatctaaggtatcaagatagaatgaagggaaagaaatttcttctgtttagacctgaaggtaagtagagtacgatctgtggcaggagaagactaacatcggcccgatctccagcagctatgggggccaaatgtaggatacgatgtcagtctgagcaccattctttctatcctgtttgactcaggggactcgttcgatcgaacttactccaatactctaggtttggaactggttctctgtgaacaatagaaatgcaaagatagaacaacatttcagaactcggcctagcttttggccgaaagcgctggaaacatagagagctcaactgacataagagaagcaggcaaagacaatcgtctgtagatcgaacacatggtcagcaaggtttcactcgataaaagcaacatgacctagaaaggtgctctccatcttgaacagagggcttgactgaaacaaggagaactatatatgtgtctcgcacccagacaagacttctccctgaagaaatcgagttgatctttgaaaacggctgaaggacttacaaattggcaagatcctaccgatgtcgaagaacgccgtgtacgaacgagccagacaagggacgtgttagctgttcagctatcatctcggttccttcaccaacgtgcgagatgtgagaggcgggagcgagggcgtaccttgacgcccatgaacttcttgagaagagacacgatggttttcatcttgccttcttcaccggaagcatcggcaatggtaacaggcggagctgatgagacaagaggaaagacatagaggaaggaaagttgattagatctctgaacccgtaacagttacattccggctggacaaggcgagacgtcgctatggtgaatagacagtttgagatgaaggtaggagctccaattgaatcttctggtgtttatagtgggcttgatctcaaaggatcagatacaacaagacacagaagaaggcgagatccgttctatccttttacgacctggtaaaagactagttctggatagacgccatcctggaaagtctgggcaacgaaataacatgctgtgtatggtactatgagaaaatcggagaggttcacgacgtggtgggcagagttcgtgcctgagatcatacgataccgacgagagagagtaggaac

SEQ ID NO: 2688 - DNA, 2727 bp, Xanthophyllomyces dendrorhous
cgacgagagagagtaggaactgagcgtgaaggggggacaagccatcgtttgacaaacgatatagaaattttggctgattgaccgaaaggagttgtagattcgagacggaagcagtagcagagtgatacgggctgggcaagaggaggacgggacgagaaggggcaacaaaaaagacacgtacaatcatcttcaacataatcttcatcctcattcggccggacgactttctttgccattgctcttagtttccttccgtttagaagagtgtgtgtatgtgtagaggaaggaagtgtgcgtagatacggacgaaaaagcaatagaagagagatgaataaaaagggtgattggggaagagacaaagccgagacagacaagcggagacagacactatcacagagtggggtactagtatatgtcattgtggtcacgatagggttacggacacgtggctgtaaatgaacaagacggtcaatccgtcagattaaccgcgatcaatgacgacagagctctagacggcctatgtagtggattcccggcggccccaattgatcccacatgggtcaatgatgtgcccaaatgaaccccaaacaagaggcaagaccccaattgacccccagtgtaaccctagtaaattcccaagaaaccccaagttagacccctcggcagactcgaccaacccgcctttcaatatggtcgctctcgctctctcatctctttctcgattctctgattcctctctttctctccttctccacactttcttcctttctatctttctctcttccagttccgttctttcctctctctttgttttcatccattctccatctccatctttccaaccctactcttcccatcctacttcaactttttagcctgcagtacaagtttactcaaaatcatgtcccgaattggttcttcagccatcaccactgctacagctccagcaggtccatccactcgtcaaactcatgtccgcgccgctgtagctgctatcaagaacaagatccctgttgttcgtgctttctttgtcttccgttttcgtttctttctttctacgcctgcttctatctctcctggagaatatgttgtgttggaaaaaaccttgcccaaccaaccgcgtacaaagtccagatgccgcgattaagtccagacaggtttggcaacagtacgaccaacataatcgaaacgatgagtctgacgaaccattcgaggagagcgagtcggctatgcacttagacatccatacccatactatctgccaatcgttcctgccctggcactagatgtgcacgtaccgaaagggcaggagacgaacagtctctgtcgtctttacttgaagagacaggatggtcaatcagccgaccatcagaaataaccaatgggctctcctccacatcgctttacaacttcttcttgccaaaccaagcattctgtctcagcaagggattcagatagctaactacttccttcatcactcttgacttatgctgtataaacactgccctgcgggggaaaattccacagcctcagatcgactttactcaacatgaaatggaagatgggagcatagtgaatacccaggagcgagtgatcaaggacgtaaggccccgcgtctctctctttgtcttgcacaattgtgtagatccatcctgaatttatcttaacggctattttgaaacgatccgaaaaacaaacaaaccatccatttcaggtccaagccccggccatgttccttcctaccgatgaacagttctttactgccgatggaactaagccagatatcgcattcctcaaaaatcatttttaccgagaaggccgactaacagaaaagcaggcgctgtttattcttacaaagtacgtttcgataaagccccctcgatcttccttctcccagatagaatgggaaagagacagaggaggagaattctgttcttagactaggtcgaatggctggtcctgacgatgtggtactcgactttgcttggttggttgatcatccggcggaatagagcgagcgaaatcttggctagcgagcccaacttgctcgaggtcgacgcgcccatcactggtcggtattctatcacctcgcaaaatattattgtttgcttctgcctcctgattgttcatgttttatccttatgaaataactagtctgtggagatatccacggccaatatgtccgtctttgttgcactctctcgcacccaaccttcttacttcgcctgagctaatcaattcctttgttgatctgaatatctacataccaacaacgaatcgcgtccttagttcgatctgatgaaactattcgaagtaggaggaaacccggcggatacgaggtatttgttcctaggagattacgtcgatcgaggatatttttctgtcgaggtaggttttcttatctcttctactctgtttttgcattcgcagtgcaaagcaagtgttctaacgctatctgtgaaactggtacctcccattctctagtgcgtactttacttgtgggcgttgaaaattcattatccacatacgctattcttgcttcggggaaaccacgagtgcaggcatttgaccgactacttcaccttcaagttggagagttagtcctttctacttgtatattcaccatcggattgaagcctgatcaagaaatttatgaatcaactctatcacctttgcttactaatctttcattgtaggcaagcacaaatattctgagcacttttataa

SEQ ID NO: 2689 - DNA, 25347 bp, Xanthophyllomyces dendrorhous
catggagtcattttgcaatttgcctctagcggcggtcatgaacaagcaattcctttgcatccatggtggtcttagcccagatcttgtcacactagatgacctacgagcggttggtcctctgtcctctctggttgtttcttctcccgtcgaaataatgttggaatctgaaagttaattgtcttaaccgcccttgatggtctgtggtgaatgcgcgtgtgccaactaggtcaaccgtttcagggaacccccaacaagtggcctaatgtgcgatctcctttgggcggatccactagaagattttggaaatgagagcacgaacgagagtttcattcataatcatgttcgaggatgttcttacttcttcacgttggtctctctatctatctgtttccctgcgctagaaagaaacgaaggttgataatcgtacttcgaattttggtggaacgatagatataaggccgcttgtgactttttagagaggaataatcttctgtcaatcatccgagcgcacgaagctcaagactcagtacgtaccttgtttctcgtgtcatcttatccctgcccttttgacatctgtcctaatatcttgtcatttgtcctatgaaatttcagggcgtaggttactttgttgaactctatgtgtatatactacttggaataaacaactcgaagaataatctgacgctctccgtgtctctcccacttgaaccggctttgcttatgtcttttctctagtaccggatgtatagaaaaacgaagacaacgtacgtgtcgccttgttcgaaatagtccttgtgtggatcttgacgaatattcactctcgtatccttctcgaacttttcttatgttgtagaggattcccctcggtgatgacgctgttctcggcacccgattacgtgggttttttatgttctcctgttctcagcagtgatcgttccttttgctgatgcactcttttacatttcccttcagtgttcgtattcttcaacccttgcgaatctatttagtagtaaagacaataactaaatgtcaccgttctctccttgtgtgactcgtagtggatgtgtacaaaaacaaggcgtgagttctaatttatatttcacatacgctctggatgcatgttttcacagacgtcggcgtaaggatagagattcactctgcggttatatatctcgattttcttctatagagccgtacttaaatacgaggcgaacgtgatgaacatccgacagtacgttcttaaaaacaatctcttcttttctcatgacttgttgcgacgactaatcttctatatttaatttgtgctgatcgctgcctataggtttaacgcgtccccgcatccctattggctacctaacttcatggactgtatgtctttagaatctgcccaaatgttaactactttcgaatcactgatttgattaatcttttgactgagcaaacgtacaggctttacctggagtttgccttttgtaggagagaagagtatgtgatacttgattttgaagtcgtgtaccaaatacttgtccgaactcgctcaccttgctttctcttcttaacagtcacggacatgcttattgccatcctcaactgctgcactcaagaagaattggaagaagaggaagaggaagaggaagaggacaccccggtggaagctaacacgcctggtacgtgtctttccttagcatctaagtattgcttgcgtactgacacagcttctgtctatcgttttcatttgtcatctctacagaggaaccggaagagcgccgacaggctatcaagaataagattcttgccgttggtcgaatgtctcgcgtgttctctcttattagagaggaagtcgagtctggctcagaattgaaggcgattgagggaacgacaatctcgaccgatacgctgatgaacggcgcagacgaggtccgatgtgccatcaagggtttcggacaagcgtacgttccaagcgtcctttggcgatggtctgtgacttgatattctggtgtacatgttaatgaatttattctatcttgggtacttacagacgaacaagtgatatcgagaacgagcgactgccacctgatatgatcgacgtaagttcctgatcctcttcgaaccttttatctcactgattgatttagatgtctcaccccttccttatctgttcctgttttaaaaacaggtcgatgaggaacgacctgcttctccttcttcgtcagcccctaactcgccttcttcaccgcctcatttcgacaacgatccgttcgccaccaatttcgcccactctggttcccctgagacaccttcgagccctgttcactacggatcgacctcacctccttttggttcgcctgtgcttggttctccaggatcaccaatcagcggtggtgacggtactccgtggcgcagaggtcacggtaggagacaaagtttgggaacgacgaagacgagtccgtcgacgagaagaagatcattagagagcacgatctcgctcatcaaggatgttgtcgaggggacagacgcttcaggtgatacagatcagatcaatcagatcgcggaaactttgagctctccagtcaagaccaaggtatgtccagatattcgccctgatttatatcatcaattgggtatgatcgacgaatattggtctgactctatgttcttttcatcttatcctttgtaattccttagccacatcattcaaccattgaagaatagagtattttttgtatggctcaggatgaacgaaaagaaatgaccaaaaataaaaacaggaagaaaaacaaatataaactctatattatctcgttctcttcccttctccttaccactcctctctccctggatctctcttttccttcttattctcccatcttcctcttctcttctcgtcttggttgtctctacccatcctgccatcatctcggtttcatctttcgacatcagaattaacctttcccccgacgcttgttcatgagttcactatcgaccgacttgtaaatggctatttttcccgcctgtgtaaagacattcaacgatcatcttttgcttctttcttttaattcttcccaactttttgttccttcgtgtttttttttttcgttttctcttgcaaagattcaactctgaattcaaatgtattcggacacgcttaaccgaaaacgtgcctgttgaacaggataagctaaagaaaagtcgggatttggaagagagagaaaaaaaacaaatgatgtatacaacgttgtcggcctttctgggaccagtacagttaggaaggaaagagggtttctactttcggttcatgatcaccacactgaaacagaagaaattcagcgaccaagcatgtgttagagttaggtgtcccgccttaccatgtgagagacacaacaagaagaagagaagaccccatcaaagaagactcactctgtctcgtagttgtattcaaacacgcctttctctttgtcgatccaaaccatatcttctgcgctatcaagcacctgctccaatttgcttattaaagcctcactctcttctttgctcaaaacagaggtgtaactctttgacatcactctattgatagcaatctctttcgtacagggactttttgaattccagacagtgaataccggagggtcgaacaaggtcttgtactctggagtgtcgtacaaggcatgccagagtttgaatcgctgctggggagaatgtccgtcgtagacctcgtacgtgtcccggaaggttttgatccatgggacggagagagattcggagttccagatgaatactaattgaccgttgtggggtttgagagaccgaccaatcgttttggctgcttcagcatattcctagatgttatgaaaaatgagtatccataagagcgctgctccacagggtgaggaggttttaggctagaggcagtgtgacttacaggatgagcccagtggaacgctctatagaagaagacacattctggtgatcagccctgtacaaccaaagggattcgacacaaaaactaacagcgcgaaggataagagccttactgagctatcaaacaagcatcgacagtcccatcttggacactctctggaaactgagtaaacgttccctccatagatacaaccggagcgtcaaccgaaggaatgacgttcctgttgaatgaatctctcattcccgaacttggctcgagcgcagtgaatgatttgataggaaactttgggtaaccctctggaggggataggacaagcctagagaagattccctgataaccattatcaagaccaaagaacgcgcaggcgcatgcatatgtttagcaagaggagatgactcatcgtgatgaactagctttccattacaatgaaatcactcacggtaccactaccgagctcaacaatgttgagatcatctttgttcttctttgtaatcgattgatgaatatgactaagcacagatgaggggtaagagggtctaaagagattatcagatccagccgagtgtgatatgatcaggtatatcagctatattcttcacgccaagaacaggccaccagaaaagaactcgtcatgatagaagcaatagcgaaattgaatcaagaggaagaggtacctgttggcgttatagaaatcattcttatgaccaaagccgatggaggcaacgggattgactttaagttcacgagtagtcatcgtggttgaagttgagaatgctctgactaccagatgataaactgagtgagctaacatacactcttccttagaatagtcattcatgcacctaccagctccagaaatgaaggacatccagcaggtgtaaaggagataaagattattaacgggaagagatgatctagtgagacagaagatgactgtttatctaccggggctagcagatgaattcggctcgttctcggcttgtgttcggaatcttcacccgtagggacaactatagccgatcgaccgatcggaccgatgagtaaccaaaacgtaaatgtgcaatcgccggggtatgcccgaggcgtagccatagttatatcgaggctgtacgtccggctatgactagcgataaatgattgatagagaatatctagccaagatataggagaatcgataaaaatatcagaataaaaacgcgcgatctagcaaccattacaagatatagttctacacattagaaaattggtgcaagcattcttagtcagggaacgcgaccaaaacttagacgtcacgatatcaatattatgatccggtccactccgtttctcgcagaaccacatccactcgtactctctttctctatcctctcccttcccctcttccctcttctctccgaactattccctctatctctccctatagtcctctattctctctccactcccttctctttcccttgatctctatctcagaggcagtatgacctcccgaattactaagaaggccagaatctatgcggctgccgatgtggcgaagcacaacacctcctccgatatgtggggtaagttttctgagaattttatcactgtctctttgtatcttggctggtgaaatagacaaacgcactcgagtggacatatctagacaagctttagcaagtcttctatgtttgccactcattcatggccttttggatgtttgcgtttgaggctctaccttaccactttcagggccaccaggtctgataatgcttcttttactctctgtcttcaaccggttcccatcatttttctcttgcgagaatcacagttactcacaaaggaattgtgtacgacatctctggctttgttcaggaccatcctggtgagtcaattttcgttggatcggcttcgttcgagctgttgtcggtgcctgactaatgtcaatgatactcattgaaactcaggtggagacgacgtcgttgttccttatgctggaaaggacataaccgaagttatggttgacgagaccgagcatgttcattccaaaagtgcatttgagatgatgcacgacgtgagttcactttaataggctagtttctgtgcggtcgtatgagaccaggactgatggcttgtcttctgattgggtgcctcattacctggcttcagttcgcagtaggtcgactcgtgctcggagagaagatcgttagcgatggtatgccctcatgcctttcaacccctgtcttcttgttgctccaaattaatcgttgcccttccattgctgtgctctcagactgggaagccactgaggatttccacccagatgacaccgatgtgatttctgatttcgagcgatccgagttcctcgacctctccaaggcattaattcctcagatgtggtatgccaacttcagcaaagaattctacctagagcaggttcatcagccaagacatgtgacctattccgctaagatgttcccctacccatggttggaggtgagattcatccgatcatatcacttctggtcgttctacagctaaatgccttctttgtattctgacttgcacgatttatagtgcttcactttgaccccgtggtatgtggtaccctcgatttggttaccaattgcctccatattcttctacctgtccgctctccagtcctcgcctgcaacggcagactactcattcagagccctcgtcggctccgctagatcattccagatccctccggctccggccgcttcgggatttgcagcggctagtctctgctggagtgtgggatgtgtggtctggacgttgttggagtatgctttccatcggtttctgtttcatttggatgactacctgcccgataagcagtgggctcttatgttacattttttgatgcacggagtgcaccactatttgccgatggatggactccgtctggtgatgcctcctgtgatgttcttcgttctcgaataccctttcaccaacctggcccatatgatcttgcctgcctggatggctaacggagtaattgctggagcgttcacgttctatgtgggctatgactgcatgcactgggcgtaagtatctgatctattcgttatttgtgttgtttttgttgttgtttgtatttttttgtatggatcattgacgctgttattcactccattctgtctgttgataccggactttcagtcttcatcacaccaagttgccggcctacatggcggagatgaagaagtaccacttggcccaccactacaagaacttcgagcttggttttggggtaacatctaagatctgttagtctatcatcttacagatcttatccatgtattgaggacatgagcactgatcttctgtccttgcttctgtgtcacgtaggggatatcgcctttggtactgtactcgatattcagacaaagtaaatatttccgatcgctggctactggccaggcttggatccgatctttcttctttcattctctttttatgttacagacatgcatacttcttccatcatagtacatttacttaatcaatatctcccctcctttctctctacacttactcgagacacatcaatctcgattgcgcccgtccttttgtctgatatatttataaactcaatgtggatttttctccccaaagttctgctcagtcgctcttttgcttgacgaccttaaaactaagtcatggtgcttcagactattgtgatcttttcatatctgtctgcttacttgttcatttatttattctatctgatcagagattaattgagacagcaggagactcagatttatcagggtcctgaatcgagagaatgagggagacctagcgcagttgaggagtacgcagtccgcagctgaactgccaaatcgctctgggctgcgctcgtgcacggcccgcgttttgtcaatcgtcccgaacaggggtcgatttgtgcaacagcccgaatgttctttctttgtgttaacttaccctttgctcatcccttctccaacgatcttctcccaatataagttgagttctgtggttcatatacatcgactcacacctctttggtatgtccattttcgttcgctcgaatgtcaagctaggagtgaaatagttaacgatactttcacaacctttgggctaatttgaacctaccgaacctatctggacaatacggaatccctttcctgttttcttttctccttcccgttcttcaacacacctcttagcatcagctcacgaccatagatactccggattggaacaatagagattgtagagtagggaacgttttcatcaagaggtaagacatcattcgagtttgaacggatcaatacggaagagtattgagttaagagatgacgggaaggaagctctggagtataacagtcgactgataaagtatatttgcggtttcgttgcgctttggcctggtctttctcaacaggttcacagacacttttcctttgtgaaagagtaaaagtgaaacgcaaatcccttttgcgtatagatttgtgatatcgacgacaaggacaccagaaaccgatgtctcgacagcgtgcttccgttccggaacccatcggctcacctgcagctgacgatttcaccaaaacatacacaacctctacccgccaagcctcgttctcgcaaccttcacttcagccaagtggaaaattcatactcaatcgatggtggttctatatccgtcgacgacgaatcttttcgaggtcaatctggacgattgtcctgtacggcttagttgtggtgttcttgatgaggacatttatcctgtggtcaaacaccctaccttcggcagcttctgccggcggagactacagtcttagcggtggtctcaactatattcttgaccagccgatcgttcaaaagtccaaacagttgctttcttctggtcagatcgagtctgcttcgaagccagtgtcccccgagccagtctctgatggcaaggtcaagtctagaagtggacacaagctgaaggacggtatccttcatgtggacacgttgcagccaacatctcagcacccaatctaccaactcatgagagatgctaagcgagactggaatgcgaagattgctaggcaatcgaccactctggaggaggccgtggtagagtacagaaggaggaaccacagaaacccgccgttgggattcgataagtggtgggaatatgtacagtgcgtataggctgttctaacgggcttcgacaccgcttttgcttgaagtatgggtctgttgactccttcatctcctcgttttccttttgtacttatagaaagcacaatgtcccacttcctgacgaatatgatcagatcaacaaggttcgtccaacacggatcttgacccattgtatgtttaagctgatgttgacttcatcgtgcccttcctgttctcttctttctactttcatcaggacctgagtcctttccgcgcatttactccgaccgtacttcgagcgaggactcccgaagctagggatttgactgatacgttcaccttctccgtctccaatggagttgccagcatcgatcatgtcacatttgatcccgaacggatcacgggtgctgaaaaacgaatgaaggatcagcttcatttgctcaaggatgtggcaaaacacattcctgactttgagagcgtgtactctattcatgatcggccgaccaggctgatgagtcatgcccacagatcagatctccttgaaactgccgatgatggagaatgtacgcctctcgttgttttttccacgcatcaatctactatatcttatcgctaactttgtggaattttctctccctctcttggttaatgggttgatcttgtctctacagactttgatgacaagacactcgtggagacacaccaggacgattggtccgttatgtgcggaccaatgaccaacatcaacacggctggcttctcaaagaaaatctcatcggctaaatctttcatctactcgcactcgatcgctatggacatttgcactcatccttcgttgactctcttgcacggcgcattcatcagcggtaatcccaacacacaacctaaagccatccccatattctctctgtccaaaacgcccgctcacgcggacatccttggtatcccaactgattattgggaatctacttcggaggacccactgcttgaaccctggtcagctaagacagacgctcgattagtttggcgaggaaagaacaccggtggtcaacactcaaatgcgattgattggaagagcatgcatcgacttagactcccaggaatggccaaacacgatgacccaaccatggtcaacgtgatgtcaagcccaaagatgtcctcttacatgggtgcggatctgaagttgaaggattcaatgaagcgagtgaaagctggaccgatgaacaagagaatgacagacattgcgttgtctttggatgagtacctggatactcccccagaggccattcgtgagcactttcaaatctttcttttgtcaaatgagtttatagtcgcatcttgcaaacacatctgttaaccgtgactgattgattcatctccgaatttgtacagaatgcaatgtggaacaaggaatttgtgccgagatcgcgaataactacccctttgctacctttgttcgtaaaagggatgagccaacgtacaaatatctacttgatattgacgggaacgcctggtcggcacgattcaaacgatcgctcaacaccgggtcccttgtcttcaaatcgaccgtgcatgtcgaagtgagtctctttgctccgctcttttctctactcttgctgggctactagtgtactcggctttgaacagcccgggcttttcttgcctctgactgattctcctcttttcaattagttctggaacgatcgaatccagccctggttgcactgtaagtctgcatcatatcagctacattgatgattactaatggctgacgtcgatgagtttcacctttgaatcataaagatgttcctgtcaaggtggattactctgatctctacgatatccttgttttcgtgagtctttgttcttccttcaagaactatgtgcagtttgctccttgagtgtccatttaaactgtttgagattttccattggaaaaaatagttccgaggagataacgaaaagggaacaaacggagaagatacgctcgcggcaaagattgccgaaggtggactcaattggagtcacactcactggagagaagaggacatggtgagttctatccctctcaaatcttaatgatgagttggtttggaccgcaatctctgattcgacgggatctttctcaattcaaccgccttcatattgtagactgcttatctcttcaggctctacttagagtatggttcgtaacgtgttccggcttctcttcccttaatcttatttcgcagcccgatgctaacccccttttctgtcaaatttttatcttgtttagcccggcttactgctaaaaatcgatccaaggcagacttcaaacttcccaaacattaaaatatctcaatgtttactttgaattttgttcaggatctcttccctttcctcattttattactatcattctggatctctacgtctttgtgtcatgtaactttcccctcaaggattctcatttctacatcacggaatttcttctttgtctaaatgaattgtatcattcgatcaatgaacaaaagtgagggcgcgtgtttttcctatccgtctatcatagattaacatagattaagctacagatgttgagtcacgtgatgatcttcatctgaacaacccggagaggttgttatcaatctgggaaatgtttatcatcttccattcagacatcaatttatcatccctaaagatcaacccgttgatccgtcatccagttccaattgaccgttctctatcagagatgaagagaaacctctcggcgacttattcaagagcggccagacgtcgaacttcgtcggcttccactggtgcacctctcgttagaaagctaggcgagctctcagactcatcctccagcgaagacgacaacaagaccgaaggcaaagctcaaccaggagcgaaacgacaaaattctctcggagaactgaaggaaaagaaacgaaaagagaaagagtctttgggaaagcagtcgatcggaccaggtgagaaaaatgttatggaaagaggaacagcattggacattatatacacgtccccgtccaaagctagtcaatcgaggagtcttattcatggcggtagtgtaactgccgatgattcccataagagaatggccattggtgctagaaaaagtaacggttggtttggtcgtttcttgtgtattgtccgatacagacattgatgggtgaacgatgtttgatctttgggtcttgaccagaactcgcttcgcctgccataccaaagaaatcaagagcgaaacaccagaatcactctattgctcatctcgttcccagccctcctgttcaccagatcacccagccagtagtttatcccaatggtccgagctctcctctttcctctcctccttcagatcgacacagttcgcttcctgtaggatctacatcttcttcgccgagtaaggaacgcattcgaacaacaagtccgtcgatgtcgacgcctacaaaaccctctccatctaagtcacctctcgaggacacgttcacaaagccaactgagacgggcgcggaaactatctcgtcgatcgacttgaagaatatttctccttcacgcaagcatgggatgatcgatctgataaaaatggaacaggaggaggacctgcctgagtttggtcttcaaatgttcaaacttcctaaaaatagaggtggcctggcaaatcggatgatgaaacgagctggttcctctcaagatgcttccggctcatcgataggccctactgagtcaatcactaacggtttagcagccgtcacctctccctctgttcatcctgcattatctaatctggcggcgcgctcgtctttattcgagtcactcaacagttcgggtttgcctgttgaagaaaactctgacatcgaagttcctccaacgcctacatcacaattgataccttcggtcactatcccccctgcaaaacctcagctttcttcgaacaagacttatggtggcacttcaagatcgatgttggccactgcagaagcaggatctgacgtagagggcgaaggaacgaagagggagagttatttaacattggcaaagagatggggagtggacaaagctcaagagttgaaggaagtttgttaacgtcgtcttttctttagtcttaatcgcctctctacgcaaactctctgaacaagcttcctctacctggttttcttttaatgttattttcgagcagcagacgatcggtcttccgacgttaaacgagcttcgggctcgaggagagaaccagcgctttctagacgacctcggatatatcatggatggtctacagggcgattcattggctgtcaagaggcctaggttcgtcctttgactcttgtgtccttgctgtggtgacacgttggcgttgagcatacttcttctttcatcagtgctgtcgatctcatccgaaggatgctagataccgatttcaggataagtatcaaaacgctcgatgaggctgccaatctgtacaaaattctcagaaaagcgggagctggagccggagactatgttcgtcagatcttttcttttttccttccttaattgcgtgtcttgttgatagttgatcgaatctttatcggtatcgctaaggtgttggacgcttcgctagtgttgtatcttggtttgctcgctcaagacagtaaagcggttgaggtcatcctaacttcgcattctaaagactgcttcaacgttgtcggagaaatgataaagacgaagaatgatgggttttctgcggagagaaagagggaggctgaggggaaagccgtcaagccaaaggacaaaactacttccaagctagtaaggaatttcttcgcccgttgaatcaacatgtagtggctcagtagttctgtgattctatctacagctaaatgagcttgctcgaatatacagtgtctcggatcttgactgcaaaacatttcacgtgaggaactatcgttctatctccctatgaatcatcaattcgaggagagatttatcccgagtatacttttcgtgatcattagatttcattgcgagggattgcttcctccttccttgcatcgatcgttgctgccgacaaaggtgctcgatttgatcgacacttggctttaatgcagacaggcatagctgagacatcaataacttcgctagaggcggagcttgggactctgcctggacgattgaaggatcatgagattggcttggtgagtttacatcgctgatagttccttgatactcaatttctgaagacgggtctcctcgcattgatattcgatagcctcttctcccgaaacacgagccaccggatattggacatgccgaaagatgccttttcatcctagagagtttatttcttcgatttgaggaggtaaaggagattattaggacaggacaccctcaattaccgagtctattaggaactttactcgctgtggctttacggataacgtcgtctctagaaaattacttggacaaagccgacgagataggtgcgttgcatttatcgccgaagtcggtttctttcggcaagatctgactgattcaacatatgggggtgcggcatgaaatctttatagcaacaaattgtgtaactggctgtttgagagtgctagtcaatataactcatagccaaacatctttagtaactgatctcctagcatgtccgacgattgtccctaccatcttccgtctgatcaacacttcgacgtctcttccgttgcctgttgatgactctcggagaaccctccaaatttctttagaaatggatgtggactatgctgggaacgggcacatcgatgatgccgaagaccaaaagatagaagtcctttgtctagctctgagcttgttaaacaatctggtggagaagacagaggagctcaaagaccgagttcgaatgacaggtgggtatctcgatcatggagaccttgactgttgtagagatcgagaatactgattgtcttctctcgtttacatcttttcgttttgttggtagaaatgtccaagacttgtaatggatccagaatgtgtgtttcaagttgccgctgtcctgaaagacgttctgtgctgcacatccttgtggacttgtttgtatctcaatcgaaacaaaacgcctcgccagaggtctgtatgtcttatttctatctcgaacggcctgattactgatagctagaacttcggttttgtttatgttcattaggcatcgtatttgtctggttacgctgttttgctgctctcgcacttcatgaagaacaaccagaccaacgtcgaccttattatcgaggcacttcgagcgactaccgatgaaccgtcggacgccgcttccacagcttccagcctggcagcttacctgaaagatttcgctgacgtccatcagcgattccatcagaaaatcacgacgatcgcgcgtattaccttaggaaatgattcagacgtttccgttgaggatgctgtgggattgacggacgggaatgaatgggacaaggtgaccgccaagattcaaacagaggaattgccggctgtcattccttctgtcgaggagggagtaggtaagttcaaatcttgttttcttgtgcagaagcaaagtttcacttcaattgataggccaagctttgatgcctgtgtttcttctttttcttgtccaaagatgcaatcaggtcgatggctctcgagatggagcagctggcctcgcgccttgctcagagcgctgcttgctagtcgaactccattgttttcatataagttgtattgtctatgcatgtaatagtaaacattttctgtcgaccgaaacatcagtaatttcagtacagcaatcggatacattgcagtgttataccatatgttggtttgatgaacgagcaagacaagatctgatgtgtgactgtttgtgaggatttgatgatgtagaactcataccggttcgtcctcattttcctttagactgggatctatataaacgatgaataactcagtgattcatcttcagtcccactcttcatcagcgctcccctcatccctctccctcttcgttctatcttctttctatcgagtgtgcttccactggaatgagtgcataagcgttgctcttgttggagatgtactaagtttcctcgctcatcctggctggcgttctgcaatgctcttcatccgtttctatgatcaaacaacgatatactcctctcctgttgtctgttttctttccatcctcacctctatccgattcatcggacttcatttttgtttgagttgaggcagtcttattttaaaccatacactgatgggtttgctggctagtaactagattgtatctatgataaaatgcagcaatttggattatatttgaattatatttgaattatatttgaattcaaaaatgctttaaaaaatccttgaaatttttccttcctctttttgttcctcgccaccaaacactcatctttctcaacgtttctttttttctaaaacctttcaactcttacttcaaaatgtacggaaaccgaggatgctacaactgtggagagcgtgcgtgttgagttgcctctttcctcccctactcaaatcatttcattggaaccgaacacatcggattcagtagcttccccatttatcctccggatgaaggagaagggaagaaacactttccagcatccaaggattcggtgtcctgtgtaaatactcttgagctatgccgaagagggagcggagaaagaacgaggagcgtggagatgcttgaggcttaaagtcgaagcggagcgtaccttagttttttctcctctttattttctccattccttttgatacaaaccacatgcacctatctttgggtcgtcctattgtagtttcttccttcggttgtcgatgattttgtctgcgagtcgcgagctcacgcgtggaggagctgacgagtttggtgttctaatatttactttatacttcgggcgacgacgacgacgatttgtattcgacgacgaaatggaacggcggcgtatcaatgactttcaacttgtcttgttgatctcgatccatcttgaaaacgaacgttatcattcggttggcttgatttatcatgggtttgcatatctgtgtttttttgtatgccattcatccggttgcttcatctagagggccacgtcgcctctggtatgtctttcttatccttgtcataattcaaacacaaaatgagcatcggttggcttatgcgaccatgttggttcttgattgcatagcctgccccaaggccggaacccccacttgctacaactgtggaaacgacggacgtaagggaactttctttgtgtatcaatccttgaactcaagcttatcggggtcttcccatcgtgtatcccttagacgtctcccgagactgcactgaggcccagaagcccaagtcctgctacaagtgtaacgaggagggacacatctcccgagagtgcccccagaacccccccggttctggtgactgctacaaggtttgtaatccttcctgaaaaatttcccgatcttatcggtcgttccctgactgatgttattttttggattacttgttaaatagtgtggcaagcccggacacatctcccgaagctgccctgagcagcagtcctcgtacggttacggaggagctggtggattcggtggaggaggatatgcccctaagacttgctacaactgtggtggtcagggacacatctctgccatgtgcacctctccttccgctggtggcggtttccgaggtggagccggatccggtggaggatcttgctacggatgcggacaggtcggtcaccttgcccgagactgccccacttcccagggaggagctcgaccccctaagtcgtgttacacctgcaaccaggagggacacatctctcggttcgttaaatgagtttttttttgtcttgagagcgagcttctttctgacttgtcttccttgttcaccgcttcgcagagagtgccctcagggagcccccgcttcttaagcgtctcttgaccgtttcttgattcctcttctcatctctgttatctaccttacttttgtaccattagtcgggggcgctttgacgtgttttgatctcgatgatgttgcattcgattcctcttcgttctttgtgaacacgcagggacgtaagactgagaagaaagatacgaaagaaaaacagaaaaatagaaaaaaggataggagaacaaaaataagcattgctttagtacgtcgctttgggcgagaatgacgagcgttgatattttgtttcaacccttgacgttcatccccatttctttcttcgtctcacgacctttgtcaagcttctctttcagttctctaccgaggcttctttcttcctggttgttctctcggccatgccaacagtatctaggcctaactcttctctatctagattttcttcctggagccgctttctcgcccttcaaatccttcaggtcacatcactctcaatcacgttcagtttatcatacgatacagcgcttccttctatcctctcaccttctttacaatcctcgcattcttcctcccaacaggctcttgtgcctcggccggcctcttcagctactgcctccgccgtcaatcaaaaaggctctcgaggtcgacgaaagaagaaacacgataaggctggatcgccacatccgacatccgctcatccagcaatatctgctgctccccatctgacggcacaggcggctaactcaatcttttcggacaccgaaggggaggaaggagatgagaatgagaacgaatcgtccgtgaacgaacaagatcaactcggatcgaatcaacatcttcattatccggaacctagtggatacctcaaaatggccgccggagcggaccttctagagggtagcagcccagcgagtggtctcgaaggaagaacacacctagcggttctgatgagcagaggactggctgtcacggtgaatggtaacccttggagaagcgtggcagcccatgtgattgatgacggggatgaagctatcgttgttgtttatggtctgtcgtgagttttctcccttcccctcttcctctgccttgtttctcggcgtacgctcttgaagaattcacttgttctagattctgacctttgagggaactcgatctatagacctggagaagaatatacagttgagcttgggttgatacctgatgaggattccaagtccggtggagagtaccctactggcaagtccaaccttctcgctttcaaattcattttctgtgcaagcagtctgactgtctttctcatgacctcctgtttagcctggaccacaacgacgacacttgctcagtccgagtcaagctcttcatctatacctacagctgcttccaactccaagtacacaacctccgctctttccagcatagctagccctaacagtactgtccgttcccgctcccgctcccgtgcaaactccttccgccgctcaagagcaagttcgtccgcatcggctcaacctccctctctacctgaactgccgccagtcctctcgacatcgcccgtgaacaattcctctattccagcttctccttcgacaaatactagtcttccgtccacctcttctctctcggtagaagcgcttacgtcgatgttcaaacatctcctcactcagtctcaaacacaacaggccattctatccactgagttgaaatctcaaagacgctcatctcagaaaaacgaagcccagctccgatcgtccattcaggctttacagagaacactggaaaagaattcggcaggggatctaagggggagacaaaaggtgttggctctgggagaggcggttaagagactgaccgtcggcaaggaagacgttgatttagaaaggaaggcactggaggaagagatctggggtgagcaagtcaacgaaggggaggatccaacaacgaagaaaaccggtatgggtctagagaggaaagaagaagaaaaaatagaagactggaaggcggtcgagcgggatggagcagagatggagaaagagagaaaccagattgtcggttcgaatgaaagagtcttagctgaatgggaaactgagatgaatgggttgatttccaaactagaaaaggttcgttctctctgccaattcttcttgcgctgcgatttttcatattttgatatgctgtgagcttttgtaacaccgcttgatttgatttcagcttaatggaaagcaagaacggcttcgttctcaagctgacatgcttcagaatcgactcgaaacggtttctaaagaacgagctgaaatcatcaatggaactcacccggtccttctcgacgcggccgccaccagcacgatcgccactatcacaaccaacatgaacaatgccaacaaccaagccggattttccaatacccaaacgacccctcggttgagaaatgatcgagaacgaaccagtctggaacacgttagcgcttcagggcaagcatttcgagccaacgttcgacctatgaacccttccggtggaagagggatcggtaacggatatggcccgcctgtcatagggcctgtggcccctcctgtgacctcgttaggtccatctgtttcggctccatcgatctcaacagctaaaacgtataggcctttcgggacgggttcgaccggaaatcttcctcagttgtctcaacaacatccgtttcccatatcgtctacatcggcgattaactcttcccaagcgaccgtccctccattccgaccccatggtcctcctcagacatatcaattcaatcactcttcgacgccgtttgggctgcacccaccgcacaacaatacaacctctgggtcaaattctcaatcttctctctcttctcttggagaggcctccaacggattcccggctaccttgaatgttcacgggagaagacgtgtctcggggcctgataaccagggcactttcaacccgaatccgaacgaatcccaaccaccatttactttgaacggacatccctcctccgggacagcgcccatcgccgtctcttccgctctcaattctgcatcaaatgctactttccctcctctgccttcccaaagagaaggtcattctccatcaccatccccttcgatctctcacgctcagcttcatcattcgccttctctggctgacatcgtaacgaagggtgcgacatcggcaggttcaactcatcagcaccatcatctatatcatctatatcctaatccaaagagtaatcagcaccatccattttcgacaaagtcctctccttctgtacccaaagtatctccttctccaccaccgtctatgacagcaaatgcaacaacagctttcccaataaacagagttcagcaagctcaagaagacttcccaccactatcaccggtcatgtcgacgaatccacctagtagaagacaatcgagttcttcggcgattgaagcattactaccgactggtccggttatggagtctcgctaaacggatctgggtgaccgaacgtttattgtaaaaggggttttatgagcacgacttttttctctattctcgctcgtagtttccgagtatcaacagagcaagacaatataaaggaaacgaatcgttgtctttgatgaaagaggattttgaaatcatggtgcaggcacatcagataatgcctctacttgctatgctctttcaagatatcttaagaactcttttgtaggtaattcgcccagattttccctagagatttttgtttgcttgtttttgataaagaagcggcatatatagaaacgaccccaaaaccagaggtaaaagatacaaactgcttatgagaaccctgtaatcaaacaactctgtaaagagtcagtcaatatggtcaaagaaccgcaatccataggaaaagctcaacgaaagccccaaaagcaaggaaaaaaagatggatggaaaagaggtttttgttctcagacagaaaatagatccacaaagatgattcggtagtctaacatgttttggtcgaaccctttcggattcggtacatcaacgagcaaaagtatgcatgcaggaggagggagagggtgaagaagaaagataaaaggagacattgatacgaacctgaaagagattgcgaaaacgattcgatccgagccgagccggcaggatgaacgaaaaagacgagaagaaattgcagaccaccaattgctctttttgtagttttcaagagaaggtggaagtaaaatcttgattctccgtcacgtgatgtatgaaacacagcttgatttgttcctaactgtaatggcaggagcaagtgttactttgaaggggaaataatactgtgtacgaatcatcatcagtcagcatggacacagctcagcgagaactcaaaagtaagtaccatgaacaagtgacatttgagacaaacaaggatcaaagatggaaacagagaatataaggaatatatcgatagacggacactacatagagaaaaaagcacattagaaagtactacacaaaactagatatagaaagatagaagatataatgttcttgagattcgagaagagaaatggtggcgcacgcgcgtacacatacttccacgcatacacgccacaaattaaggagagcgagtccaagaccggatgatctattggtttagccattgacctagatcaaaaagaattctcacatgaagtgatagagggaaggtagaagagagaagtaaaagagcgaattgtcaacaaatcactcgttatcgccctcctcttccacagccttcatctctatcaatcgtctgcgcatcgccttctccgtcttcgtaggaggaacctttcgagatatggcggcagcaacctgtttcaagaacacaaaaatggtgagctcgagtagaaaatatattttgaaaatgagaagaaagacacaccaaggcgcaaagacctccgaatcggagaacccaaacaactccgtttgggttttcgccatcctcaggcatgttttgatctgagcctccaggaggggacggagcaggatgctgggcagcggctacaactcggaagatcaactaacgttgtgaaaatacgcggacgatttagcttcacctttttgatatgcacatcgctcagaagagaaccccacgaaagacctaccgaagataccagagcgacgacaaactgtgggaacacgaccgacaaattatgcacacccaagatcgaacccgtcgcgaccggtccttttgcttcactttccatccggttctctccgtcttcatcgtcgtgttcagtcgtatctatcatggacttgcttctctttaacaaggacgatcgctcattcggtcggtttggaatgaggaacgtgctagaagccctctgaggggcttggacgagaccggcagtagtggcagatcgtccatgcgttcggagataccgaggaacaacgggctcctcctgagttcgagcggtgacgacaggtttatccttaacctcctccatctctttgaggtactggaacagcaaataatggacgacaatcagtgatccagtaacatcactcgaggatacagcctggagcgtatcatacctccataagcaatctgaccaaagaaaggcaaaagaaattttgttaaccgacgtctagatactgggtctcagtaagcacagtttaaacttacgagaaggggacccaggccgcaacagcccagcaggctccgataagtgcaatgataacggtagcgccccaaacctcggtcacaaggaaggtagcaagcctatgtgttaaagagatggttgattaatcatgtgattcaggcacggaagcgaagaacataggaatgggcgtacatcatcacagcaaaaagaattaaagcggcagtccagatattccgtaacatgaaaggcactatattccactcagagatcagaatgcttgttttacatgcaacgcatcgttaatcgtcaaaaataagaagaagaacatacagataggtagtttgacaggttttttgtctctctttgcttcctctttccatcccttgaccatttctttgatttttcggaactccttctcttcaggagtctcgtcttcatctccatcttccaacaaatctggagcgagaagccttcgatctcgatcagcgaggtaaggaaggattgtgccagcaattaccgcgactgttcggagaaaatagatagcaaggtccacaaggtccaaagaagaacatcagaaggcatttactttcaggaacagagagattagcgcaccgatagaatagaatagcattgcaagagaaccagctctggcctgttcgtctctagtcttatgtcgttgagagttagccataacctcggccacccaagtggttccgtagaacaagaaggggaaccaggacatctatcacccagataatcaactcaaaaatatcaggacgtcatgtaccattactgacaatagggccaagaacttacaaaggcaaagacctggacatagcagactcgtcggatgggtcgaggaagatggataattgagtcatagatgttgtacgcgatatctctcactcctctgaagagatcaaaggcagaagagtcccgtcagaaacagactcaattgatagctactatgatagaagctcatagagacgcaacacttacccaggtcggacgccgaattctttttctcgggccgtctcgtgagtagtagcgcacgtgacccaaacagttaaacctaggatcaaaatgatgatcacacagaactttctgaaattgcctccacccagccaggcaagcagagggaaagtagagaggtccaagaagccgagggtgaaaccgagaatgtttcccatgtgggtcattcggccaatccaagcgttggcagaggacaattgttcagcaggagtaacatcgaggaccaagtttcgaagagatgcttgctgcaaaagtcacaaaacagagaatgagcaagatctatagagtcaaaaaggtgatagaaaggtatacacttatatacgtatacgtgaacttaccactgcattgacagcaaaatccagcagataaaacgcagcgatagcaattccaatactccaattcttgctaaccttgatccatttagggtcccagtctccctcaccagcgccgactatgtcagcagcaagtgcgcctagaggccgggcataggccaaagcgagcgtggcgatgatcatcacgatggtagccaatacgacccaatatctacgtcgatatttggagtaggatgcatcggagatagcacctgaatggagatgatatcaataaccatgtgatgttaggcgggtatattcctctcgagtatttgtaccaaagaaagagtattcgaaccaatcaagggttgagtaataagtccagaaattgggcccgcgagccagacgagggaagtg

SEQ ID NO: 2690 - DNA, 1131 bp, Xanthophyllomyces dendrorhous
tcgattaaacccaaggcctgataagacaagagcagacctggtcagaatcggtcgtcagcttagttgggtcaaagttgaagggcttactaggagctcttgattgccgaacctatcaaaattcagcccagctcaattttattaaaatcaaattcgaaagacgggaagagggaagaataagatacgcaccccatctcaagacaccatgcgactatgcaataagagaatgtacacattgttggtgagtagttgacgacattgaagtcgacagtcacttcagaacttactctgagcacctcccattccaagagtcatggtaatctacgtacgtagagaggaggcgggataataaaaagaaaaagaggcggggcacatcacattcagccaacatcatttataacagcgcctggtcaatcggaccagttcaagacttgacgcctatcaagaatgagtcgttgtgaacggatgaaagaatgaatggacgtaccatattgagcaaagtgagcttgtgaggaacctttttggattctgatgacctattgccaccggggcctctctcaacatcttgcccctggccgtatgaacctcgtctggagctagcagcctggttgtgcccgccctcctgactccatagatgccagccgttctttcgatcgcccttgtctggctctttccctttctgggctttccgaagagaagacagagaggtatatgtatgaggagagctaacgaggttaccctcggaaggcgacggtccggcggatgggatttctccaggagcgatgatcgaaagtttcttctttgacgacggatcgacggacggatcggacattgaattatctgtgtgcgtatgtgtgtggaggtagaggtaaaggtgggtgtgcgggtgatgtatctgcccttgataatatgcctgctcttgctgtcggtctaccttctttggatctaccgatgggaagccaagggaaaacttgatgcgactttgttaagctggacaattcctatcggggctgtcggtgaatgaagccaatctggggacgcacaacaacgttcgggtctgcctgcctactgccttggttgattacgtcactttgatcaccatttggtaaattatggggttgggcgggtcatatt

SEQ ID NO: 2691 - DNA, 718 bp, Xanthophyllomyces dendrorhous
ggtcatatttgggggaatttgggtaaacattcggtatccctgaacgccttcttaagcagaatgaagacaccatctccttcggtcagtcttccagataatcatgatcagttgatgtattcctttatggcttggacgatggacgctagacatgtttcatccttatctctgctaacatttgtaagggtcctcagtttcaaatagttcctgaatgtcgtgtgcgctctgtttcttgtttctcctatttgcgtcccttttggtagatgttaagcaagaacctttgtttggaaaactcataagatcgcccttcaaagaattccgggctactctttcttaacccatcgttccagtttttccctcctttaccctctcctctagaagttcaagctttctccatatacacatatttcacctccaccgatgagctctctcttcttagtaagtctattggcagcaggtactgccaccgcgcatgtcgctctctgggatccaggtatgttcggatgtccttttgaatgatttcctcggaaggccgagtctgacatttggagtgtttcgattccgttcacacaaggaatgtatggtgtaagtgcactttactttttgcctttttcttctggctaatgctgacgaaccctactgtactccttcctacctgggcagttcaacggatcaaataacgcgtgcgctttgctctcttttagattttgttcctctaatt

SEQ ID NO: 2692 - DNA, 20586 bp, Xanthophyllomyces dendrorhous
cctctaattaatagcgcttgctcacctatattcaacattttatactcgccgtttcagtgtggcgtgagcaggtgttttctttagtattccttccgctcttctccaagtgaccgtccgttgaactctgtccgttctttcgaactcccagaaattacgacaacagagatcccagccagcctctccggctcgatcatgcgctaattacgagcgaatggtttggtcagtaagttctccccgtttagtggactcactgccagatctttctataggattgacgactctatctcgttttctgtatttttttgcgccgtcattcagcggatttcaacatctacctccaaaggatggtgacttcatgatagtgcgctttgtttttctcgcgactctttttttcgttttggctctcatgctgtgtacaatgactgaccgatggatgtgcgtgacggatctggagaacagcttcctgctggcgggacttatcatggtgagccattctatatcctatctatgatatattgaggagtcacaacattcaatcttaccaaatccatatatcttggcctttccatcaggtgaagtgtcttgtatccgatctcaaacaagctatgggcgacccggtgccacggatgatcttcccgaatatgcgtgcaaagaagttgactgtcagttacgcttcagtcgttttcccagctatctttcaacttgggttctaccctctaactcgactaaacgccttattttcatcagctctgcatacgatcttgaatctaggggaggagactgattcaaagtggcttggtggatggtgtgtttccatctgtcacctcatgtttcgtcttcttattctgacgttttgttttgtatagcgcactggccatcgcctatgaatcagatgtcacaaaggtaaagcctgaggattttgtcgtgctttgtaagtcttgttaacattttcggaagcctctcctcacaagattgagcttagtatgggcttaatgcattgggtgttctagctgttaatcatgaatgtgtctggaagagaaaggtaaattttgagattccagaggatatacctgcttggtatgtgtacatcttcaatgggtcttggactttgattccataacaactgagaactaaacttggattgttctgaattcttagtcctcctggaggctgccactgtacatggaactggatcgtaagctatatgctctcaaaactataaaactcgtgtattcattgcgcgacctcaaccaacatcgatcttattcccattgttcttcacagcatgaggctggtcacaagaatgctgctggaagagaagaaggatatccgttcgaaatggtgagactcttcgaccgtcacgatattagtgtatcgattattatatagtctgggctgatgaaggagtggatggccttgatgggagcgcacagtataatcttctctgtgagtagtttttctcatctcgagagccactcatgagacgtagattaagctgaatgtcgaaattcgaacggggacatgataatttctagatcgatgcaacatctcaggtgcctccactgagacaacccatactgtaggcgctccccaagtacctgtggagtgtttggacgattcatctcgatgcatcaaaggagcgaagatgccgatgtatttcgctcaggcagaggggtataacattgtcacatccgtttgagtcttctctgtgtttttctcttcattattttgggcgcgcgtcctgatctgacaagtcctgtttggtattttggtgagatacagaatcctccattgtacaacgacatgtaagatattcctctcttttcctgtcctatcctctcttcttttcttcttaggtttatctgctgaactgaatatctatacttgttctatattttaccgcaggatgggattttctgatggcgctcaagatgatattcttatcgagacgccagcgaagtgtgagcctgcttctccacttttagccgcagatgatgatgtctggcagataataatatctttctctttaatcgaactcagccaagcgatctgctacacaggaaatggacctgattgagagaaagatcagacatcacaagagatcacctggtcgcctgtaattgtgttgtctcttgggatgatctctctagttgacattctctacttctttgtttgcacatctcgccttgcctttctgttttctctcttcgttcggaccgatacccaacccagcctgacatcatgctcttcaataccatcacctcactgttctcgtctttataactttactgaacagtctatacttcttctattatctcatccatgttcttgcgtcctctcctttcctcgagtgagcttaaatagaaaaagagagcgataagagatttttaggggggtcggcaatcgaagacatcccgcggatttagccggacggtcgtgtttctttttctctctccttctttctttttaccatcatcaccaccatctttccgtctcaacaatctttgccacacctacataaacccgagttttcttccttatataaattgatagacatgcctcgattggcccacaaagtatgctcctcgctcactcatttctggctccgcaccttcattctcttgaagagggtcgaggcgagatgatgttcctgatatattcaagtttagcgtggctgaaaatcgcaatctcgtttatatccttctttccttctgtctgattgctctaggttgctctgcttaccgtaggttgtttctctctgatacatacgacatcaagttgtgtttcatgtcagcgatgtcatgtttaaatctgcatggtcttgcccccttcctctcattattgctttctagggggctggttccggaattggtctcgagaccgccttgttgtttgcttcagagggggcatcaattgctcttgccgatatcaactagtcagtctctcttcttgcctctggtttgtttttccttctttcttctttgctgaacgaactgacgctgctccttccttctccatctgttttctcggtttaaacatctgtttgaaatcaacagcgccgctgtcgaggctacccagaagctcatccaagaaaagtacccggaagtcaatacttggcctgtcaagtgcgatgttggaaaagagtctgatattcaggctgccgtcgagggagctgtggagaagttcggaaggttggatatcatggtaagttcttctttccaggatttccttgtcctctgtctttgtcgttcatgggtttttattgatcgactatgtgtccttgtatctgtttgggactacttaacacggtctattgtagttcaatgtcagtatagcatatcccgttttttttaccatctacccaaagagctgctacttaccgtcatctaatctattgaaacgatcagaatgccggtatcatgcactctcaggacgacaacgcccttaatactgaggagcgtatctgggatctcacccagcagatcaacgtgaagggtgtctggtggggttgcaagcacgctatcatcgctagttagttcttccttctgtgcgttcttcttatgatctgcattacgcaagctgactccgatcgatcacaatgtcggaaatagtgcgcaagaaccctacggacgagtctaagaagttgcacgtcggaggatcggtcatcaacactgcttctttcgtcgctttgctgggtgccgctactcctcagattgcttgtgagttacattttgatgtaatttgtcttgcagtgtcgctttaagttcgatgctcaaaagaactgctcaactctgcctttacagacactgcttccaaggtacgactttgatcgttttttttttcgatccttccgttcttctacgagctcatcgaattatttttgatctgcttttggacagggtgctgttcttgctatgactcgagagttggccgctgtccacgcccgagagggtatccgattcaattctctttgccctggccctatccgaacccgtatgtctccatctctcttgtttttttattttctgttatgagcttctccttgcaagctatatgccctagctttggtatctaagaaacggtaacagctaaacattttgttttgttttgcctcttcgaaattgaattttctttgtttagctctcttgatggacttccttgatacccccgagaagaaagagcgacgattggttggtttttctactctgataatttggtggacgatggataccttctgaagtgtttgagttgcgcgatgatctacaggtccatgttcctatgggcaggtttggagaggctatcgagcaggctaacgccgttcttttctgtaagtctcagtcctcttatctctgtcgtcactattgagatcaatgagcaacagactcggtcaaaatggatactatcatcaagccaaacctaacggatctgtctttgcgattttgaatatgatctatagtggcttcggatgagtcgagctttattaccggaacggactttgctgtcgacggtggagtctcctctgcttatgtcgtacgttgttgtcctttgttcttgtcttgatggtcgcgagaactcacaagagaatgctggatttcttctctttccagactcctcttggcgagcctgtgttgccccctcctaagggactcaccggaaactaagagtaagggtggatttttgagaagtactcaatgaaaaggaattgtcactttccttcatttcgagcggacgtatgtttacggttatataggaaacaaatagattgatctatctgatggggtttgtctgtattgagttttgttctcgattttcttggtctcaagtgaattccttgtgtcttctttcgcgctgtcttgttctacgatttcttggtttgaaaatcgagtttgggtacatagaatttgacaacgagtggtaaagatgcaacaacgaaactaacatcggaagaacgatggttgaatcaatagacgagaggtccaaatgacatggaaaggaaacatagggatttaaccaactctgataccgagagcgagacctcctaggaaagtcgctcgttgttggaagtccctacaggtataacaagaaagacaagccataaggttgagtttcatgactggaaagaaggatatttgtgttgggaacgaaacgggaaggaaaaaagagcctaccgagtcaggaaatcagtgatccagttccaaagtcttgtcaccgtcaaaacacccttctccccgttggaggtcgtaagactgtcgtatcgactgccgatcttcgtccagtttactttgacaaggttgatcgaattcaagtacttttgtgtttcgttgttcaaagaggatagtcacgaagtaagacagatatccttccgagattctgttctcgaattacatgatatcagaagaggacatacctggaggaagacaaaggcgccaccgagaatgaaagcgatgagcttcgcgcccttctttatgaacacacccgcgcaaattccacagacggcaccgaaaccgagttcatatggattcacgatcgaagccggttcaggccgagaaggtggaggcggaggaacgacgggagctgcttcacgtattatcgatttgtttggtttttttttaccatgataaatagtggagcgatatccagtttgaaaagaagtgaccgtacttagtcaacagtgatgccacatcactcttttttttttagccctcttcctcttcttcatttgtcttacttctcgaaaggtaacaaagaggaaggaagagggagggaaagagaagacgtacattcacaccacaccttcttcccacctttctctccaccagccgtccaagcgaggttcagccccactaatcccactcccaccatcgttcccttctgccagtttgcccagttgaccttgctctccgtaggattcgcccgggctttcacaagcgcgatcggatccctagatgaaggtctagggggctgtcctcgggctcggatgaaccgggcagcagaaccagaagggggattagagtggattgaccgagtgaggagcgtcgaggggaaggcggccggtctagatttcagagactgaaaggcatgaggaaggagccgttgattaaaagccatgtttgatttgtgaatagaattaggagaaagaaattagggatgcaacaatgtggatagatgttgaagatggatagtacagaaggagcaagaaagagtatagatcggacggaagctggataatgtggagtgacgcgataattcgtttgcttaggtaagcacgatcccagaactaagcatacatctcaccaaggaagactacataataaacctaactagacacacagaccttgagcagagaataagaatgaaagggaaatgactgtatcgaaatgggtatgcaagagagttaactggtctgtcaagttgaatcttacaccaggcatttattctaaaatcacaaggaagtaggtatgggctttttgtgaagaagaagagagaaatgatggaaggaatgaaacgaagccatgtatatgtttagggaagggcgttggtctgatcaagagacgactataagccgaacgactccattcctttgacggcaagctcataaccaaggaatctggattgcagaagcagataatagcagtcgatcagtgtcaagggatatagtagctatcttgatagacaatttactcacgttgcggcatctgtacgagtggagcgaggaaggaggcaagatcaaaaatagaaaatgagggaatcaacaaaagctcgctacgctatcgatccagagcaagtacttgagtgaggaatcatcaagagagcaacgcactagcagggaaagctctgctcatagctggtccgaaccccttccagagcgccttcactccgtcggcagctacaagtttcttggcgcaatccacaaatccagagtatgttccatgaggagccgattggagccgagatttgatagtctatgcaaaagaacaggcgtaagaggaaagaagtcgaaggtcatcaagagaaataattacgtcaggctatgataaaacaacggtagtgaggaaacaagaggatgaagcagaggtcgatgagacgtacgtccggaggaatagcaatcgcccacatagccacaccggccgtgccaccagcaaggatgatagttccaaggttcaactgggacgggtccgagccaacaggagtaagtgccttcttggtcaattcataagcgacgaagtacctgattgagattcgatgattgagccagaggcaattttggcgtttcaagaccaagtcagtacagagcgctatcaaatgaggtcgaaacgtgtaaagaaggaaggagtaggacaaacgcagcacttccaggaccgtctctggccaaggtcgctccagtacctctgaagatagacttgatgcccccctcttgatacagctttctgacaacatcgatcggtcccttgtactgaaccgaagactccccttggcctgcaacctggtgttcatttagagccatattcgagatgcaacgttcatccaaaagaataggtgagtggtactggatgacagtacggacaagacatgagcacgaaactgacctgaagcaggaccttaactctctctgccggaccggtgacaagtgtggttggtatagcagagaagaaaccagcaaaggcgagttggctaacagttaacggtgcggtcggatcgttcgatgcattcggcaagaacgaccgagaaagcttttttcccaaatcgtatgaccagaaggagagcgcgaagatcggggtcactcctactatcggaggtcccattcctcgatacattctttgagatcaaatacatgagaaacagttcgaagaggattatgagtaggctcgcctttatgtctttaggtacctttgagggagggaaaaggagctacgaaccctcgaactccatctctggcgacagtcttttttactacgtcgatcgctccagtatacgttcctggagcggccgtttgcaatctcgtttttgtgaggtcaaacggatgtcctgaaacgtgagcaaaccgcgtggcagtaataaaggaaacagacagatggttcccagtattagtttcatattgcatatagtcgactctactctctatatcgaccatctctacgatctcctgttctagagacaaacgaccagacaccagacgcgagcaataaaaagatggtaatctgaccgaggctcagttcaaggacgtaccaactagaacagcgctcattccacctacaccaccggccacaaacgcctttgctcctcccgagtctttcttctcctcttgaacaaactcctgtgcgccgtggacgacggtgtctttaagttctttgatctcttctttgttcatcggtacgggtatctttggtggagtgtacagaaggtaactgaataacggcggtatcttgggcaactgttagaaagaagaaaggcttggtcggtgagggatgcttcgtctttatagtgagtgcttgtgtgttctctggatgtttgctcgtctcgtccattcggataagttcggaagagcaaataagcgggtggacccggttcattaaatcgtcatcacgtggtatgttacgtaaagttatgctatgcatattttggcttgaattttctctcttctctacacatctattgatattgaaggcacattatattcgaacagcatacaagcaaacaatacaagaaacacctgtaagcaatggacagagtacacctggttagcaaactcaagtttctgattaattaggaacacggtgtggatatcatcgaaaagaatcagaagccgtcgttgtaatctttccggccactcccaagcaactcctcccgaacccttcagtatcctagcctccctgtacaacataaacagacaggaagacaaatgtctcaagaatgaactgacagaaagtctgcacaagctatcaacataagccaaatctgtccgccatgaagtacaggtttgatgaggatcagatccaaaaagggactcccaacccaacaccaacagaacgttggtgagaggcgaattaccaacttctccacaaggaagaagcctgaaaggggaagtgagggagagtgggtaggaatcagagaatggattgactgggttacatcccgtggaagggtggaggtgcatagaaagagccggatgggcatcatactcacactattcaacaggcaagtcgatctaataaacaaaaaacaaagtcagtatgtgaattcattcaacatgcgacgagagagacaggacgacgtgatttcaagaatcagataagtgtttttggtataaagtgtttgtcttcaacttgagccttgcgagcctgtccttgcggacatattgcagaagcagaactgattgttcatcacatagaaagaaatcacgtcgtcttcggaaggatgaaaagaatttaaatcttacctttgggtggtaatggtagatagatttaatgaagctagctgttgaaaagtgatatgaaggcaaaagttcaaatagatctattttcaccgagcccaacgaaaacaattaatcttagtcagtaaacatagttcacaaaaaaagagaagatcagtcgattcatggaatgataggtgggtagggtggaaggtcagttggtgatgcatgttgcgagatcgctcatgtatgtcacgtaaacgcgtttggataggtatcatcaagccagggtagagaaaggattgggagaattgtggtatggtatgacgtgagatcaatcaaatcgttcacttaccagtaggcgaattcacgcatgccctcatccatgcaatcccaacagatgaccatcagccagactttgtagatagaggagagaggagaagagagagatgaatatgagagagagacatcaagaaatatccgaaatttaggagaatcgaccgtctgacttttcttgttccttcgtgtgacttttcttctagctcgagccgatttgccggcataaaacccaggcgtcacattcgtcgtctctggatttgacctttctccaacaccggctgcatctctttcaaacaatcagccggtctttccatctcaaggtgagtcttaatgcattgaacctctccaatcattcccaaacccttccacgctcctgcccaaagacgacaaacaaaactttgacaagcatatgtctgacctccttctggagatgaggatcaagttatttcttcaactgagggcccatcctacaccacctatcgtctccaaccactgtttctttaacaaacaatatctcgttaagctgtataaaaaagcagagttgactgacattcttggtaatggtttttgctcgtttgatctccgattcaattagatcacgctttctttgtatctgttgctgtatgaatgacataacaagagaacctcgcgtatattggtgtgtacgaaaacagagaaaagattccattaataatttagatagaccaatctattaacaaaacaaaaacaaactcggaaacatcgcaaacattcgttgaaaagacggcattcagcagattgctatagcttctcatctccaattttatcctcgtcgacatcaataggattatcaaatgacattccagccatgttaggggtaaatgttgtactatgcgtcttgctttctgagaacccagccgtcactgggtctggttggttcatcgcagccgccatctttcgacgagattgtgttctgtttatccccgtgtattcgaacaagtataagagattagaaagtgttcatcatggaaagacatcagaagaaagagaacaactgacaaggcgagagcgatcgactcggccgctcgaagtccaagatcgtaataattatcgttcccactgggagagactacagagcatgagtgctggtcaggtttcatgacaagttctatgggggaggaagagagaagaagaggaaatgaggggccatacacatttctgtgtgcgcgtcaatctcgccttttacgatgttgttcttagcagacacccagtaaggcttcgtaggccctttcggttggggcaagatacaaaacgtcctggggagaataaattgcggatcggacgctaattgagtatagaaactttattcgtttggacaagatcaagatctgttcagcctttgatgtagtcgctttcttgcgagaataaagaaaacaaaaattcgtactttctgaacaagattccgtcctcatgaacgagctcatcaagactctcaagtctcagtcgcatcgtttctccgtcccataagtttcccacaaactggagatgatcctgtgtaaacccgtgagcagaggtagataaatccgccagacgtcagtacaggagagagcgagagtatgtccacacgagcacgcgcacgagtgcaagtgtgagcatatgtatatatgtgtgcgcgcctcacctgagcccagcccatgccgagtccgagatcgtctctcttgtaataagctccagcagcaccagcagcgacagcggctgctcctaatccatacaccaatggcactcctttcgtaaaccttgaagcccagcctttagaggtagccgccgtcgtcgtcgtcgtgggcgtttcgtctatatggggcgccggttgggaaacggtcgatcgggtcgttggcctagaaccggtttgttctttcgatgatgatgttgtcgtcgccgttgtagtaggaataggaccatgagtagcgctagaagtactagtagagccgatagggttagaagcattggtaccagtggtaggggaggaagaccatgggaagatggagctggcgctggcaaagagggaaggcgcaatgagccctatagtagacgcgatgtctttggcggcttggacgttgctggctgctttggtgaatgtgtacttaaacacgttgggatgaaggcctaggtactaaattccgttccccaatcataggtttgtttcgttatttctcttttgttcgacttcagacatgattaaagagccttcatccaaagaggaggccaactagaaaggatacgtacaggcgtgtcaaaagcgatgagaccgataactcggggccagagaaagtccttgacgttttgcctagaggaagcgatatttcgaagggcatcggctgctaaaataccacccatactgtgtccacaaaggatgatgcttgctttaccagcaccgccaaacgcgttctccttttcgacagtgattgtggcgagccagtcagagaatcgttcgaccgcgacggcctggaatgagagaaaaggtcgattagttaccgggggcgatcgtcaatttgagcatgtgtttacaagcattaatagcacgatgaaactctcactagtacacctctggtctatgaagacgggaagagatagaagggtgtgtttgagatatatatttagtaaccgtccgcaaaaggacgcgtctgaagttgtgcagagaaagaggaccgacctcccattgtggaaacaccacgctctccaccttcacgtccttttgagtctctgtaagtatgtggtttatccgttcctatttagtaggtttgatcataaaataagaatatgagaaccgaaagtgagagtagcttgtcagcagcgatcaagagaggcagtggaatgcgatactagattggccatcacacacagacgcgagagagcgcaacttacaggaaaccgtttgaacgtggtatcatctcctttgaacccatggagatatactatgagtagtagctcgctcatcgtgtaggcgtaagtggatggttatcgatgaacgttagtgactgtatgtgtatatgtgtgtgtgtgtgaattggaatgagagtgaacacaagagatgacgacaatcgcggttagtaaccgggtttcaccttgtatctggatttaaccctaactacacagaatcagcaagagtttccatccggtagaattcccagcatacattcacccaccaaggtaaccagccatcaaagcaaactacccatcaaggcaatcacaatgcaggtcgattcaaacgagcaggatgctagtgaacctagaacaccgcctagagattcaccgtttttgatcagaacattcgttcacccacagtcgttccaccccgttcgcttgtttgaagatcgaaagatcccagtacgggatgaataccagctttacgcgtttgagaacacatcgtttggggaactcctagagatgctcgtgttgaaccttccggaaaagttaaagccctctactgccaagtatgcacttcggtgagtgggtgttttctcttcttttttggtgttttctctcctttcctatgggtactagatgggtggctgactgtgtctgctttcgaaatagaatgatctggccggataacaagcttcgacgtttctcctccaaagatcttcagacaatctccttacgggcgttgcgagaacgggattcttctcttgatcggtcagtctggttcttggttcaccttttggttctctactctttctgataccaatctgatggcatacatgctttttcatctatatctgcccaccagaacgttacaaggcgcgaattttgttcctggatcttaccttcttgtctctgttgtcaatcctgatctcgcatctggttcctccgctcatcccggccctggtcccggacccggtcttgcttctcggccgcctcctcctcatcttgccacttcagctcgacctggtcagggccaagtaccatctcgagagtttgcaaaccaccaccccgaacgtgattcgaactcaggtggcgcgtggacgagaggttcgattcgaggagcagctgctcggttcggacctcgtccaggatcgggtcgaggcgaccatggaccaggcggacccgcttccactaatggatggggagctcgaggcggcagaggtggaggccgaggaactgggaacggaaacggaggtggaagagagtttggaaacggctggacagacaggaaccgaaggagagagtctcccccacccagatctgaatccggctggggaaacagaggcagggatgtcgacaaaccgagagacgatgatagacagaggagcccacccagaccaggacggagagcgagcccgtcttatgaggcttggaattgaataggaagaaaacaaaatactatgagctttttatctcgttgtagtatcctctctgttgtggctgagaagatccgagttcttttcgacacctacaaagttccagagagagtgtaatgtttatctttatgctttgacgaccatttaacatgacctaaacaagatgatgcgatgtcagttgactgagagacaacgaaagatagagtcgatgccgatcgacgagtctggtggtatttgacgcgttctctcgttgctcatcattcacactctatctttcatcgtccatcttccttggatctacgaccatcagaagcgtatcctttccagaggtcattcaatatgtccgatcctctctctccgacggtaacgtttggtcgaatggtgaaccccattcagccacctccttggccgtcgagtcctcatcaaccggcagatcttccagcacatctatcgccttcttcctccactagccgatcgttctctcaacaacagtcctaccgtccccaacaggaaaacgcccatcaacccccatcattgcaaagaaacagaccttcatccaactcaatctctaaccattcgtcaggatttgagaaagaaagacaggtgtacggacaaccaagtcaatccttgatgtcgcccgacgcgctgatggatgggaaacgggcggataggctgagtccgtttctgagggtcaaaatcactgggatggagcgaaacaggaaagaccttctcatccggttcgatgcctcggttagtatgatcatcattcatgccgaatcttggtctttcatagaataaggatcagtattatgttctgtgatggacccctccagatccaatgctgatcctcccattgacaatattcttatcctgccatctctaacctttcggactgttatgaacgatagaccaacctcagccacttcaacaggaatctatataagaatatgcagcgaagctatgtcgagttcaggctatttgccgatcaactcgccatcggaaaccctcaaagtaggtatcccaaaaacctcctttaaacctcctgcaccgtagggaccattcctcttcaaagaactaaatccgctcgctctttactgtttggccgtttcaagcaattgtggccgcccttccgctacctcaaagctcagctgtgacagacgaagaaggtatgttcccctctgtttgcgtctctgtatgagagacagctaaccttttatcccaaactcctcgcggtactatgttcttggtgaaatatagacgatagactcgtgcgcatcgctcttcaaagatggttctcccatgtgtgtgaggatacggtgctcctccaggatgaagaactccggtcgttcatcgagtctgacttcggcgtatgttctgtcgacttctattcctttccccctttgatttcttccgcattcatcaaatgggttctgacaatcgaacgttctacgcgattgtgtatacagtataaccccgttcctcgagcacgtagaaaggctccttcaactttcccaattcagctacctctgttgggtaaaggaccgcacgatgaagacaaagaactagcgacggcaaagtcagagatcgcaaagctagatactcaatttgccgaggcggccaaagcttcagataagctttcaaagtcgaggaaaagtcggtctcttcttgctcctcctcttcttgatattgtaggaaatgcagacgattaatctgcagtaattctctacagaccttgctgcttccgaggtcgattttggaaccaagctcgtcacgtccgccaccacagaacaggttccttcgctgagcgcggcgttgcggaagttgggacgagctatggatgcgatcgctgggattcaacacgttcaggtatgcaacaatatcattcttgggaggaggttatgtctcgattgagatgttgctgactgtagaaaccaattctatctcttgggtacaaatcaggccgtgaatgagagtgtggtgattggagacacgctaggctatcaatccttgaatgctaggtctgctcgagtatgttctcttcatcgcatctgtggtggcttgctctctcgatctagtttcttatcgaggagccgttattcatcttgctgtcaacggagaacaggaaaccttatctcaacgaactattcttctggaggaatgttcaacggctgcgaagatcacaatcaccaaacgcagggcagtagagcgcatgaaaggttcttcaagtattgcttctagtaaggtcgacgacgccattgccgagttaaatgaagtgcggtttttgctcttttctcttctctagccgttattgcgaaattacaaacgatgtagtagaactaatccaatcatccattgggattgtcttctcttttgttataggctaaagaagcagaagaagtcatttcaactcgactggacaacatctcaaagaatctccatcgatctctacagactcattcccgtcaagctcacgaagacatcgctgtcgcactgctggaacacgctcggatgaacgttctgtgtgaacgatcgattcttaaagagctagaggcgcttcgatcggatatcagcgggatttcaaacactggatccagaaagacggctgtgtctattggcggaggtcttccatcgactacagcgccgtcgtcgagtaatgtgaacaaggcactacctgttccggatcgacagtcgttacctccaacccgatcgtgggttgaacaacccaaaccggttccatccggttctgctccctctttctcgtcacctcaatctggttcaacaggacatccttcgttagggccttccgggatgcatcctaactacccacaggcacaagcatcagtatacgccggaaacaacccctcttaccattcttcacgccccctgatgtacaataacaacaatagcaccaatagtaacacgtcttactaccctcagcaacagcaacagcagcaacagcaacagcagcagcgacaatactcgcaacgtcagcctgatttgacacaatcgatgtacaatcctcctctgacaggcacctcgtttgtcgctcccccacgaaacggtacaactcaatccgcgttctactcaaacccaaacctaaatccagcttcttcttctcgtagtggcggtggtccagggggaggagcagacccattgtcaggaggaaacggacaggtgtacagtagtgcgaatccgaatcctcgattagaagaccgagggacaggtggtagtgccattggtgggcaaggtatcacacagagtttctaccagccctcgtataaccggccaggcgtaggcgcagggccaggagggatcccaccgaggagaaagttggatccgagggaagcggctagacagttggctaatggattctaacaagaggctaagaacctatcagagtatatctatgtctgtgtctatgtgtgtgatgggttgaggtgaggctggtgtgttagacgcacagatgggagtctcttgcaaaccttatatctgagtattttcatgaacttatacgacttatggaaaggaaagaggagaagattcatttgttcaaaaacggatcgaggtagaccatcatgatattctcaaacggcttgttctacatgaattgaccatagccaaggagagaatataaaaagaaaggagagactcaagaggcgaaagcgtctttgagaacaattgtcatatctttgtcaagatttgccactctcttaacgacatccagaaggaatgccttgttcgctgctgtctgttctgggtttgttgatttgagactctgttcgaggaaaaaaaagaacacgagcgcagtagagaaagaaaaagaaaagggaaggagacagcaatttgagtatagattcttcgatggatcgcgtgtgggagagaggaaagagtctcacctttttgaaatgactgatcaactggccgatactaggtctcgttctcttcagataagcaatcacctgagcttccttcggtccggtcgagggtaagctagatacacgctcggacccatcgacccttggcttctttgttgcttccccgttgcccaatccagatggtccgagactctgaccagaagagtttgatccgtcagattcaccttttcgtttgttcgcaccagacggaacgggtgatcgactacgctccctttcgagacttctctccctgctaacatctctacttcgagaagagttttgttttctgttgggtgttgttgctcgatgagcgaggaaggccgctccgctcggtagaggtgagcctgatcgagaagatgtcgtcgtcggcccgctggcactgttcccgacggtggaattgtgacgggtactggcagtcgagccgggtcgactgggcggagggggagggacgtgcatgccgtggatcatggttactggtggtcctccgttcgaaggatttgtcaaaggattaggtacaaccggttcctcatccgacgattgagattcctccttatcgtttgaaacagggaggaagacaaggcaaacaaataaaaagggttgagcatctggataaacatttaaacacgcgaaagcagaagagaaggaagagaaaaaactcacagaactagcgtaagggtttctgccatcgtcatcctcatcatcactatcgtccagacctctacgcttcttgtgcttcttgagagccttcttgatcctcttcccgttctcatctaacgcgtcatctccgaacaagtcttcctcatccgagacggcatcgtctccttgggcattaccctgtctgaactcacgttttagccgttcctgaaaagagaaggaaagaaagtagaggaaggatcagatgcagtgtgtataaaaccagaaataattttcggacgaacctcaagctctttgttctcttgctcatccgtttggtcaaattcgatcaagccgtcgtcatcagagaatgcgtcttcgaaatctgcatctccatctccatctgcgccggcctattggggaaaaaaaggaaaagacaaaaacacaaagaaagaaagatcagagattaactttcagccgatccaatctcatacacgcgcacactgtaacgagattgatcagactaaccccatcatcttctcgcctaccacctcttccgtcaccatcgccatcaccgtctccgatctcccaatcttccaaccgaggctccctcttgacagacccgaccatgttggcgttctcaatctttaccactgtggtcgctcgcctgagccaacctgggagggcagtattctcgcgtttgatcctagatgaggtaggaagtgaaattccttggtgaggtgcgttgggttggagggatgagcctgctgaggggttggtagagttgcggtcggacgggatggacgattggattcggtcgtcctcgcgcatcatccatctgccggcatctttccctttaagtgttcgggcgtactatcgcgagaggaaaagcagaaggggaacacatgttgagcacataagtaagaagatactcagaacgaaacaacataaaaagacccacaagttcttcggcctcatctgcagcgagggtgccatactttggtctaggttgaaacttgaaccatcttctaacatcaagcacctcgaactcatccttgtcatcttcgaatacaaacagacagtacctcgcgttctccgccttgtcctccatccggccgacccactcttcggccttatcagcgctctcgacaacccaaggatgccgttcctccctgcgaagtcgaatggtatctgtcgagatcttgaacacctgctttgtctttttcttaaacgccgttttcttgtttctcacggtgtgctgaccgttgcctgatgcgccgtgaggagcgacgagggaggcatcgaatttctgtttcggtggtgcgtatatcggttcaccctgtccgtcgaccataggcttcccttgagcgtcaaacatctgcttgcgttcttcttccgccgaggcggcccctggtgtagatggacccgataccgatgggatggtctgaccggtggaagaagactcttgtttgacctttgctgctgccaatgtgctggaattcgatggctgaccgtcaatgtttccatctctgtcgtccgatagcgtaggagtagcgacagcagcagcagcagcagaagcagaaccaaccgccggaggagatctcgctctaggatcctttctgttcatcttgacaggccgagcgaaccgagtggggtcgatgtcctggagagagttaaatttgatgacgttgaacctggtggagccggatccggcagagacgagtctgtagtcgttgtacgttgccggtggcatcggttctgtctttggttcgagctttggtctggatcgacctggcagtcttgagaacgaggaggatgacgaggacgacgttgacggaaacgatctaggagtcgatgtcggaggcatctcgttcaacgagggctcccgcttgacatgggacatgctgtgtatatatatatgtgtgtgtgtgtgtgtgtgtgtgtgtgtgtgtgt

SEQ ID NO: 2693 - DNA, 11273 bp, Xanthophyllomyces dendrorhous
gtgtgtgtgtgtgtggttgtatgtgatgttggcggtgatgatgatggtgacgatagtgatggtgatgggtcgagtgtgagagaacacacacgactcagatgccaaaagactacaaatcgtctctaatacggcgactacaaagttttgcttccgacaactacaaaaattcataggctagcaatttttccttgctcactcttcccaccgcgttcgttcaactcccgacgaggatccatcctggctcaagacaagatagaccggggcagacagtgaggaagaagaagaagagcataacgaatcgaataacagctagaaggcaagtctctttaacgcgtatctcatctagaccgagagactggtactgtccagtcgtgcgtgtgctaccgctgctgctccttcccgctctttgtccactctcgttcttgacaagggtgagataaccatcgacttggctggttgagccgtagtcctcactctttggcctcaaaccatcatcccacgatggtcgtcgtgatcgatctatcttgttcatgcttggcgcacatctctagtcaggctgatgtactgaccgtgaacatgacgtcctgcccgataccacacgtgtttcttcgttgacctagtagagctgaccgaatccggaggtatcctcttgctcttgttctttctctgttcttcaacgcctgaagatatcagcaaccaataccaaggcaacatcaataccgacagccttcgtctgtcaccatttagaaaagagggaacatgcccgagtctaagaaacggttcgcaatccccgcgttcgtcgattcggctagcgctctgcctccaccgccgccaccatcatcgacggcctcctcttcggtctcgtttctagaaccagcgaagaaaaagagaaagaaggacaagtcagagtccaaagacaaggaaaagaaggacaggaagaaaaagaaaagacgaactcaccacgacaagaatgaccaggtggtagccaagcatcacgccgaccgggaaaacaatggtcaggatgatgatgacgacgaggacgaggacgaccacgaagaccaaggcaacggtaatcaggtccctgtcgagggagacgaaggtgccgctctcgctctcatcggtctatctcaacccgctttggatgacgtgccggacgtatcggatgctcagatggaggatatcctcgccgaggacgacgaagaaggtgaaggtgaaggtgatatgcagaccgtgcatgccgaggaagaacccacagtcgaggctgaagaaggacaagatcactctatcgatccgtccacgcttgaacatcaactcagcggacaagaggaagcggacgaacttcttgagagttaccaacataccttcacttcagacgaagccaccgccctcgccgccgctgtcgccgaggaggaagaaccgtcgatgcaggacattgtatctgccatccagtctcacaatgagcttcatgatgtcgagcatcaagaccaagagcaggatcaagaccaagaacatcaccaagaacatacccacgatgagcatgacccgaacgcggccgctgccgtcgatccttcgctctacgtcgtcgacttctcctccatcatcgccaatgccacctcggactcgaatgtcaaccttatgcgagctcttcaggacctcgatgctgccggtgctcatagtgaagagaccgatgtggctcaccagattcaacagcaacttcttcaacaccatcttcaacacaatctggccacccaccaagatgatccgttgcacgaacatcacgatctccaccacgaagcagactacccagtcggcgtcgaccacgaagcctatggacaggaagagtacgacccccaccaggatcatcatcacatcggtgaccacgaactcgacgaccaacacatccatgaccatcacgaccagatcgacgatcaccaccaccatcatcatcaccttcaccacaatctccatcacgacgttcacagcctgcaccacgaccccacctcgttcgaggctcactaccctgaggcggaagaagatctgtcgctgccatcagctcccaatccggacctcgtcgatcagggtgaggtatctgggcaggcgggcggacggaagttgtcgacgaagaagaaacagcgaggatcaaaggacggagggttggtccaagatccaacaggtcaagattcatctgtcggagaaccagatctcggagccggtccgaccatcgatgatgactctgttggttcaggccaacaaggagcagaatctgaacttggccatcaccccgccgctgtcatcggcctgtctaacggaggcgtcgaacaaaccgggttggagtacacgacagatcagacggttgctgcacaggtcgccggtttccaccatcatgctcagatggaaggccagagcgcggagcacgcgagcatgctctctgacaagtggctcaacgccggccagcttgcaaagctcgtagagaccacaggttcgtcctcctttcgaatttttccaatacttgtcgttatcatagtgtagcattcttcgataacttatcccaggatgcttcttcctcgtatgctgtacaccttctattcagggctgagatacaagaaaggcaagttttctcatgtcgaagaaatcgacctccggaacgccctcgacggatacaaagctgttggtctcctcacatcttttctttccttttcttctttctcggctcgaaagatgactgctcactcggcgctctccatcaacagatgcacaacttggaccatgatcaactcacacagatcgtctttgctaaaggaaagaaagctagagaggccaatgctacattctggagtgaaatcagtatgtataatattttccttccttccagtctcttcgtctttatttgctcaaaatttgtctcttccccctccacccccttttctccttatttgatcagctcggaaagtcgctgagcgaccaatcatcgccgtctatcatcatgtccggcgaatgtgtcatcctcttcggaatcaaggtccttggcgcaaagaagaggacgagaagctcaaggcgtaagtcattcctttcgaaacttgtcatcatccttttgtactagtggggctcactcgtcaagttgttggacctgatactttatcttctacagagctgtggcagaggtcggacagttgtgggaaaaggtggaagggctcgttggccgaatggctggtgattgcagagatcgattcagaaaccatatcgagcataatacaggtggccgagttcgaggtttgtgtccatctttctttctcttctctttccagatcgtttctgatttttcttttctttttgtttctgcatttgctctcctctttcattctctcgttcgcgcatcaggttcgtggacgccccaagaagaagaagaactctcgcgtattatcaaagagatgacgaccgaccagggcaaatcggccgataatgacgtcttctggggagcggtcagcgaaaagatgggctacaaacggagtagacaacaatgtcggattaaatggttcgtcgaagggtttcccttctcttttctactcggcctgcccttcttcttcctactaagtcttctggcaagagagctgatccgaaaggtgttttttttcctttcattttttccttccaatcattcattcgtttgaatttcgattgggaataacacaggcaggacggtctgcacaagaaactgaaatgcaatggaaccaaaccaaaatggtctaagaacgacgcctacatcttgatacagaagtatgttccttcattaagtttcctcaagctttctttgcgtgtcgcggttctgaacgattatgctattatctcttttagagtcgtttctctttcggttcagcacgaaactgagattgaatggagattgttaccagatgaagactgggtaaatgcttttgaacgtctatctcgttcttggtaatttctcgcaagtgttaatctctcctatttcttcttttgttcaaactcagcatctatggtcagggcatatcctcaagaaacggtatctcaagctaaagggagacatcgaaggttcagccgacatgccttatcatggttcgtttcttccttattttccttgttcttaatcccaaccttcacttcatatgtatctttacctgacacccttaaaccggcttcctgtcaatttatatttagaactcattggacacctcgctcaaaagttctctgtcccaccagctgaagatcaccacgttagaatctcaagctctcgaacgagaaagagaccagagtatatcatgcctaacgagttgatcgacgaggacgatcatgagcttgatcatgaacatgagcatgcccacaatcatgagcacccacatgctcatgagcttggtcaacatctacacgagttcgtcctccttttgacttccccccctttcagtttgaatggcttgtttctgtttctggtcgctgatactagacatatggttatccttctctatcttaaaaaaaaaaccaccaaagtgcaacacaataccacctgggtgatggagtggaataccacgacgacggaacaggtggcgtggtcggtggtgtgggtgatgtaggtgttgggggcgtcggcgtgggaggggatgagatgttgatggatccgatggagagaatctcgctggatcaacaaattcaacaacaattggaggaacaaatgggtcagctggaaggaatggatgagtagtccccaatctagacccttccttttctttcttcttcgagaacttttcaatgcgtagatggctttgtatatccttttctgaatactttcactaatttctcttcaatttactcttggcccattggttattcatctcttgaacccatctgagatgcctctttcctattctggcatctctctcttttgttcgatatatgtacgcttcattcaaacggcttcactatcgattaaaaattcaaaacagcaccgtttatcttcaacggaagaagattatggattagaagtattcgataaaatgaaacgaaatccaacatgcagggatctattgagaagaaagcttagagagcggatttgacgttccaatcgtcgaatccaaagtcggttcctgataacgaaaaggtaaccaaagaaaaaaatccgttcagcttttgtatgctcgtcccttctaattattttaagagcaagctgaaaaggaatcttccaggagagaagctaagtcgttgaagggcaggaggaagaaaacgaaccccagtcaggcttgacaaatcgatgttgtttcccaccctttcctgccagttcatccaacacgttcatatcatcctcatcgaattcgaccgtcttcaagttctgctcgatcctagagggtgtgactgatttgggaaggacgacgagtcctcggttaactagatgggaaatccgttttattatcattattgttattattaaacatgtgaagcgcaagatttgagcggacgaagtggcaacgatgagtttttggaaaatctgaacaaaagaatggaggaaaggaggcaggaaacgaacgctggtaagaaatcaacactgtgccgacagacacgtcgtgcttcttggcgatcttgacaatatcagggtcggagagaatcggagagtcggtcgagcctaggggcgaataagattctagaaggatgctgttgagagggggtagaagggaacaagacgaagaatattagacttgatgacatcagatcaaataaatcagagacagacatactcgttgtccttgcagaacttgactaattcatgctgagggttgtaagggtgaagctcaacctatatgaaagataaatatcaaggccttctctgtcagtccaacgatcgcccgcttccatctccccgcacttgttctccaagttatattaaacggaggtggtctgacctggttgcaagctggcttgacagatcctccatcgaggatgatctgcagattcttctgagaccagttcgagacaccgatagccctgcatgccagataaattgaccgtcagagcatgctcacgcaagaaactccatgtatgacacatgtgataaaacatggcgcccatacgtactttgcctttccgctcttgtagaccttctctaaagccttccaggaatccaagattgtccagttctcgaccgtgtccatcgagccgtcctctttctttggtacgttcgcgggagagccattagggttcaaaggcattggccagtgcaaaagcaaaactacaaaccgttcattcgtcagccatctattcgactgataaaccgaggtatccgcgtcgaaaataagagcaaagcgactaagaagaatcacgtacgatcgacatagtctgtaccaagattcttgagagactcatccagcccttgatccggtcgagtgtgataagtgcaccaaatcttcgtggtcaagaagatggacttcctgtccaccccagaagctttgataccttctccgactaccaaaaacaaagccccatccacttgtatacgtcagtcctgtctcgctctatcccaggcttgaggcatctatagaagatcagatcggagggtttgagaaaatggaccttctttctcgtttccgtagatccaagcgccgtcgatatgggtataacccgacttgagcgcgtgctcaacggccttggcaacttctccctgaggagatttccatgtgccgagaccgatggcagggatagtcgttccgttgttgagcttgtaatgggtctggtggacgggagaatattcgagagaaagtacaagatggaggtggatgagtttgagtagagacaacaaggcgaacagattaaaactgatctgcctacctggatggaaggcattgtgtttgggtagatgaagagctatagatagaggtgaaaagaagaagaacgaggaaaaggagaataagaacaagaagatggagatgggaatgaaaaagaaggaaagatcagtcgatgtctacttaaataagaatattgagccctccacctatgatgcggcaatagccggtcacggcccaggggccccggccgaaagcttccctcgtggtcgctcggagaaataaatagaacactagctcagatctagaagggtggcaacaaacatagtataaaccggtacaaagatcgattgaacgttcagatcgacaaatagagacaaacagaagaagggtacaaaaagaagagggggagcgagaaaaagctgataagggcaaagaacctcgccaagtttacaaacattggtagtagtaatactgagatcgtgggagaaaagacaaagagtgaagttacaataaaatctttgctagttcaaggagaaagaataaaccgagcaaagtggcaggaaaagaagtggaaagaaggaagaaaggatgatggagttatcggtagacctgaggtatcatgtcaaacataggaaatcaataatcaaagtcagttcgcatcacagggtttgcttgcctcgaccacgtcgattacgttggggaaaagcacatacgtgatcggctctcaagttggctgcaagctcagcttccattctgtctccgttctctaacagcttctccttgttgtagagtagctcttctcgggtctcggtcgagtactcggcgttttgtgctagtttgaagaaagaaaaaacattgagcaagcacacacgagtgaagatacgttgtcagctagcagaattgagagaattgaaggagaaaggatgtagcaaaatagacaaacattcaacaatagcgtccacagggcaagcctcctggcagaatccacagtagatgcactacaatccaaaccaagatcgaaccaagagcatgttagtgttggccaagtacaaagaaggtttaccagtacgctagagaaagaggggatcatgcatcggaacacagaaacgtacctttgtcatgtcaagatctatcagatagtagccatacccgaaccaatcacaacgacaaaagaatcaacatgcctgttcctacaatcaagatacaagaagatgacggaccatatcgagtggttcgtctagatccatcttctcggggctctgactcgatagtgatcgcctgagctgggcctgggcgttttcgaccaaaagtatgttcctcatggtcgatgagttaatccattctaacggcaacaacggttgtaaggaaggctgtttagacttacagatggcctcgcaaagcttgcaagctggtaaatggcgatattcaaacgcggaatgagtctacgtgaacgcttggggaaaggcaaagccatgagaatagaggaagagcctaccgatgcatcgctcttctccggtaggatatcgcctgagagcgtgttcacctcggaatcgaggagagatcggtcctttttcgaaagggctggaagagaattgccaacaggtagtcgtgttagaatgagatgacgctaggaagaaagaaagatgttgtgcaacttactacataatggtgtacggctagagaagaggacagaggagaggaaaggcaagagaaaaaggtaagtcaaaaggttcgcgtagaccgatcgagcgggaggatggatgctatttgattcacgtacttctcctggatgattcatggaaggggaaaacattgttggattagcaaaactaggttgtagccggagtagccatgtggaaagacgtacggaacatctgctcaaaaacgacccaggcacctgtgatcacaaacagaaccgatatcatacgatgaacgaaacaagaagggaagttggtcaggtaaactcctcttgttcttctgcttttgttgtgttttcagcacatcgatggatgtaaagtcatcgagaacatgggtatcacgaacctcgaagaatcctagacacaaccaatgatacataaagcaacgataggttaggatcactctggaacaatatctgatggacatagtcgatcgagctagtggaatgagtggggaacttttgtgggggaacctccatcccaggttccaccacccaatcagaatggcagaaaatcaagtgatttccccagatcgcatcttccatcctccatatctctctgcatccactctggatgggagattgaagagagagatccagaccaaaatctcaagagctaaaagaacacagaaaaaaaagagaaaaaaactcactctccaaagaagaacaagtgcatcgacttgtccatcacacttagccccttgtcataatccgccacggggtgtacaccgtatccgactttggcatatccgggcacgatctcggttgggccggtgatgggctccttggaaggtgggatcacagtatgcacaattggctgatgaaggttcttgagaccggctcgactagcagaagaggtcaggaaggttcggcgaggaagctgattccagatcgatgtctggccaagaatagtagcagtggtggtggaagaagctcgaagagcccgaagagatgttctaggaagattgttcatgctgattgtacacctagtgctgttgatgtggatctgcttgtctgtctggatgcgtcttcaagcgtcgatatgtctgtaagatgaccggagagaccacagattgaatggatggagttgaggcaaagatggaagacgacgaggacgggtggttgcaggcagaggggccgcttatgtaagctatatcacgcggtggctacgcgactcactgtaaccaggcctggttactcaccctcccgctggctggctcgcctacgtcttttcggtctttgactttggctaatcaactctctcgacaatcgatcaatcaagcaacatatcaatcagacatggctcccaggatcggtcggacactctcggatttgctggcgtgagtattgctttgtgcgttcggtgtggttttggccttgttgccctctcggcctttgagaaagagggagagaaggagaaaaggcaagaaaaagaacagaggaagaagaagaacaagaagaaagatatactaagctgatgtcgtcttgtgctctctctctttctcgtttcactcggtgttacgctcttagcaaacttccccagaacggtttgggcgccaaggtggcacccgtgaggtgggctctcaaaggaacagccgattcatactatcacatcacctcctctcacctcgactttaccgatcggattgaccaacgcggtttccctcttcggatggtgaataacaagatcgtgcccgctgacgagacgtactctgctgttcgagcgaaggagcgaaagcaggcggcagaagagctcaagcgagctctccgagcaggagaacgagtccatcacgaggacgtccacagtctattgagagcgggtgctgaactcgacacccatcttgtcaaggagaacaacgcggtgctcaagccggccgtcaaagcatacggacactttttctggaaaggtaaaccctcccctctttctgttttgtctgtttgccttcgtggagctctgtagggttgactgactgattgactggtgtttttacgtcctttatttgtggtcactctgcttgatcggatgccaattgatattcgactacccctggcgttcttctttttttttcttttttttttttgctcaactcctcttttcgcctcctcctcctccgttgatctcgtactgaaacccaggcgtgttgaaatccgataacggaaccgatccgatagagatcacttcccagacgactaaatcatcctggcgagaagtctgcgacgaagagattagcctggcccagttgaaggtaagatagctatgtctgtttcctatatgggatccgtccttctgtatattctacgactctgtcgattgtcgccttcttcattttcctttcttcgttctgtttaaatcggctgatcctggtttgcgttctcaacgttcccttctcctttcttccttgaacttgccgatcgacacatccagcaatcgatgggtaaacgaacggcgaagggacgacgtaaatgaaagtagtccagtcgtggaagaaattaaaaatgaatgatgtttcccttgcttccgtctcttcctctttctcttgaccggccttttactctctgggttgtttcagcattctcatcccccctcggccccgatcattttgtcccctctctttccttgctcttgtcccgtttttcttgtctcctttttgcttcttgccactcaagagacgtcaaggtggaaaagaatcgatcaagacaaacgagaagagagaaaggaagagaaaagaaaaggcgcgccgactgaaagaaagaaaaaaaaaagaaaaaaaaaaaag

SEQ ID NO: 2694 - DNA, 3583 bp, Xanthophyllomyces dendrorhous
aaagaaaaaaaaaaaagagagttgtccgtcccttcctctctttccgtcgctcgcttggttcgttcgttcgcgcgaaaagacgacgggcacacgaaaagactcgtctttgaaagattcatggatccagaaagaaaaagaaaaagaagaagaaaaaagaaaaggaggaaaagagagaaagaaagagggatacatgagaacagaagcagaaaagaatacaaagaggtcaaccccggatggcgagatctcgccgtccggtcgcccccctctctacggctcggacgtatacctacagggctttcatcagggtatttccgttccaggactcgcccgggccgagcgtgatcagggactggatcacgccgggttcccagcagatgaaccttagggatcctcctttgtgaaggtctgggatctcgatctttgtactcgggttccagaggctatttgtttgaaaacagaaacatgaaacatgaaacaagagaggataggtcaacggctagatggcaggatgagatgaatattgaaagaacctcccccccagaagaaaaacaagaagaaaaagaaggacaaacactgaatccgtccaatcaccctgcacgtcgatctggacgccctctccctgtctgtctccggtatggccataatcaaccctgacggtcgacgtcttttcctccttcagatcgagatggtagcacctcgcgatctctttgtcctccagctggatgacgtccggggtggagggcgagccgggggtgaaggagttgtcgagtcgggatgtgtacgggatctcgccgagtggttcgatcgaggctttagctatctctgggactttgaaatctgttaccacgcgaagcaaaggtcttttcgtgagaatggggacgagaacaggaagaacaacgacaacgacaacatcaaagaaaaacaaagagaaaggacgaaacaaacaagtatggagacaggtgttgaacctgaaggattctttccctgggttgacgatcgtcaacgcagcatccaacgtgaactttgtcagcgtcagcttgtaggacaacttgaagtctggccggaacagtttccttatgtcctcattcgggcttagcgctttcaggtccgatggggcatgatgagaggaagcgggatgggcatacaacgcgtcagtatctgatgtggggaggcccgttctgttgtcaggtaatcagaggaacgaagagagaaacggacagagaatgatggacacggaatctgaagtctcggactgatgtactagctcccatgggttgatcctagcgaacccgtgaggtccaccctttgtgagtgtgaatccatgcgcgtgcgcgcgagagaaagagcaaagaaatcagaagaaggtcaggatcgaaaagaccgagagaatatatatgagtgtgtgtgtatgtgtgtgtgccgtacgagatttggataatctggatgaacgtcggtcgcgaatataggaaaggcaattggaatcccgcctctgatctgaatgagattgaccgaatcaggagagcagaggggagacccctatctagattagcatgtccaccaggatgaatttggcaggatgggttaaataaaggaaacttgcaggacccgttccgtccaagatggcctctgcacacacgcacacacgcacgcaagagagaaatgaaccaagagtcagtgctccaaaaatcaaacgaacggagcgagatgaaacctgaatcgtactgtcactcataaagaatctctcctccacaggcgccccgttctgtccaggagatttccaagaaacgacatgtgctccgtagaagctggatgtatggaagaaggaaggaagagaggggagttttgcatgctgtttcttatttgttcaacggttgacctgtgagagagcggagtgggagggagggaaagaaactttacgaactagatctcggcggacgctcccttttgattattaaaatatatataaaaagaagaggatgaaccgaggggtttagatatcatcagtcaagaaaatgagatcggtaaggacgagcgtgaggacaagcgcggggatgaccgaacagctgaaaaacgactgacatccttctcgatcgtgatgatccttccgtcgtgcgatatggtcatttctggggatatgtattttctttcctgttctatgaatacaacaaagatgtggcctgtgatgatgaatctgagaatatgatggatgggcaaaggaaagaatcgacagggtgccgtctctttatacaccctagaaaagggagggattgccggcccggcccggcggaccgagggagaaagatgagacagccagaggagatttcctcgcggagaaagtgtgggcaatggacggttctggttctcgatctgttctttcgtgtgtgttttatgagatctcaagaagatgttgtgggctcgtcatcgataactgcatcgtatacgtcgaaacgattgtctgtttgtttgtttgtttttttcctttttttttctttttaaatttgtacatatatcatctttctaccggcgaatgccgaggagtatgctatccgtttggtctattgggtatcatcatcgagccttgcgaggagtgagcctagacgccgacgacgcctggggcggaagcatcggccacgacggccgtgccttgtggtgtgcttgcgagtttgacgttgttggcgaacccaccggtggatccgaatccgcctgatcctctggaggtctcttccaggctcttttgtatgtgtgtgtgtgtgtgtatttgggggggagggaaaacaaagagatgttaatcgtgtgtagcaggaaggtaaggagaagaatgcaaggaagtcaaagcacaggaaagaaggagaagaagaagagggaagaagagaatacaagaaaagaaaggaccgacctcgacctcgaccacggcactgtactctactttttcaagaatgagctgggcgatccggtcaccttcgctgatttggaagtcgacgtccgagtggttgaagagcaggacgaagagcgtgcctctgtagtccgagtcgacgacgcctgcaccggtctcgatcgagtgctttgcggctttgttttggggcgtggagagagaagtgtgtgtgggtgtgggtgtgtgagcagagagtacagagaaagaaaggaaagaaaagaaaaaagaaaaaggatggaaaggactgacctagtccactccgaggagcgactcgaccgtacgtgcctagggggatggccaacgagagctgggtgtcgatcagggctttgcctcttgccgggatcacgtttgcctgtgcgctgatgtgggcggggagatgaggatgaagggtgaaagaaagagagtgtgagaacggtatgtgagcacgaatgggagagacgatagagagaatggaacgaaagaggtacgacgacaggaacatggaaggctcacgagtaaaggtccaggccggcagagaagggagaacctctggtgggaagggtggcctttggggagagtctcttgatgagcagctgggatgttgtggcaggggcagacatgttggggaggggaggctagggcagggcagggcaggggaggctagggcagggt

SEQ ID NO: 2695 - DNA, 892 bp, Xanthophyllomyces dendrorhous
gagagagagagagagagagagagacgtgagaaacaggacagatacaagacacacacacacacacacacacacacacacacacacacgacacagtcacagtcacagaaagagacgagctaagggggaaagtgagagaaccaaccagagggggccactacaggggggcagggggaacactataggcgggcagagggagcactacaggcggagagagggaccgggactatgcgagtacgacttgactgtgactgtgactatgtgactatgtgactatgtgactacgcgactacgcgagtatgactaggacagcaatgacaaacactggggctacgaaaaggaaaagatgccgcgggtttggaaattttcgcctgttgtaatttttttcttttgtttgattagaaccggcctagtctttttttgtattggctgtgagtgtactgtgagtgtactgtgagtgtatagtgttagtgtcccacttttgtagtggccttctagtctaccactccaccgccccaccggtctaatctctcactgctctgtttgcgtaatctagtcatcaatttttcttctactctccctctcttttctccactcggctctttctctgctatcgtgtgtaatattcattcgaatttgttctagtcccgattatttctcctatttgtactttcccgcgtttgacaattcactttactttcttactctttcctttcccttccaactctttccttactatcgctccctactctttcttgcctactcgccttccttactatcgttccctactctccctctttgtattccttcgtactcttctcgtctctctcgtacaatacaaacaatggcaaaggtgcgttctatccagtgtgcattccatccatccatccatcca

SEQ ID NO: 2696 - DNA, 490 bp, Xanthophyllomyces dendrorhous
ccatccatccatccatccattcattcaagagcagcttcttttcttttctttttttctctctctccctctcattctttctcactcactcactcactcactcaccctccctctctctctctctctctctcgcgggaaaatttacctttttttcttcttcttcttccctcgtctgacccgcctcccttcttttttctttcttcctcctcttccttgcacacccttccgacgcgtctctttccctcttccattcttccattcttccatccacccatccacccatgcactcacatactcactcacacacacacgccacacaacaaatagatgtccaaagctagagccgcagcgaacgaggcagagcttgagctcaaacgacaacaggtatccccatccccgttctttccttcttgcttgcttactttcctatccatggccttgctgacgcgtttcttttttaccgcctctccctcctttccttcctcgccctttc

SEQ ID NO: 2697 - DNA, 889 bp, Xanthophyllomyces dendrorhous
cgttgagaaacgcgtcagactccctccaggccttcgcagagaccaccgcgctcgtcgacttccaagacctccaggccatcctcggcacgctcaaacacgcctccgagccagaactctccgcggcggaaaacaagaagcgaaagcgaaaggaggcaaaggccgcaaaggacccaaacgtgccaaagaaaccgtcgacggcgtacctaacctaccagaacgagatgaagacccaggtcgtcgaggacaacaaggacaagggcttaaagtacaccgacatccttcgaatcatcgccgacaagtggaagaacctgcccgaagaagccaagaaggttcgttctcttgttctttcttttccttcttttcttttacattgctgatctaatttcttactcatcttgatctcacttgcgtctctcctcgtctttttctcttacttcctccccctccccctccacacacatacacacacacacaggagtataccgacaagcagcacgacgacatggagacctacaaggcaaacctcgcaaactacaacagagccaagaaggccgtgcgttcccttccagttctctctctctttatctttcctctctcttttgccttcctttcctgacacacgctctctctctctctctctccgcgcgctcgctcaggccgagggtggtttccctttggacgatgccaccatggaagtccccgaggaccaggtcgacgaggacgacgaagagatcgacgagatcgaccaggcccaggagaaatccgattcagagaccgacgaggagtctgtcgagtctggttagtttactttatatgcttgctttcattccatctctctctctctctatctatctctgtgttctcaccctccgttctaaaaccgttacac

SEQ ID NO: 2698 - DNA, 492 bp, Xanthophyllomyces dendrorhous
agagcctgaggaagctcccaaggagcctaccccgcccccggtcaagaagcaaaagccaagctcgaaaaaggcgacgtccgccctgggttccgtcgtgagcgccctcgccggagccgtcgccggcaagccagatgaagatcacgccgccgccgtggccgtgaaggagaagaaggcaaagaagaccgaaggcaaggagaagaagaagaaggcagagtaactctttgtcttgttttcttttcttttctttgttcttctctccccctcctttttcgtctctgcccctcttcttcttttactactactactactactactactactactattactactactactacgttttcttctacttcttcttcttcttcgtcttcctcttttctgggatctcgtctcttgtcatttgattatcatttcactctcccctttacaagagaaactcgaaaccctcgatgttcatagcctaggcgtttcttttcctttccctccctc

SEQ ID NO: 2699 - DNA, 6460 bp, Xanthophyllomyces dendrorhous
ctctctctctccctcccttgtctttgtctagtctcgattcgatccggttcgattcgttctgtctcttgttctctctctctctttcctgcttgtcgaatagtcctttttttctttccttttctctttctctctctctctccccctttaccatcttgtcctgtcttgtcttttctcttgtctctctgtttgtttctgtcatcagatgttataagaatgaagccttttttgaacaaagaataaagatgacaaagaaagaaaagagcgcggtgtctcgacgagagaaagcaaaagaaaagaaaaagaagaagaaaaaaagtacaacgtcatatccacatcccgccttggcatctccatccacatccatatccatatccctttcagaaaaacctccaccagacaaagatgacgatgaaaagaccgacgaacccgacgggcgcgtactgtctgatcaacaactccagatttatattccgtgcttgtttcctgtatttcatcgattccgaccggagcgaggtcgatagagtggacattcctatatgtgcatatgtgtatgtgtgtgtgtgcgaaagtatatgcccggctggctagtcaggactaattcttcctccttctttcaagatcgtgatcaaggcagaacgcggagggagagagagagagagagagacagagagggcaaacatacgatctagtgaatccccacgccagagaagatcttccatgttcttcgacatgatcctcgtcacgtcctgtagctcatcgttgatcctcgtcaggtttcctgtctgtcctgcacccgcgccgagcgctgctgccgacgacggtgtcgttgctgctgatgatgacgacagagaggcagaacgggaatctcgatatgtcctagctgtctttgacatgaacgagtctgagtccctcccgtcgcgcacaccaacacacaaagaaagaaaaaaagagagagagagagagagacaaaaagaacacgcagacataagcacaaaaacaccaaaacaagagccgcgcaagagagagacataccgaaaccgacgaaagcataaggtctcgtcgtgttatccaccttgtccccgtagaccttctggaactcctttgcgcattcgtcaagatacgcgaacgccagcttccgggggtatgacttttcggtgatcaccaggtagatcaccgagcacaagatcaggtagctaaacaagatgaccaggaatgaatagggaaaacggaaagataaaaaaaagataaaaaagggaaatcccccaaaggagagaaagagaacaaacagcctttcagtctcaatttcgcttctcttctttcctccctctctcacctctttcctcctcggttcaaaccaaggacacagacttactgtagggtgtacgctccactctcgatcgagcacaccggttcagagttcggactcaaccgacggacgatcaatttcgcctgttgcttgtgctccgtcagcgcgttctccgtctatatcgttccagacaaccccgtcccagaccaaaagtaagggcgtcagaacagaaagaaccggcgagaacaaacaaaattccctcagcctgggttcgttcagtctggaaggttgaacaaaacaaaacagaacaaaaaaaaacaccccgtacttgttcatcatccacactcgatgccaatggaagcccgtccgagattcgatagatgttggtagcctgaatcgaacagagaaagggggtggacgccatgccaagtcgtcacaacggaggtcgacggaaatcagagtgacgaagatacacaagcggcagaaagaaaagcgaccaaccaagaccatgaagatgcttgtcgttatctctttatgtttctgtccttctgatgacctatccgaccgagagtccactgccaacttgtgagatgtgggtgtggattgcaagccggccgggcagagtgatgtttccttctcccccgccccttgccagcgtaacaatagttagggttaagtcgaatggcgatcacatccagtcacatattacataagcagaaaatcccttggaccttgctcttactttccacttctcagtcttcctcgccttggctcaacgacgacgaccattcacccttgagagcacacacacacacacacacacacacacacactcactcacacacatacacacacaagcacatacatacgccgtctggctctcttcttctcgattgatcatcattgggttgtttccaagtcggtgtctagtgcaaaagattggatcacagtccgctaaaggcttcttcccagctagtcaccaccctcccattcatccggatcctttttttttttctttcttctctcgtttctccttcctctctctctcttgtgtgtcttttccctctgtacagtctttttttttgttcttttttttaaaaaaaaaaaccttgtccgctgttgaatcccttgttccaaagcgaggaaaaagagaaagatctcgaggaataaacaaagaaattagcatagtagattaaaacaagatggatcctgcttctcaatccgtgctggcattatgtaggccaggctctgatgaactcgcctggttaactgaacaactaaggagcttccccatcgttcgtaacccctcctcttatccatctgatgtccccatcctcctgttccgctcttcttctaatgtctaaccggttgctttgtaaattttggtccttctagatgcccggtcaagtaagatgctgtttccaacacaactcagttgaacgcacggacgagctttactaatcctctctgtccctctcttttttcgtcttcttcgccccctccaactcttttctctctcatgactgaacaatagactcctcaagcatacatccgagctcgagctagcgtgtgcttcccagatatggtgttgaaggtgcctgaaccagtagaggcagtacccataccggcaggtcagtttccgtgtcttattactgaccttacatggttacgcgtgccttgtgctcttctgcttgccgctctctttcctgctgctgcttcttctttctccttcttgctgctcttcttcttggttatggcaccgatctgtgttctcgcatgctctccgctcctcaccaaatatctgatggctgctatccgcaattgtgctcattcgaaaagagtcgctttctttccctgagatcataatcgagaagagaatccaatttcagcgacccagggtctggtaaccaggcgtgattttagggcgcagctctttctttccccaaagaggacccccatatctccgtgttaccaatcatgccgtctggtcgctcgtcgggttcttttctctctctctctcttctctcttctctcatcggattttctgtgtgattaaagaaaggaaaagaaaggaagaatattcaaaacaggcaggacacggccatctttcacgaacgaccttatgggcgttcacacggtccttgaggggtagcgcatgttactcgcgtgccaaagaataaaatcgtagcccccgcgcgcgcgcatccactcgggggttacgcctacaagcctcctttgataaggaaaacctatcgagttttctcctcctctctattgctatgattagagattttctacacgcataaattacaccacttttctcatcggctacagtcttttgagatcctcatatgctcatctctctgattctccgcttgtcattcttcagatctatccgctcagcctgtaggccagacaccgactgcttccgcgcctggtctaagcacggtccaacctgcgcctacatcatcgctccctgccaaggtaccggctgccgcgcccaagcctaaacccacgccaaattcgaattcgacaagtacgaccaaatccggctcttcttcatccgctcgtccttccagcacgtctagtaccccacgacataccgtctctccacctgcgacccctttaacgcctgccgagcttcaagcccggatcacacagctggtcaacaacatatcccgatcacccgtgccgaccgtccgagaaatcgtcgcccttctagcgccctcgccgccgacggaagctcctgcggctcctgcaagcctgcgcacagaattcctacaagcagcagcgaccgcgcccgtcaagtttttctcgtactggttggacgaaccgaacgcgatgggtctcatcgtttcctggttgaaaccgctgttgggcaaggaggctaggagctgggaaggcacggctctagcgttgctacagtttcttaaaaagcttgacatcaccgtgtcgcatctagtaaaatacaagttaggaagaatgttgacaaagatggtcgataacgaagtgctctcccaacgtgagtcgtcctttttcttttcttcttcttcttcttcttcttgtctccctggtcatgtcattctccagtgtaggcttattaaaatgttgatcatctgatataaaaaaaaggggtgcgagattcggcaaaaaacatggttgagcgttatcaaatattggtcgacaaaatgcaatctgctgccaacggagctgatgaaggtttgttctactactttgttcgtatgaattgagtgaaaactgacgagatctccttgaatccacctgttgattccccaggcagcaacaagaaacgtcggacgagcgagaaatcgagtactcctcttgctggcatagccaaaaagacaaacaccactaccaccaccatcaccaccactgctgcctccaagacacctacctcgaaaacatcgaccacacctgccgctcgaacgaccgtcgtttcctcgacgaccaagccgtctactaccgataaagcatggttccagaagccgggcccgtcggctcctcttacgttcaacaagaaatctgcttcttcttcctcgtcctcgtcctcggcaacgaaatctaatgcttccgccggatcatcgaaacagtcggacgtgttcaaacaggcgctctccctacttaaacaggccgaaccggtcaagcagaccgcaccgataccatcatcgacagttctaggaaaacggccgatctcggccgtcgaaggcgctccggcagaggttccggctggcagaagaaggagggtaacattcagaccggaatcagagttggttcaggtaaagttgatcgagagagctatctacgacggcgaggaggtgatggcactggatacactcgcagaggtaagccgtcacgatctactttctctaaactcgtttttttctctctcttaaatatcgagctccgtccactcatgctttttccttccttctcgcttgcttaattccaaaacaggatgtccatggtcatcgactcacagagctagatcagagtgaagggtcttcaatgaaacacagcatccggatctacgagcaggttgactggtttgagcctccaggtaagaattctttaattgtagatgctttaatgtctcctcgacgttccagtattctcactatacctgtggtttacctcctctttgtgtgtgtgtttccagacgtcgaactatcctcggaacctgatagtgtggcgacatatgtcggacaggaacgagagagtcaagcactcagagagctcaccgtgttaggagcaatgtacctcaatcctgttgacatcccaccatgtccgtccgaggcagagatcatcgtcggatcgacagaacagacgatcgagatcatggtcccatcagaatacgtaccaaccgagtcggaggaccccaccaccgccgccactaccatccctctcatccatccggagccctcgactctagccggatacacccctgcagaaccagtctcacaaccattcatccctccctcttcttcaacatctaacacagaaaattcctctcaacccagcgcacctcccccacttgcgttggcaggaatcgactttcaaaaattaggcgcactcgccgctagccttcaaaagactcaaacggagcagcaacttcagccgaataacaatgggtttcagcccggcccctctcaggagtacccggcttatcctccagttccctctcaggactacccggcctatcgacctgttgcgtcgggttctcaaccttatcaatctgaagggtcatcgtacagagggaacgaagaatcgatgtacccgaactcataccccaatcaaaattcatatcaacaccattcacagcaacaaaaacattcgggatacggtctccctcctccgagtgggatagcagacacgatggactttggagggagaggaaattcaagaacgttccagcccagtgaatcaatgtatcctcccagagggggccgaggcggaggtcggggtgggtcatcaagaagccagagactttgtagatattactcgaccggtcaacagtgagtgtctttctttctcttcttccttctctctatttatgttgcttgggcgaacgattaaaaacaaacaaacaagaatcttgatctgacgagtagatctttccccccccccccttttttt

SEQ ID NO: 2700 - DNA, 31515 bp, Xanthophyllomyces dendrorhous
cccccccccccctttttttcttttctgatcctcaagttgtgtgcgaggcttgaattgcaatttcagtcatgacgaccctatagagtgatctccttatctttcttttacatgcatccttcgacttttactcgcattctctatccatcttgtagtactcttcctcttatatctccttctaatcctgccttttcattcggacgaagggcggtaacaatcagaaggaggaactcagctcaagggattatgctttcaactcatttgtttgctcgtaaaccttttttctttttctttctttttctttctttttctttctttttctttctttttctttttctttctcttttgacttttggaaaaaaaccaataatacccgggacaaatgattttcatagttcttaaatccttcaaaagaaatccccgtatgtttaatgcaatgaaaactgataaactacgttctggatatcgaagaggaagaagaagaaaagcaaaaggacaaatggacgcaagaactgaagccggatgggatttgggtgactgataagtcggggatacgggatgagcgagaccgtcgagtagtaaccaaggacaaaggtatatgagataacagagaatgaagaaacacctatcatcggattatggtttaaggaattcagggttatgcgctgtacacacacatacacagaatcgaggaaaaaataaatggaaatgggaaataacgcagtctggtatctttgaaggaaaagagaaagagagaaaagagcccttgtttagacccaaaagaaagaaagaaaaaacaaggaaaaagaaaaaaaatatattattatagccaagagtccttcagtcaaatttaagcagacacatctcgcgagttaatggggaaatcgaaaatcaacggtccagccacagtgttctcgtcagagacgtccgtggcggcggctggtataagcccagagaaacaaaaaaaaggagtggatcagtaaacaggtcgcagtatcggtcgcagaagaggtgagaagagaacgtacaagcagtggtgatcacggcataagaagttccctgcagagtagcaggcaagacgacctcaaagttctcggggatggcaaccacagtagccgtcaggccggagtagatgatcaaattctcgacagctccggtggtagggaacttcaaggtgaccttgtctccggccttgtaggtcgtctgcacaacagtggcagcagggaaagccttgacgggcaacgtggggttggctatcagaccaatttgacgacgacgacgacgacgacgacaacaaccgaaacgataagctcatcgatgcccctgaagataaacgaagaacaaagaaagagaacgagaaaaagacgaactctcagggcagctggtaatgaacgcagcggcgattgagtaaacatcagagaacccaagaggagtgtcgtaaggtccgctgaagggggcctccttgaggacggctgagttgagccaggcctggtgtcgagcctcgacagtaaggatcgatccagcggcggtctagagaattaacaatgatcaaagcatatgcatacgcaagagggcacgatgagagtcctggcctggtgaaaacatcaatcaaggatacatagagaggggagacgtacaacataagcagggttggtgatcttgttagcagctccgaggtaggcggcgacaccgacattctcaatgacggaagcgagctgagagaggaaaaggtaatcgcgttccgagagatattagccagttgtctaccgcaatcggttaaaccagtacgtgaaagtcacgactgagcacggatagaggagaagacaatgacataccccaaggaatcccttaggaccggcagcatcaaggccaaagttgtacgtgcagggcttggtcgcggcatcacccagagcggtctggaggaaggcgacatgggaagcctcgtgctgaccgactacagagagtgagagagtgtgtggtcagcaagtgatgagaaggagagacgaagaaatgaagagataggggctgatctcactttgaacgactcgtcgtcgaacccagtcgggcaaaccagcagcctcgaaagaagcggagtcaaacttggacaatgcctcagagtagaaagcgttctcgaggcttatagtacaaacatggtcataatcatcagtgcgctatgcttgataatcgcaggctgttatagaagagattatacttactgctcaagggtaagagcatactgcaaaatggctatgagacagaataggtacacgtaagtacaagaagcttgggcagtaataaaaacgcagactaactggtgtcgatgttgtcccgctgtcggatggggccgctggaggcggcagcagcggcgaccgaggcggaggcagcgaggagagaagcgatgatagatgtagagaccatggttgtgtataaaagtatagtagcggttaagcgtgtatgtattgaaaagagtgtgttggaagagaaggaaagagtgtcagtggatagtcccgatatgtagagatattaagtgttgaggatgatgaagaagaaagagaagaagaagcggagaaaaatccagaacgatcagttgagtttttatagaactcgaggtctctccgagatgaatgtgttgatatgttttcgttcgtaatgtcaactatcaaaacattcaaccataggggccgaacgcttgtgacatgaagagccctgtggcttgaaggcggagacaaggagaaatgtccattcgccgtggaagatcaaaacaaacacgtccaacaagaacgattatggacatcagtcgcgtaagagttaaaaggctaaaacgaaggccaaagcgaaggccggtcgaggattgatcccagacgtaaccattagtgtagatttgtcagttgtcctaaacgccatcggtccaactctcatttagagtattggcgaccggcctccgacctcgatcagcagatggttagtatgtgatgttgcgttgttgttgttattgttgtcatcatcgaaggtactacttggcataatttgtttgagtgatgtgtaactaaggggtgcttagtcatcattatagtgacacgtgctatcggtcttcttggtcaattggacccaccgggcccatcggccccgtcgatcctgatgtccgtttggagaagcccaaggcccgtatgatgatgtaagatcgtgggaagcgtcgtaattataagaaaaagacgattcagatcaaacttaccttcatatgacctgattcttcaacaatcgtcaagctatatactctctcatccacattcacattcgtacaatgtctgaacaaggctcagaagcacagacagcacatgatcaacagccagagaagtattcgaatgacttttggtcaaagaatccaaaggtgactgctttgaggaaacagtatctgaagtctatggctggggcttgcatgctcaccattatcttcgcgtggatggtcggtcttgttctcttttttcttgttcttctgagaggcttgcttacgtgttctatctccgtcgttctttgtctcatttttgactctttggccagtagtgtctgcccttctactggtgagtagttcactcaagcatatgtttccttacatcgttctgaatcgaccgttcggaccaaaaatttatttttctcctaggggctcgttatggaaaacttcgcaacacatgtttgagctttccgcctgggtcgtcaatctcgacagttccaattctgtagcgttcgcggccctcgaaaatgctgttcggacagccgtagccgaaccgactcctcatatgggctggcagattcaggacgcaagccgcttcaccggcgccgaatttggaggaaatgtgacggaggagcttataaatcgtttactcgaggaggagacttggttgattgtgataggtatgccattcatctaagtctaatgtcagatcatttgtgatcaccttgccctgtcaactgaccgttccatcgtggatttatctttcctactccctccctgtcaaacgttactagttaatcctggagccgacgacgttttgctcaccgccagacagacagggaacgcgacctataccgttcgtatttctactttctggctttcagtagatatgccttagcatatggttcgctgaacaagattgtcattggcatgtccacagggcacctcggctgtctctgccttatacatgggcggtcggaatgagaacgcgtatcgccaagctatcttccctcagatcgtctccgtcatccaaccaggtagcgatataaattctgtttcaattcatacgtcatttctgctgcgctaaacaaggtgtatcctctgtgttttattcttcctccgtttgccaacgaatacagcgcttcaaaaagcatcagcgaattcaacagcatcgtatctcaaccaaaattcgggaaatgcaacagctattactttgttgactcaggcgcaaggcacaatcgctactccttatagcctgtgagccaagaccgttctttcgaccaagtctcttcaccaaatctctctgacaaatatattttcggtttggactgcctatgtctgccaatgtatccaggagccgatacgatctccgaccttttagtgcaacggttgcgactgccgtagatctcgttggactaatctacttgatgagtaagtcgataagaaaggatgagaacagctatcgggaaagaaaacttctcaactgagccatctttctatgtttctctcgtccgttcacagtcctcgctttcatccaggtgaattagattttgtatatatagcccctgtgtatggaaagagcgacaactaatctgttatcttgattctgttcgctcgttggactaacagaccatggctggagcatcaggatacggccctctggcgccatatctaaagtatagatcgctcgtcatgatgcgaatctttactcctctggtcagctatatctttgtagctttcttctacacgatgattgatttgtacgtttcattcgttacgcttttgcggtgtactatatctgaagaatagaaatatgactgaatgaagaactgttctcccggaacgggtgtttgtgtttcctccttgctccatttccaggcctttcaagcttccgttcggtgcgaagtatacgtacgcaggaggattcttcctctgtgagtcagagtccgatattctctttcccaaagcggattagggacgttgaccgtagggatctgctcgttacatcgttttagggtatgtctttgtatatatgggaatggcagcgctaggactagcaaccgaggcggtcgtcaccctggttggaccgcagttcatggcattctttttgatcgcctggatcatcattaatgtgtatgtctgattgtctctgtctttcgattcttcgccacctgcttgtgcgtacggctaacgtcgtgcttatccgactcgatcatccaggtcggaggtatctgttccgatccctatgaccggcaacgtgatctaccgaatcggctacgcgttccctttctacaacttgtcagatgccgtacggacgatcatcttcaatacaaagaaccggttggggcgaaatgctggaatattgatcgcttggataggtgggtcgtcgcctaacaaggggatttctttctttctttttttgtaacacaactgacccaaggttaccacttttcttcatcctccttcttagccctctcgatgatcaccattccgttgtttaccttgttgatgaggaggcgtacgcagaagaaagaaagccaggagagcaagaatgagaaggagaagtaaccaatagaaatcctcctcgacgcacacgatcgaaacgatcttggtatgcttgttttatttagagatttcttcttcgtgttacttttccatttcttatacattttcatctgctgtatacaccacatagtcttaatatagagaatattagaatcgtcgatattttatcatgtattttacaaacatgatgatccatagtttggagcgaagaagactctgatcgtcgatcggcccgatgggagtaaaaatacaccgaggaaaggacgatgacgacactcaggacggacgatcgggccgacagagtgatcgagaaaacgccataggggcggaaggaaaacaccatgaacgtcggggttagtaacctgacctgtttcactcggtcctccggcgttcgaaatcggcggccgatggacaaggaaacaggtcgaccgttcctcgaggattcacatccgaaagtcttgcccgtcactgtcttgcttggctaccttatttttgccttgatcggtccaccatcttatgcctgttgctaatcgatcgtttgcagcttgaccagacaaagacagactcgcatgtactcacccttacatcatctgcataggcaccgacagctgaccgactgagtggatgaaccagatgggggaacaaccctattttcagacaccatccttctctccctccgtcagaggggtgatcgtagatccagcaggtacatgtatcggaggccgaaccaactttttctccggacatgtatgctgctcgtaccacttgtccatctctgtgccagacagttcctcctccttttctaagccctagcccgtggtcccagttgaaacttggatgcagagccttccgattgatttgaattcaccatcggcctgaccggcgtgagttgaacagatcggatggacaagtgatcggtagtctgtttgaactctgtccttctcttgccagtccatacttccacctgaaggaggtggttctcctgaaggactcaacctcctccaaaaaacacataaaagccctctggattttggtcttcttggagatatcgttttcttctttgctcactccatcaacatctcttcaagacattactgtacactcaaaccacaaccgcttctactctttaatattcttacaaatatgatctccaccactaccgctcttgccgtcctcgccgccaccgccggacttgtttctgctgcgcccctggccccccgagcggacgacattgataccaccatccttcaatacgctctcactctcgagcagttcgttatgtttccatctcttcttttgtattgaacgagatcgatggtctgactagacggatatattgtccttccttcagcttggagaatgctttctattctgaggccttgtccatgtttgatgccgatgcgtttgcttcggtaggctacaagccttgggtccgagaccgagttgttcagagtaagacatccttcctcgtcttttatctcattttatctctatcttcatgttttgaactttcttctgactaattcttcatcttctctcgctctccgtagtcggtcagcacgaggcttcccatgtcgccttcctccagaccgctctgggcgatgccgcgaccaagccctgcaactacagctttggccttgccgcccttgaccctaagggattcctcggcgtaagtcttcacatgctcaacccatattttctcttgtttaaacaatatacaatcagagacttaccctagtctgtctcattgaacatacagctttcgagtgtgatcgagaacgtcggtgtttcagcttaccttggagctgccagcaagatcactaaccctgactacatcgtacgtccttccgctggtcttctctttctctaagatatgattactcacacccaacctttattctggcctctttctagactgctgcaggagcaattctgacagtcgaggctcgacaccaggcttggataacttccgtcggtctttctgctagcccttggaacgggccttacgataccccactcggattctccgacgtctactcgatcgccgctgcgttcattaccagctgcccagacagttcgtcatcttctattctttctcgattctgaatatgttctctttcttgcgcttttgactgaggccactcttccctcaaaaaatagccaacccgactttgcccgtaaaggctttccctgctgccaccgtgaaggagacttcgtacgccgccggtgacaagattacccttgacttccccaccaccggaaactctgaggctcgtacgttgatcttttctccgtctttacttcatttataactcctgttgtatctcgtctaaattaggcatttcgatcgttgttgctgacaaaaacatactccttggcctatattggcgttcttctcctcgtagttgttgtgtactctgagttgaagtcgttcttcctccctatcgcctcggacgagaccgtcacccttccagagggtcttcagggtatcgcttacggagtcatcactaccgccggtatgtctttccctaaggccctgcttctttgcctatctttgtccgtcctgattgctgaagagtgtttccttctttttgtttggctgtttaggcgccgccgccaatgtctctgatgagaacacagttgccggacctgtcatcttcaacttcggtctcacttcaactgaggtgtcttcttaaaaagaaaatgcggaagtcaagtcatcttcgcctatagttgtctctttgcctattcttcttctccttccttctctggacttttaatttaagatacgtatgatactcttgtacaactcttgggaattaattatttcattcttcacttcatccctctccgctcactttgctcaagtaagcgccgaatttaacctacggttggttttatgtatccatatggtatttcttgccgtttctgccgtttctaccttttcttgctccctcttgctttctcatatgttcctttctctataaccaaatctatcactgatgaagtggttagcctgatgtctgtcccttccctcttccctcatttgtttcgagacttcacagacgaacaaaacaatcgttaatacaaaaagagagatggagagaacatccattgagaagtggattgtcattgcagcatacgaaaacaataatcagaatcagactaaactaaactgaaaagatatgataggtgatgagatggggtgagagtaagttatcgaatattctagatatcaagactaatagatacaacatagtatgggaatttaagagaaagaaacaaagaacagaaaagatgaaggctacggaatacaaaagagaaggaacatgaaactcaaaccacagatttcgatctagtttcccttcctttgaaagaagaacttgaacagcccgacgatcccaacgacagactctgcatgatcaaatctagcgccctacatgcatccctcggcgtactcgggccagccgctggcgagaatgaagaaaccggtccgatgttgactttcgaactgataggtgtagagttgggaacaatctcgattcttgatctaccggcaagtaaggaagccagcttatcgtaatcgaatgagccacccgctttgagcgcagcagacgaaccgtatggctgatgtgatgtttggtgatctgttttctgcctagatgatgacgaggccgaattgccagtactgatctgttggatgaacaaaggggtcggaggtgtcaatccaggggtaggtgtgacaaaggcgtccatgaacgctttagaaagtcggttggcgatcgtccagccacctccaggggaacaagacgagggtgcatgtccagtctcgtctgttagagaatgctcgatctctttgtatggcggcggcggtggggcagagatcgaaggagccttgtatgacagcccgacgagaattgctccgagcgatcctgccggtggtgatgacggggaaggagtcaccgaggaggaagcggatgacgtccagaacgcgggctttaaaccagagtttgttacagaactgtttgctccccaagcttcttctctggccaaccgagtccacagctgattcttccaagcctcgaccgtttcgttccggacgccgaaaggcgtactatcgatgaattggtcaaacgtaccagtctgggacgtccctgtgggtaagttgacgggttgactcatgtggaacgggatatgagtgatcggagtatgatagttgaagagcggattgaggttgggttgaggggctgaggaggtcgtggcaatagaagaggaggatacagcactggtagtcggctgggatgaagatgatgttgctttcagttgggaggggtttaccgtcgtaccggtgaacggaagaggagagggtgtgttggtaggggacgaccctctaaggctcactgcattcttcaacgccatgatttctcgtctgaatagtagaacataaaggtattgtaaacaccgtgagatcgtcagtcgccagtttgacaatcacagatagaggaaaataggagaaaaagaaaccggacacagatgccctactcacctcagcgcttcattctcccattttgtgctacctaattcatctttcacagcggcaatcagccgatccctctctcccagatgtccctcgagagcggtgatgtaatcttttcttcgatttcggaaatttcgggcggatatcttattacgaagctgacgtttttgcttcgaagaaagcgtcttgtattcttccggactaaataaagaataagaagatagaatgagaaagagtaagtgacgagcaaatgtaagatagtggagtgcgaaacaaagaccactgacgagggtctccagtcatcatccggtcctcgttcttcaccttcttcgatgaccactcgactcataagatgtccacctgcagcccggcgcgcagtttgtttaaaagttttttgaggcatttcgatagatgcgttggaggcagacaacaaaggcgagtcggcagtcctcttttcagtgggacaatgaccgctatcctcgctctcctccccatcaccatcctcatcttcttcgctatccttggtctcatcctgagcctcgtggttcgtatcagaggctgctctgtccgtcaaacgcggtgacacaggttgtatcgcaggaggtgacggagaaaaggtgtgaggcgaactagtcaatacatcgtcgaggaacggtgccgagaaagtagccagttccgaggcattctctgcagggctctgaccagtgggttctgagacggcctgagatggagaagccatcacaagatggggaggaaagctcgaaggttgactgtcgccaggaagagaattcgccacggatgaaggcgaagtcgagacagaatcaggagaggaaaagaagtttggctatttggtgttgatagggaagcaaaagaaaacgagatcatatacgataaagagttaggagtgtgtatgtgcatttgtgttgaggcggcagttgataaacatacctgtttaaagtaattttcccacccggtcaagtgagctgtagggctctccttagttggtagacagacagcttcttcggttgattcagggctagatgcagaatcaacaggcgagccagaaagctaagagaagagaaaggaaaatacgaatagagattgagcatggatgtgggcgcactgttctcaaaagcaatgctcaactaaataatgataacctaccagcacagaatccatattccaaaaatcgagcggtttgatagcgtcttccagtgatttcgttaacacggcttggagccatggctgataagacatgttgatggtatgatcgtctgttagtctttgagtgcgcgtcaatatgtgtctgtgtgagctatcgtgtatctgtggatcagtgtatacgagaaaagcgaaacgagatggatgatatagaaaagaaagagtactggaataagaaaaggaacgacagccaggtatttttctcttgccgagcgtacgtgtgtggtccggagaaaccgatcggactgccgccctcggccggggttctacggcgatgaccacgctcatacccgagcggggtgtccttacataagcatacacgtgaagtagttgaaaaaaattgggttacttgcaccgcatgaaaactgtagccagcttgtgtttgttacatctaacatcattacataattatctgcaacaagcgccttgttgattgaacattctactcttcatcttcttcttgaacatttttgggcttatttctccgatcctataaagagtagagcacgagcttcgctctcttcttcttctcagcaatatccattttcttcgtttccctttctctatcaacaataagcaagagctggctctcttcgttctttcaagaacccatcacattctttggtaagtttcttgatgataagatccaatcacctctataacgaactccactcattcatctgctattatctccctgatgaatcaagaattccattcagacccggcgtcacctccttactccctctcaaaccgttcaaactcaaacccataaatatcttccttgattatgtccaccaccttcctcttcctctcccttctccaggccgtcaccatcgcctcggccaagcccatcaaccgtcggcaagatgatgtgtctaccgcatggaacgaaacctcttcttggaacgagaccactgtgtgggatcctacctcaatcgagaacgctactgtatctgtcagccctacgacaagtgagccagcgagtgtgccctctgagtcggctaccaccgaccttcctgattctagcttgttctcgaacaagacgtccacctcggcgacattccctctttcagcaactaacgagaccgttgcgctgcccgacgttgtctctgtccacggaaactcgtctgcccttggaaattcttctactcccgaggtcacctggaacggcacgagtgtctcctacgacaacaccactgtggtggagtttggaaactatacgtttaccccccagaacatcacccttctttctcctgatatgactgtcaacattactcagccgttctatctcgagaacgctacgatctcttcggccaatggagcaactcagaccctcttgatcaatggaacggtcgtaactttcaacaacgtcaccggtaccttagtcatccctctcgctatcgacgtccctgacagtgaaaccaactcgaccgttccaactaactcgactacgaccacttgggacgagccttctgcatccgccacgcccgtctggaccgagccttctgcattcactacgtctgcctgggccgaaccttctgctactgtcgtcgcatccgagccatctgtcactactgaatactccgaggtttctgccaccgttgaagcatctgctccttccgcttctgctacagccgttgccaccgccgagcccacacctagtgcatcttccagcgaggccgaatctgagtctaccacagccgagtctgagtcgacctcagagactgaacagtccgcttccgaatccacttccggatctggaactgacgagactgacgagcctgctgctaccgttactctctatgttaccgagactgaggctgagacccagactcagactcaaactcagaccgagaccatatatcagaccgctactcagacagcaactcagacaacctcggtctttattactgagactgctgcactacctacgatgactctaggtcttattcctgtcgagcaatctaacggaccgttcgcatactcaatctcgcggtcttctgtttcaacttcctcctcagtcgacatcgctcccaccccgacggcgtatgttagcactgtgacgggtacggcgactggcaaagacacaattcctcccacgttgaccgatttgtccgtgatcgcttcactcttgcccaccagcattcccgcgtttacctacactcttcccggtgttaatgataccatcacaatcggagcacccctgtcatccgcctttgcctcggcttccgccgccccctccgcctcagcttctgctcttcccgattggacatccgccgctaatggaacccttgctaaaaacgagtcctcggttgtttccacagtgtctggagggaagaacgtaacggtcggtatcgtcattcccgctggttctaattggacagagcctgccgaaagctacgcaagcgatgctgccctgttgaacatcccattggcgagtatggttggttctgcccgaacttcgaccgagactgctgctgctacttcctcggatgcagttactcgaaggtctcaccgcacatctccttgggctagggtccgaagattccgaaattagatccgtcttgtcgctggttcgactgatcggatcgttctgatttctctctaatttactcctttccctctcttctcttcctccccttgatctgttgtatacaacacaacgctcgaccgtatccatctaggaccgtatcttttgaaaattaaacgtatctactgtgtcatctaaaaatatacacctatatatgttcattttgtagatcaccttcgcataagaccaagctagagcaagggaacgaacagttaacattcaagctgaaacttgcgcgcagccaattccattccccttttccccttattccttgttcctggttttttggttcaatctcctcgtgtttcctttctcgaggtagaaagaacggatgaacaacaaaggtgttttgagactttttgacccatagcaagacactcccttgagccagaatctcatcagtctttggtttacgtgctcagataccctcatccacactcgaaatttcgtcagaaggaaccgacatggatgaacaaggaaacctgttgaacaaatcactcatggccttgtcaacgcctccaaggaagacaggtccggcagaagggaaaaagaagaagaagaaaaaaacagagatttcggattttgagttaatgagagtcttggggaaaggttgcgctggcaaggtcagtcggatctctttctcgcaggttggttagattgcagagagcctaacagtttacggatctcgtttcgggatcgaaggtcttgttggttcgaagtaaggctacgccaggaggaaaggtctttgctttggtgagtattgctcgtcactcttttaatttgactgatctgcttctcgcaacccttggttgatgctggatctcattattgattatcagaaatctatcgttaagcgttcgtcctatcctatttcaaccaattccagtcctgttctacaggaaaactgaagctgcattctgctgtctacggaatttatgggaaaacacacacacaaaatagaccatgttctggtacatcaagagcttcagcatacgttgacagagcaatctgtgttgaaacgaatgtcgaaggagattcggaaccctttcgttgttcacctccatcactcattccacgatgctcacaatctattccttgttatggtcagtcagctcctgccgtcttcgttctcaggcaacaatcgaagattctttgttttcgagacagagtcagaatattctaatgtcctaattgtctaatattcatgtttcatcaggattttcatccaggaggagatttagccactcagttaggtagatggggcagatttgagaaagatcgtatgtaccttctgttctcgcgctcctttccgaggaggctacaatgaaactgtactgatctggatcaactcggtctgctccgatctcttctcacaggcgcacgcttttatgctgcagaaatcgtatgtcgtatttctagatcttctagatatcgtggacctcgcatacacaccactttcttctgacgtagtaattgaaaaggtcgaaggcgtccaagggctacatgcatcaggcgtacgtctctcttctccatcaaaccctttcacaagacaagtttggagttgataggtagatcttgtcttcatctatttttctccgttttgttggcacctctagatcatatatagagacctcaagccggagaacatcctgctcgaccaagctggacatcttgttttgactgattttggattgtcgaaaggtcggttctttctcaacgctcctttggatgttttggaacaaactggatgactgatgtgatcttgctttctttggtccaacttaaatgacaactcactctactagatttttccaggaaacccatttcgatctctcctgttaccctgggcgacggaactcttccacagttcgaactcaagagcgatttcaagtcgagtaggaaaagaccgagtggtgaggaacattatgtgggcgatggagcgctcgactcgaccaatactttctgtggtaagatacctggttttctctttctttgacgaccgttcggaaaagactcatgctgttctgatcggcgctgcgctgatttttatcgccatatcatgattgatgataccttaggcacagcagagtatctagtgagtcctacaaattgcatctgctcaagtttttcttatcaagaccggatgaataatgagtctgatcggttggattcggtaatcacaggctccggaagtcatccaaggattctcatacacgtataacatagactggtggtcgtttgggacagtactttacgaggtaagcgttcccttcctttgacttagattcagatggctgaacataatctcatgacacatattatccaactgatctgctcagatgcttgtaggaatagtaagttcgcctatgaattttggagatagaacggatgtgaggtaagttgcatctgacgaaatttcttgctgatcgtcttatgttgtgtccctttaagacacctttctacgctcctaatcatgtaaggcagaaaattgtttccataaacctttaccatcgtttgttctaaaaatggacttgtctttttgtgttgatcccgacaaaggcgaatatgtatcaccaagtgttgcatgacaagctgctctttccggaagatcgaccgtttgatcaggatacaaagagtctacttcgtggggtgagtccaaacccacatagagcttggttgaacctcttaatgacgctatcctttatgaccatcgctctttcggtactagcttttgcaacgtaatccagcgcttcgtcttgaagaacctcgaagtatgatttttggatttgtttctaatgaacgcgcgatttgagctctgacatctgttcgattgtcttgaagttaaaaatcatccatacttttcgatgatcgattgggaccacgtttatcataaacgttatatccctccttatgcccctccgacagatgtacgcacctttgtcgagtcttcttgagccaaattgcttgtctgattcgtagatctagctcagttgtcactgactctatcctttctttcctcttaataaggagaatgagaaggatcttcagaactttgatgagtcattcctagacatgataccctccgtagaggccgaagaaggtggcggtaagatttgaagcatgtatccatatacccgtctgataaagcgattgatacggtgtgattttataccctcaggtctcgccgccgctccgtcttctcagagtgcagcggccgctgctgctgcatgccttgacgatcgacaaagtcttttcgatggctactcttatcgagatctggacaccgccagtattgttcacgaagaagatggactcgtgaatccgtttaatcagtccagcacgtacatatcccgaacggatttcgatatagagtataacccggtatccgataaaggtgcccatatacccaccgatctgcaatccgtcatctgtaatcatggtcatattctggacgatcctacttcgcctactggttcttcatttttgtcaagtgaacagaggaaaggaggtatgccgttcgatcgttctgtcactctgtcagcaattggcttggttgcgctggctccatctgctgtcgacggactttgcaagtatcctgtttcttcagtcgaaggtgaggtcaatatgcctcgtgatattctcgtcggagaggatggtgatgaagataacgatgacgatgatgacgacgacgatgattgggacctgattgaaactcccaggccaggtctggcggagaagaatggaacgaaaggatccaccctattatctcgaggtgtagtggaccgatatcggtttggtctcatcaaaaggagaacttctgagtctctatctagaagcgaaaatgttaagaattttagccgagacggatctgataagttaaaaagctctcgaacgatcttacgtcgaaccaataatcctgagccggtaacaccttcctacctaggcactcctgcgccatcaaaggatttgttgtccgttgattcaagttcatctcgccgaggccttagctttcgaacaagctcattcaatcgtcaaacctctagctcgaccaacagaaacttatcggcgaccacagatcgtccacatagcttgatcatctcgacctcgtcattccgttcggatttcaatagatcgtcgagcccgagagggacacctttttccacgtcgaactcatctcgatttctaccgcaaagatctacctcgggcttatcgttgaagcgacgggtagacggcagaagcaccgttacgttgagtgtggatgaaaacgatcctttcggcatggcctcgccaaccagaatatcgagtggccaaaagatcaaaaagtattcgaaagctggatcagagaaggtgaagaacttgtttaacaagaattagacaagacgtgctttcgacgagcttgtcttgctcgtttggtcgttgtgtgtcttatgtaataggattaccacagatctgatcagtcttttagcccgcttcatgagatttcctctatgacaggtttcttttttcctacacacgcataccttatttcattcttggatccaccattgtatctattttataccttgttatgatccatatcatatcttaatgaccccattgaacctcatccttagaccgtttcctgtaccacatagcataccgtcttgttctttacgacgatagtaccctcttttcgtaggtaccttcgtttggtagtgaataagactattgttctcatgaaagtcagcgacacctgtcctgcaaatatccaaacgtatctgccagttcgcaatatgtctaccaaaacccgtatgtcggtactaagtaagagcaaagtcgagggcagtacctctcgacgaccagaatgaattagcaacgaagatgaagtggccgagtcctgtctttaattgagacatgtagagatctcaacagaaaatgagtttcaaccagcaataactagtcaagagataggcaaggttgggtgtaccaagtgataaaatacactggaggtgagttgagatccaagatttttgggaagtatgtcccattcctcttttttgtcgctttctcgttctctacattatttgttcaaggaagactggggagtcaatcaagttagtttggaggaaagagacggttagccagattctggtagtgagccgttagcctgtaaacggatcctaatgacttgtctgggatattgtattctcctagtggttcgcagggcgtcccttcccctttaggtctccgcaataccagtagctcccacagaatcctttctcaagatttgtgatagttccacctctctttcgctctttgtttctgctcgttgaggaagaggtaattgagaacagaagatcgtgattccataatccataatactccatccgcacaacccacacccaatccaaatgatgttttccatccctactttgattttctcgatcaatgttggttgaatcaagaaacagagagtgaaacccatcctgaagtagggcgatccgcttagtgggctcgtcgggactcctggataacggcctggagctcctcgatctttcgcttggatcggagaagcgtaccaagctgaggggagagaaagagaagtggcagagcgggtttggcgatagataacggatgggtttacacaaaagaatgaggggcagagtcggagataatttgaaagatagttgagatgagagtaaggaaagatagacgacagaggacaagaggggaaaagatcgaatcagttctgcaagctttcacatgtaccactgtctcgagtccgacaacgaaagaaacgcttggatttaacatactcgcttcttggtgagctttcgggccttcttgtccttggagtttcggaggagctccataactcgcttctcgtaaggagagaatccggcaacctgggaggtaaaaaattcattgggtcagatgttgtgtcctcaatcttccttccagtcccttccttctgtctctcttgtttcatttgtttttctgaacattcagggagaaaaatttccaaaaagtcgtaatcctctcctttctccattacaacactcctcccaatatgccccaactttgttctctcaaaaagacatagaactgaaaagaccaggaaaatgacaaaagcttacctctcggatgacggatcgaacgacgacattcttctggctctgggccccctttcgctgggaaggtcgggcaaccttggggatctgagcaagctctcggccagggaactggccgtatcggagaccggacttagtaggagccatctttacttacttgaggaggtggacaagagaggaaaagtatagcggcggaagacacagcggccagagctgaccaccgccctcgccggcatgggaattttttttcgacagaaacgggccctgatcaacgcatgataaatgaattatagctatattcaaatatagccacaactaagtctattattctcactactcgaatagtatctattcagcgcatcatcttcgtctagatcatctatagctcatctatagcgagcgaggggtttcagatacccaagcggatgttctgcagcgctctcggagaaacggctttgtgctagaatatattgagtatctgtgtgttatcatgactatcagctcgagggacattaaggagatagaaagatatacttccggcctatgacatccttgcccaggttcacacatcgtgcttgtttcgctcttaatgtcatgatccatacttcgctcttcataacctcgatcaatcgcattgtcagaatggaagatgtatcgaagataaagctgaaccgcttgatttagtcacattcgtacattctgatgttggatcaggacaactgtcgaacgtctgtgattgtgtgttgtgatactttgaacgaaaagcgtcgacagccttggatgctcattctcgaactaccactcccccacgctgcatcggcagagatgatgtccatcacattctcatgtttctgacgagcaccttcctttgcattttaaaagcaactcaattgtatcataacaagaatctcaattttcgtcttgtgcaactagctttccaccatcttcgctttctttcctctaatctcccgtatgtcttctctttgacatgtcaatacattcaagatgaatggaagaacttaagctgacattgaaggaggaaaaaagagattagatagatcaaaagacaccacaacaacagctatatcaaacccaaatttactgtgctactcaagccgccgtacccactcttctctgggaaccgagcgtcgaagagaacgcaccccggccacctctgccacctctgcctccccttcctcttgatgcacctcgcctctctcctcggccacgtccaccatcagcggcatctcctcgctcacctcctcgctctcctcgctctccggcggtaccgagcttgatctcgagcgccttttggttgttgtcgttcaagagcttagccttgtcagccaagttctgagcgagctgctgtacccgggtctgttctactcggtagaagacaacgactcggtcgatctgatcaagcgacgcaggtagaactccgttgtgaatcatcttggaaacgatcgaggtcacgcttcgcatcgagagcgagaatgtcgaagaaagcagggagagagaaagtgtgtcgtagaagggagcaaaagtgttgaggtaagttcggagaccctcctcctggatcttcttggcaagcatctcgttgatgacagcggcatcgccaagcaaagaccagaccttgatctgaaggatcaaatccctgcaaccctcccagtcggcgttctgcaaagctttgctggcttgctcgatacagttcctggtcgtctccggggcacccataaaggtctgcctgtcggcctgctcaagaagcttcttgaaaggcctcgaaggcaagcttcgaccgctctcgtcctcgcttcccttagcgagcatagggatttcgcaaagcatgcacgacaccaagaaagcggcctcggccaactcgaggttgatgtgcatgtggaaaggaagcgttcggagcttgtccgctcgctcctgttcgggagtggtctgggaaaacttctgagtggggaaaccctgggcgaggagctccttaggtcgttgggacgcgaagagctcaagaagaatcgatcggcactcggagatcaagcccattcggaaagcggccaaaccgagctgtacgatcgctcggttgtaaagaatttgggaaccctggtcggcatgctgaatagctccctggaggtgggacatcaaaagcatgtctcgggcctcgtagtatcggccactgagtccgtggtggtagatatgagagagcatggcccgggtccgggtcaaaccatcaccagacttgtaaaggtacacacacagcgtgtgaataagcgcagaaggcgaggcatcagctggcttgatggtggatgaagtgacagaggggatggcctgctcggcggcctgctcaaggtagaggacaactgggtcgggcttgaggtaaacgtgctccaatcgtcggaggacgactcgggatacgttctgctcaagcttgaccttctcaaaccactgctgagagagacccaagacagcataaagggcagactcatccttaagcctctcgacgtactccatgccgtgggcgtcaatccactggagggatttggtgaattcttcgtccaatcggtcaacaagagcgatcaagcttcccctgatccaaacagtctcgccctctccgttctgtccagcggccctctcgacccactcgtccttctcaagctcactttcaggaagaatttcaaccacctggtaagcaccgttctccttcactaaaagctcaaggagctcggtcaattcggctcgagcgctagtccagtcctcaatgggcatgtaagcatggatggaagggttgaagtcgaatcgggcggaaagaaggataaggagaattcggatggtagcgtaggagttactggcaacagatcggagagagttgaggatggaaacctgctctcgtcggtcggtgttctgataaagagaaaccccagaagacaagtatggaaatgaataaactgaaaagagaccaaggggtatcatagcgcccgagggctcttaccttctttcctctagcctcctgaatagtcttgagggtcttgaagacaccctccttggaaagatccagagactttccgccctttccaacagtcatgaattcctcatcatctccatcttcaccactggcagccttcttgctcttcttggccttgggtgctgggggctcatccgaggtcgtgccacgggtcgagagaaggtactgctgggtgtaggcctcggtatcctgaatgacagaagtacatgaaatgcacaaaccaggaagaaatgcagtgtatcagtttagatgattcgccttggaattgtaaagtaacggtagagtgacgaacctgcttgtagaggttgatcatatcctcattctccttgatggccttcttgaccttctgtttcataccgttgagagccttagcattggcctgcgagctcttcttggcagccgtcttctcagccttgagagaagcgtccacatcttcagggagagcgaccaaggcagtgatgaactggggagggaggtagttggtggttccgggaagagtggatacagcgagtcgctgaagaagtcggaggatcttgtcgaactctgttggttacagaccaaggagtgaggggacgtaaggcaaaagaagcaagctctgggtataaataagcatgaccaatatgattgaagagaaacttacccgtggcaatgacaacccagttcttcttgtcaccagtttttccggcattctcaatgctcctgagagactcgttaagctcgtcctctctataattgatacagaaaacaatgggcagttaatatcgttgttgtcatcggaatttggagaataatagcactgtcaacagccattgcgccgtctttcattcttcttagtaggtcgaaagacaagtctttttttttccttcgtgttgggtggcaacaacaaaaacaactggaaagaagtacaaagaaaagaaagagaaaaaaacagagaaaaatagaacgaaccgcttgtcctgagcacttttgacaaccttgacaccatcttcatcgtcatcatcatcactgctatcatcgctgctatctcctcctctcaagaaagcattggccttgctcttcgcagcgggcttcttctcattatcctcatcactcatctcttcctcctcttcagaacttgaatccgagtcgctgtcttcctcggaagactcgtcctcggagtcggtgtcaccagtggcaaacataccacctcctcctccggatttcttaatgcccgtagacttcttaggcttggtagaagaggaggaggaggcgagagactcagcctcggattcggagtcggatccaggtccagaagcgaagaaagacatctttgcttttttttcagttcgttgggatagagtttttcggcggaattgaatgagataggtctgtgagaaaacctggaggtgcctacgatatataaatcgaacgaggcagagagaaccgaacgggtggaaagcgaagagtttggggggggattgtgaccgtcgaccttgtctgaataaaaaaggtaaggaaaaacgaaaatcgtcaactttcctgaatcttggttaagtattcaaatttgtttggcctaaggttgtactaggtagccaccaccttcatactcccatgcctactctcatgcctactcttatacatacatctatactctcttgcgcacatacgaagcgagaagattctgatggcttgtgatattcttcatagactgaatttcagttcacttcctcagtacgcgcaatgagtagagatgggaatcagccatatagattgaagtttgagctgagaaaagcctattctttgcgttttgttgactacaactttgtcagattcttctctatgtcagagaacttggccagagagttcgctcatcctatccgcatactctgtccatcatataaccctcaagtcagaacgtccttcgtcgtttgatgggaagagtagtgaattctctacacgtgactgaaaagcggtgcaggtcaattcaagtcaccgttcattgatagacaactcaacatctcatcctcctccctcctctatccagccggccaccaaagagaggaacgacatcggcctggaggcacacagtcagactagctccttgtactcttttctactcaaacagattcggttttgtctcctcaagaagttcgatagattgctcctgcactggcccccttccttcctgttcaagacgatttctttctcatacaggcagatacagctctaccttttaggagcgtggtggtaatctgacacaaaaaactgtccttaccagaattcggtaactcttttcctgtgtatactcagtcgttatattctcctgaatcccaggctttgatctacaatcgtgagttgcgtcaaggtaacccgactgaaagaaaacaagacagaatataggagttaacaatccttcagggcgatctcgtccggttctatatctttccaagaaatatcactatcatgaactctgctagctcttcctcatcatcatcttcactcccatctatctctgtcaacttgagcaatgaggctcgtttccgaaactctggtcatatcaccggtcaaccgctctcgagcgctcctgaacccataagctctgaacgtatgggtgtttcttcaagtgagactgcaaatggctcatccgcccggtcaaaaactcgagagacctcgaaaaggttgtcgctcgtccagccctcttctttccttcctgttctgtccggttaaatctaaaccgccctgaagtctctgcctaacctctactctttctctgctgttcagttcaccctcaggccttctccccatctttcggtcctttctctctcgctctctcccaagatcatctcttcatatagccaagcttcagcgaacgctccgtacaccttggctcgaccaatggttcctcttgacatctttcttgggtgcaactacgttcttcatgatatttctccctatcttcttcttcttcggacagccagctgtaggaagagagcttgtcctcgtcctagcagcgggtatctacttctccagcttggtcaaggatttagtccaggttcctaggccgtcctgtccaccggctacaagattatctctgtcagtttttttctgtcagtcttgatgatctcttttgaggatggagaagccctaactttcattcgcaacgccttgggggatggactgcatgcgctgatagggaataccatgcgctcgaatatggattccctagtagtcattgcacaagcacaacgtcgttggcgatctactactttatcttcttgtcaagattcgaggtcgagagttcatggctgtggtttggaggaggatctggtgcgtccctatctcttcatttacatcatatatgcacaaggaagaatggacgttaacggtcttctcaatctttcttttattccagtcattgtgttcatttggtcgaacgtctgctttggtcgaatttattgcggcatgcactcgtcaattgattgtctcttcggaatctcccttggtcttcttctagcgtatctgaccgagctattccatccttttttggaagcctatctggtccaacccacagctcttgtcccattcacgttaatactcggaacgactgtcttggccggaatcagacctgaaccggagcttccttgtccttgctttggggacgccatcgcgttcttctcggttgcggtaggaacaagcctggcgagatggttggaaaccaaaatctcaggtgatcagtgggataccatcgggactgtagaccgttggagtgaggtcaaaagaggagatggaagtggaaggttgagtggatgggaagggtggctggtttgggggttgctgattggtgggaagtatatgtttggttcgtgtctcctttctgccttgtttttctagttcgtgatcaagaaaagccgcacagcaagcgtggtgaaaattaaaaagagtttctttcggttaccaggaatcgctgttatcattctctatcgactctttgccaaactgtctctgcctttagtctaccgtgctctcctcggcccatcgtccgactctgcccccgttcagcacaaactcctcacgactccgagcacaagtgccagctcaagtctgagcttgagttcaaacccgaccttaaatagaccatcaatccctagtcctgcaaggacgctatcgaccgaatcgaattcttcacatccagacattaatcttatcccttctgtcgttgatctcggagcattgaacgagcctgtggtgaagagtgaaccgaaagatcatatgcgaggtaggaccagtagaagagaatcaggtgtcagtggaggagcagacatcgtagtcgagggagaggatggggaggaggtgaagtggcagggaagccggtcgacaggaagccagggcgaaggtgaattcttgaaatctactcgcgaaggtccgtttccatattcttcctcttcctccctcttcttcttcttcttcgctttctctaaagtgaacgtgagaatcagtcctgacaagaaaaccaaccttcatttttatacatcgaaagttgtcacgaaggttatcgtctactctggtataggtttctttgccgctttcatcattccgttgatctttatcacttcagggatcggtctccattcgacttgatgtatatgtatattataccttgactctgtcgttatctgaatgattgttgtttcatcttaccaaatattcctttcttaaatctccgtacccctctctgtttggctcgactacgcttgtgccctcacagcagatcaagagaaacattcatgacgatcatgagtcaaacaacaacggacaattggaaacagagagcgagaagaacaaagtatatgatatagcatgtataggaaaccgttatttaattatcaaggaaaatgaagaacgacatcacgacgtcaagatttgacaagatgaaagaatagagacgcaaacaacgaagaaagaaagaaagaaagaaagatgtggcagaataagaaggatgagctattcctagctaattaagccttgtctcctttgacaaagtgcttgagcttctctccgatgctcatcttcttgaagtttccgccgctagtggacgaagacgggctagaagggacatcctcgtgtcgagtaccagacgagactcctcgagtagttccggtagtagcggagacagaagaaggagatgcggtcgtatccgtagcggcagcggaagtggaagaggttccgagaggagcttgagcgtggtgctcctcaggtggagcggtgaaaccagccgaagggaggttggacgtagcggtagcgggcagatccttggactcggatcggatgtcggagctagaggatgaaactgaatcctttggaacggaaccggttccaacttcggactttacttcctcgtcgcgctggggagaagagtaagaatgctgtaccggggtagacttggcatcagtgctcacgtactcggacccagagaagggcacagtagtcctggtagagacgtaagcctgagattcaggacccgtagtggtcttagtcgcaaacttgtctaaagaagagaaccaagaagaggccatgagactggatgaataaagtattcaagacgaaggatgaaataacagaaaagacagaagaaacttaccagagccgaggtctccgagaggttgacctagaccaaggtccaaagtgccagcagtgtagctctgagagatggaagaagactgcacagtctgcggctgctgctcgtactctcggctctgcgtggcctgagtctgataagagtgggagctagattgttggtggtggtgagcgtgctcgttctcccttcgactctcatcaaacttgagagagtctagtcgaggctcatctccagcgacattgacagggtgaccggtagcggtagagttcttggcggcggcggcgacttcagaagcaatcgttccggctaaaccaccgatatcggccaaagcccctgcaactctgggctgatcgccttggacgttgacagggtgtccagtggcggaagagttcttggcggcggcggcgacttcagaaccgatgccggagagaccaccctgaggctgacttcgggaagtggactgtgaatattcagaagaggaagacaggccggtagagttgtctctaggaagagagatcttgggctcatccccggtaacggaaactgggtgaccagtggcagaagaggtctgagcggcaacagcaacctcatcagcgatcgtagcagctaaacctccggctccttccaaggtgcctcggtctgcctgttcgggcgaaatctcgtttcggtatacgtcctgagtagatgcagaagcagcagaagaggatgggacagttcccgacgggttagcagcagagaatggggcgtttcgctctccatctttaggaacaacagctgtagcattgcctgatcaaacaaaagagacggaaaggatcattagaagaagctcattcggtcgaaggctataggaagcttaacaacgcgacgctgaacttactagtctgttcttccccaaagatgaggcctttcaagttttgcacaagctcacccacggtctcctcggctccttgcctgatccctgcgacagagggaatctcggtagtagccagacttcttccatcggtcttggttgtacctgtagggatgatctggtcagccgaaggagcttgctggtaagcttcggaagcttgggcttggatgtttcgagtagtgtcggctgtattctgagtcgcggatgatgtgatgtcctgggcgacagaagaggtagtctgtgctcctcgactcacggattcagtcgcagtgttcagccctcgctgggcggcgttacttgcatcctgagcaaactgctgggtggtagcggcagcaacctgagctcctcgatttgcagaagtagcggcagagctgaggctctcttgggctgcgacactagtatcctgggcgacctgttttgtttgagtggtggcagcttcaatgtgaggctgagcggcgtgaaagaggttctgtacagcatgaataccagtggagagagcagactgagcggttactgaagcggtgtggacggcagattgagcttgggttgcgagatcagctccggcggtggtggtggtagtggtggtgtcctgatggggaacggtgttagtcgtggtctgaataggatgttcagtagaagaggtagtgttggaggtattggtgtgaaggttctgtgttaatgatacggggacagcgtcttttaaacgacgtagggggaagagtgtgagtcataagaggatggatagaattgagatgctctcgctgaaatggaatatagtcactgtaagcagcctgcccaacctgagaaagagcacttgagatatcctggtagatagtggtttctgggacagcaggtgtagtgctggtaggaccccatcctccgggcaactcctttccaggagtgatgacggctataaatagggtgaagggaatgaaatgcatggtccggcagtcttagcgcacaagcatacacagagtagatcggcgaagaagacaagcgatctttcagatagcgcacgattcacaatcctgcctgaagtttccgggtcggtcgagagcttcaatatctgatgaatggctgatgggctgcgcgggtgcctgaccgcctacaccttcaccggaaagcgtcattccggtgaaggaagccgtgccagcactgatggaaggggccgatccagtgctggtagtggcatgtgccgcgctggaggtcgaggttgtgctgttgctagtggtctcaaaggcagaggtaggaggaatcacatcgggtactcccttctctccagtggcagcgaacggaccagggatgggacgagcagagtcaaactcggcctgagtgtctgccaacctggatgaaggtgctgattgtgtggggatagacatgtatatatgtgcgtgtgtgagaggaaatactaagggctgtagcaaggagaaacttggtgagatcagtgatggaagctggagatgaaggttcaagatgaagatgggaattcagagatggaaaagaaaagaagaactggaggcccaagcgtcgggaagatattaagggtgcctggctggcgtatgtgcctgacgttctcgccatctgctcgggtatgacgtaacgcgagaacggcccgacgtcactcgtcatatgtgttcggctggagctgtcagggatgtgacctgagtgttacacctcggtaaccttcttttggttctgttgtttctcctgcctcggt

SEQ ID NO: 2701 - DNA, 17614 bp, Xanthophyllomyces dendrorhous
  misc_feature (10778)..(10787): n is a, c, g, or t
tgcagtctcgtcacgtgaatacacagcttcgtgagaaccctaacaaaccattaacattttctccttctccgtactcactttaatacttctctcgcttgtttcctctataatctttattggctctgtctcgatactctgcctctctttgtctgtatgcacactttcaacttttggacatccttctggtcggtctccaagagctgacgtatccttatgttacttctcttttcagcacaccatgtccaccgtcgcttctggatccgctccggaacccacttctgagcccacaccaacgatcgcgctatttgcccgaggagtctggtcactctttcttctctggcctgcactccgactagctgtcgctcaggaatggggaggaccggaatcaaaggagaaacgactttggttcgcttctaccatcgtcgatgagtttgaatccagacacttgaagcattcgacctcaacccctgccctcactcctccttctgctactgccactaccagcatagcccctgtatcgagcgtggtgtcctctgagtcgatcaccgccgaactagcagccacctcactttccactctcgtccctcctccatttggactcgacctagacacgctgagtgacctgttgtttgacatccttctcgaagaatttgagacggataccgaagatggatcgaccgaacaaatcgcgaaacagctcctcgtcctctggtcggctgctgtcaacttggacgaatcactcgtcaagcaactggagattgaggctgagaaagtttccaagagcaaagttcaagcctcccagggagcgggtggagatgatgaggacgacgatgaggacggcagtgatgattatagtgatatgagtgagggagaggacgagagaccaccaacgttggtccctgcagctgtcaaggaagaaccagagatagatgaggacgggttcaccatggtcaagggaaaaggaaagaatagatgatgggccggctcggtgttgatagaaaaaagaattgttataaacatcatttatctcctgaaaacacacgcacacacatatatatatatccgcctcttcttatttttcttcaagactaacgacacatcgtattatagacccgaaagcttaccagacccgacattccttgaccaattccataacctttccgaatctttccctttccctttcccaatccggtctatcacttccactcagacttgacggcttgaatcccaacccaactactaccggtctctttcctccgccaccaccgggaccattgtcacgttgttcatcatcccaaacgatggccgccaactgagacacatacatctcatagactggttggagatcagccgtaggcgccgtccccatcagagggagcaacgttgttgccgggtgaggttgaggtaaagcagggagtagacctgtaggagtcgacagaccggtcggaggcagggagaccgttgatggaagtgaggcttgggtctgatatgagcgggaaaagtatgcgtgaaagagaagaagagtgaaaagaaaaggaaggacgagcggaaatgagtaagagagcaggtatattcagaaaagaaagaacatacaagagacccaatctttcctaactgagtgaccaagatcaagactctatccatgaaagcttctactacgatctccgttgctaaaccttgaatgacgaccgaggcctgccgagttcgtatcggagatggtaccgcttgggttgatgccatgttcttttctttcggcgttcaaagacgaggaaaggagaagagtgcgatgaaggtatgtgtgagaggttagatgacaagtgagaaaccaaacaaagcacgcatgcatcaaacatcccacccctgcgaacttctccaatttgtcttccatgattttgtttggaaagagaacaaacgtaatatatgatcaaatattcatagttcgtttttatcttctctcaatgaaaagaagaactgtatatagtataagtacatactgacgaagaacagtagattaaagtaaaaatgtatagatcttttatgttttaaattgagaaagagataataacccatagtattacaaagacaacagatttgagctcgaaaagaaccggaaaagaaagaacaaagagacaagatcgagattaaagatactagaaaggaaatacgaacaaacgagagaacgaacagaaaacataccaaacgaacagacaaaaaaaaccgaaataaatcagagaaagtggaagaaagaaagaaagaaatcaatgatctgtccagccttgagcctccgcccaagctctcacagctctcattgaccctcttcgctcaacgactgggtccagcattcgcctcaaaactcttcgcatgccctcgctgacctcatgagctgagtacagcgttgaacaagggtagaacatcggaactcctcctagaggcttttcgacctcgatctcgccttccaccgccgtcgacggcgctgacaacggcggcgagggcggtaaggacggaaagcaagtctggatgggaggcaccgcagtgttcggtcgaggagacgaaggatgtacatgggatgacgaaccgaacgggaggaaagtgggcgcagaagacaagagttcaacgatgggattcttggacgaaggttgagtacctgagggtatatggccatcaccgtcaccgtcaccaagaacgccaggttctgctgactcctcttcaggatgaatcttgactatctctgtctcttgagcctttctcaccgcccgcttaccaaacaggtcgcccagcctgaccttcccacctccactgccatcagctgccaagtcccacccaaccctttttccgtcggctgccacatctgccatgtacgccgcggctgctcccttaccgtgttctcttaaactacctcctctcctgaatgacgtgctcgatccgaatccgaacaaacttccttctccaaacgaagccgcccggtttcgttcttcccaatcccagaatccaccccgagcgacccagaaacagagctctcttgtcccgctcaccccttgatatggttttcgacccccgttgaggataacgtagagtgaggcccctagagagaaaacatcggacgggaaggatacctctgttgttcggagaagaagttcgggtgaagaataggatgtcgtgcctcctccgctggcaggaccgtctgctaaggtgtgaaacatcgagttgtccgattgggtctcgagagtagaatggaagagtgcgcttccaaaatctgtcagtcgaggccggagggtggcggtgagaagaatgttttggggcttgatatctcggtctatagggtgtgtttgagtttcacaaaacgtggtcaacaagacatacacggaaagaaagataaaccaaggagagcaagacttacggacgacccctcgggcctccaaccattctcctccgtatgccaactcgccaacccacttgaggaataactcctcagtgatcaattccggatgagatcgaacaaagccatcgattgtaccgaacgagcagtattctagtagtaacaccggtctgaccgatggagaatacatgtctgccgatgaaaacgtttcattgaccatctgccccgaatctatcgagtatgtcggaaactcggtgattgtggtcggatttgaggagcctgctgttgtcgccgccgatgacgttttcacagcaaacactgcacgttcgtcaaatccgtctagaatgttgacagcaccataacaactgacaagtcccatctttcccgaaccgatccacctgagaacctgtccttcttttctgagaactgcccgaccatcaacgccattctcagcgatcggaacttttgccgctgctaacgtccattcccgttctttgcccttactggaagaggatgggcatggccggaaagcagagagatacacgttcgagtttgcgccttgaccaagatgatagctagccgaatgagccagtcgaacagaatggattaccggctgatcctcaggttcgctcaggtcgagagcggcatatgggtagggagcatcccatggggcaagaggataactcgatgagtcgagtggcggcggcgagggagtactaagtactttcgggatagaaggacaggatgatgtacgttggttgaacttcggacgagcgaggaacgtggttccttgtttgcctgtaacgaaagagctgtcagtggctgccaagaatgatgatgatgatgacgacgtcttgagagacgcggacgcaggcggaggaggaggcgggggtgtaggggagaacattggtgtatcaaagaaagaagatgttcgggaggatgttgatgagccagacgcggtcttttggtgaccctttggttttgccgagggtgtgagagtgattgatggcttgaaggtgtttttggtatgggtggtgctagtgttagggctgctggtagtgctactgctgctgggactggaccacgtggcaggattggtccacggtttgtagtcggctttcgcgtgttccgggatgggaccacacgtcgagacatgatcgaccgtagaaatacttccatctagctctggactaatctcagaagaggacacatctgaccaagatgggaccaaacgcagaggaggtggtgcattcgacgcgggaacaactttccattgagagctaaagatatcgttccgggaagagggtgtgttgaccaagggttcaaagtcgatgccattcgactcaaaatctggactggacaagcctccagatgaagacgagcatccaaactgagagggaacgataggaggtggtgaggatggaggcgaggctggacgtgcggaggacatcgaagggtgtacggcgatggagagcggagacatttgtagggtgtctgagctagttgatgtacgataaacccgaaactctctgctctaaagatctatcctcagagaaatcaagcaccgaaccagacagaatctgcttaggatatcgtgcttgaatagaacggctgacgctatgtctttcctgggttgataaggatggtcgatggtcagtagaacgagagttaattaacgaatgaacgaagaatgaagaggccgggacggagtgtggcgggttacgggcttggctcacgtgtgtgcgtaaccccggccggcctcttcgttcagcctcttaacaaacgttttgttcaatgttcaaggaaatgagaacgggattgaagcgagaatgtgcgctgctgatatgagcacatcgtatgtcatccgggatcttcatcactgtcatacaagtggatcgttcaagaagtcagccaagaaaggatagactgtgtgctgatgtagatcacgtgaggtctctgtgaccaggttactctgtccatcgcgaatcccttcgagcgactacctgtacgtatctccacagcgtcgagacgatagagctgcacccatcatccatcagcacaaccatacctatacatattgtgtttctttctagatggatacagaggaagcaggaccatcagctagaatttttgccgctggcagatcagctcgtcaagtagatgatgacgacgatctcgaatatccctccgagcctctctttggccagccaaacgagagccaggaggtcaaacaggacgaagatctttagtacgtgtttctatctggcgatctgttctaattcttgtcagaaggtagatcaaatgcttatgtactctaaaagttgttcactcaatcgctcagctcgatcctcaatgtttccaaggatgcttcggtggacgtgatctctcaaagatgttcgtatacattaattgcccgctctcctcgacgtactcttcatcttaattgacactctgattgatacttcttaccttacttttttccagatcggtccctagtcgtgctccttcatccggacaaacaacgcaatccttcggcaaaattcgcagcagagacccaattcagacggatccaacgggcgtacgaaattcttgtggacgaacagaagcgcgcgctgtacgacactctgggagaggaaggactcaaaggaagctgggaggttgggttcaagttgaagacgccggaagaggtgacttacgttttcttcagtgctaaacttgtttgagcccttagagtatgcttgtacgttcgtactatgctcacatcccactttatattcttttcagatgagagccgagttcactcgacaggcaaatgaaaagaagtttctcacccaacagcgacttgtcagccccaaaggtaagagtcggctcccctcctgtggcgcttatcttgtgcacctttgctctgtatctgatacttgacatgtaacaaacttgcaggcgacttcaacgttcaaataaatgccgaatctctccttgctcctaagagcgcattctacggaccaagaggaccaaagaacgacggcctgctgactcgacttcgattcgttcatgcaagagggctgacgttggctcattctttccaggtcagtagtcttcctaccctgttcggatactcgtgttagatctgatcgaattttaactatgaattttcttctctcacttgttcactaccatcaatcaacaggttggcttagggcagagcacgatgcttgacatcgcgggaaccatgactcagcgtatcggacagaagcgagcggcaaatagactaggcggaacgatggtcggtacaatcaagcaccaattttcacccaggctttacaccgaggtccgtatattttcatcttgcgaaaggaggattctctgtaagctgtttggctcacgctcctgacttaatctttaggttagcgcatccgtcttgaaccccaaattattagctgttcgaaccatatacgaaatcgacgatgaaacgtacgacttgtttgacctttctttctctgtctttatcttcgttgctggactcatgttgactttttgtttattggtttcaaaaataccaacccctcaccagtgctcttgatatctctgcccgagcttttagccctctgacgccaccaaacattgacctcacacttacccgacttatctatcctactttgaaatcctatctcacccttcggtccgggtctttcggctatcgaggcgatgaatcctctctcactatcggtcttacttctcacctaggagatactttacctaccaacggatggacggccgagattgagtgtggaccaggagatgtgggcacaaatctggattggtcaaaggttgtttgggctggctgggagtttaaggtcggaggctcagctgcgctcagtggaggaaaggttcatctaagctgggcgagaaagatcacaaagttcatcaaggccacactgagtgtcgaaggtgcgttacatctttctcttctcttccctctgccgagtctatttgccaaatctcacaatctggctcgtcttctcataacgtgtaatgtacagctgaaaccaccgctggattaactctcaaactgcggtaagtcagatcattctcatctactttaaaaaaaaaagttcaaaggactttagcactaaaccattcatctcgactgaccatgctacaggctcttccgactcggtcaacgagtgactatcccgatcttgatcacaaggacacaatcccaatggctcgtcggtgcttttttggcaccttgtgtggctgttggggtagctcattatgcctggcttggacctaggaaacgaagattggcggcatcgtgagcggatctttcttctgttcgatcaccgtattcttgtttactaacatagatcttcctttgttttcttcttcttcttcttcaacagtcgatggaagcaactgcaagaggataaccaagagttgatcgagcaaatgaagcaagaggctgaacagacggtcgagatgcttcaacctgttgttgaaagaagaattgctgaagaagaaaaggccgatggttcgttcctctctccattgattccttctaaaacttgtattgtttcctttcttgggttcgattaatgataagagaaaaaccctttgatgtgtctatccatagggctcattatccttgaagcccaatacggcgcacttcagacgttctctgcccgttcgatgccttcctcctcccctctttcctcaacatccccagccccatcgtcaaaagacagcacctccacctctgcagactatattgacgtatcaatccctctccaagcactcatcacagattctcagcttgtgattcctcgatcaaagaccaaagctggtctactagggttctgggatccttgcttaggcgcgaagaaatcccttagggtcagataccttttcaagggcaggctgcatgaggtagtcatcaaagacagagaacctctggtactgcctcttcgaggtacgcttttcttttcctttctctccttgcttggctttttgtgcctcctgaccttgaaatgatcggggttctctctttttacagaacacgcaatagaagaacgataagttgatatcaaaatataacaatcacacaaacaacccataattatgaacaagataattctcatcacagactactcaatcaagatatctcgtaaacggaggtggagagatttggagaagttgaggagaaccgtggtcggagacatacacacgcgcaaacacggcaaagatagcaaagacaacacaaaaacagaaacaaaaacacagaggaaagtgtttggatgttcaccctcgacgatcttggtgatatttttactcttcctctttctttacttttctcatcggacgtgaaactggggtttcctcttcttcttcatcctcagcttcaagtttgaccttggactctgccttgaccttccctgagcccttttgtgtaggcttggtcttgggagctgctttcttagctttcttccgaggaggaggaggtgtcgaagatgcctctgactcctctgaagacgtttcttgagcggactcttcggtgtcctcttcgtcactcaattcagattcagattcagattccttcttgacagtctatgatcaaatatcaacccgttgagtttccccaaagaatgtgtgaaggagaaagagagagttgtaatcaacgatgagagccggtaaaatacatgtatgtacatgagatgctctatcatgaacagagggacgtactcttttcttcgatttcggcgcgggtttctgttgaggcttggccttggctttaggtttggtggaatcggattcgtcttctgatttaacggcctttttgtcgatatccagtgttatccacagatacacaaacaaacaaaaggctcagcaagtcaagagcctgtatcgaacaaagaaacataacagagacaaacggcgcgttttcgctctttcttgacaggttttcgatcttcatcgtcgctttctgtgatcttcctcttctacagagaatgagaatgcatagttgtcaagaaatgtaacctccctgtgtcttagcaaaacgaactcaaatcgatcaaaatggacggctactcacagtcccgctctcctcgccggtcttagcagtctccccgtcttcagtctctacaggtccgtagtgttctctaaggcgagcgactaatgcagtcttcgacccactcttggagatctgggcttcatccgctttctatgtatgtgaaaacaagaactctgaacagtattagaggttgttttgtcatgcaagactcgaggggctcttctctggtaagaggatcgcagaaaaacacgaacgtctttgagctcagccactgtgtatgaatccaatgggtcctatatacccgtggtaacagaagagcatcccgaggtacttggtgagccagctattattctttcaggctataaaatgtagccgggcatctgagaacgatcagaacaacttgcgagacatacaggtgctccaaagatcttgaaacctggaagaggaccgtaatgctctctgagccgagcgactagctcagtttttgaacctgttgttggtagatcttcttctttgcatttctatttgcatcatacaatgataccgtattgtaagaggtaaaacacacatgcggtttataatatgacagtcagatcagatatgttaatagtagcagaggtggaagaagggaaccaaggacccacagctttagcttcaggagtcgtcagctcattcaggggatcctgtggtcgttgaaaacgacgagaaaagaagcatgtcagacgatcatacgaggaagctcaagatgtgggatgacgagatgaagacgaacatgacctctagaagcagcgtcagcttccgcaactgagaacgcgccagaaagaggagaggagaagcagtgaagagagtgagaaaaaccacgctattgaatgaagactcaattatacacttcttactatggccgtctttccaggccttgtcgatttttgcttgatcctctggcctgttgaatacaaacagccatacgcgcaacaagactacgtcagcacgagaagaaaaaagaaggacaagggaagaagagacatcggagagggctcaccttaggtcctcatagccgtcgagatctgaaggctagattatacagaggttagtaatgtttagtgggtgatcacatactagccgaaccatcctgtgtagtcccctatcgacgtacctcgtctaattctatcggccggagatcaaacaacaaagagagacaatgtaagctcaagttggttgaatgagtacatggagacacaacagacgaacccttcttgatattggctatggttcttggcgagacacaactatttccgttaaagaaatatgttgtgtgtgtgtgtgtgtgtgtgnnnnnnnnnntgtgagagagagagagatatcagcgatcaggtcatctttacaggacaatatgatcggcgtcattgttagtctagtcaggatcaagattcatgaggacatacccccagtgcctgtaatagatatagaaaagagaaggaagagaaagagaagagcacacgttgatttaatttcaagcgaaagatatgaggagacaaagaagttcggagggagaaaatgatcaagattctgcttacttccaagccatgcccgtatggtccataatctaacattggagatacgttccggaatgatggacgaagcaagaacagatcaaccatctaagtatcatcctgatccaacttgttccataccgggtggtttcgaactaacctctacaaccgtctgtcatgtttcaagtccgacaccgagtgaaaagaacgccagagaaaggaagggatcaacatagatcggccttgttgaagatctcgccctatcaacgggagctactgaaaccaacatacgccaagcctgatctctcctttatcgatctttgagcctgttccattttgacagaagaaggagaaagggtttcaaccatcattgaaacaagttattctatcgcatcggacacgtttgcgggatcctacctgaacatggtttggggcctagtgagtaagacaaatattccacaaacaaacagcaaggccagagaagttgattgttaaggtggtcatgttcgaaaagatagcgaaataaagacatggagtcaaacctttgcaacttgatcggccagtagaggcataatcgattctacgaggagatcaaaccaattttgaactcgggtgaggtaggtctaacgcggaatggatggaacaaccaagaaacatgaacagagctttacctgtaaggcattctcttcttttttctacgaatgagtgagtatgtgtgatctaactttgctttcttttcacgagtcggacgttcgttgaaatcagatcgttcagatttccatcaaacgactcaatcgaaagacgcgtcaagaatgtttgaacgcgttagatgagcgcgtgtcgtcatattgtgcatagctcacgtgtcatcacgtgcgttttttccgccacagaatccacaaagtagtctgccatctgaacgagcgagctcttcgttcaatggaacaaaacaagctcaccctcacaaggaagaggaaggagagataagatggaccagcagtccaagagtagtctgaattgagtttggttgaacctggtctgctccccgagagaaccagcacaggaaaacaaccagctgcagattgcactcaagtgtgatcttgccatcccttcggtttctttctcaacttagtcgttcgttgacgagcgcaaaacaagtaaatagagaaaggaaacacagaagggatgtagccagaatgtgaacaagagacgcgaggtttgactcccacgccaaattctttctgcctccagcgttttccataaagaagacagccagatggatagattgcacacggtccccgcgacgcttccaagacgaacacccccgcctaaagtcccgagagactttttccctccttcaactcgcccaaaggaaagtgagatcttggggaggcttaagcgagacgggagccgtcggttttcgggtgcgtcactgcatcccactttgcccttctcgcgagaaacgggaaaggcaaatgatcagagatgaactcggctagagtctttctggttttttaacataaaaaacatgggggcactagaatactcagaccttatcccgctcgggagaggactcaaagacccgggtgaggggttttggatagtaggtgacgagctttgcagcctttggactaaatgagaggtgatgcggaagggtctgttaggatcgaaacccaaagacatcatctgatgagagaaataggacggtctgaacgaacctgctggcggtgaagaggaaaagaaaaaacagagctggaaaaaaaatcaagaaaactgatagacaattcaaaattggggctccctctaggccggagtttgaatagtcacggcaaaagaacatgggcgcatccgagatgagaaagagtgagagtgagagtgaaggtgaacctatgcaaaaggtagacagtactaactgaagactgatcgggtcagtttgtttgcgtgcgctcatagatacaccaagaaaacgaacattgtccgggaggcgagaggatgaagagtgcgggttcgaacgtgtgaccgattgagaaacgtgttcttttttttctttttctttttttgtaatagctttgtgtctttttgtagtcccactctctagttcctccttggtctttcctcaagccgtctcgtagtctttctcgtagtctcttttgtagtcggctgtcgtacattctgtagtcgaatatagagcgaccgggtttgtagtgtttcctgacgaaactctgtagtgtttggctaacgagttctctattgaatgtcctagagcttttcaatagaacgcattgtagtctccattacaaaaagcctataggaaatgcttgatgaatatcactctttcgccacactctgctggccttccttcttttccaacattcactcacttctctgccatcttcatctctatcttcatctttgtcgttgactcgttacctgctttgacaatctcctttagatctccttttatgaaccagcccctcggtctagatagcccacaggaaaatctctctgcatcatcgatctcctcaggtcatacaccacatacacacagcttggatccagccgatcaacatgataccctagtcccacatcgttcaaaaggcaaagcgagagaacctcacccgactattaattcaaggaaggaaaatccgaggagaacatggggcgaccacacagctagctcggatgacggtagtcaggatggggagatcttaggcggaccaatcgtgcagacttcgtgagtctctgtagttcaatcagcgttgtctctatccagccgctgatctggccgtattcgaccgatgtccattgatagcccgctcctgaatctaccttcagaaaccctccttcatattgtttcttttcttcctccatcatccttgttggacatccttcggacatgtcgcgcgctcaacgccgcaatctctgatgaggcttcgtggaaggctagctttgaacggacatttgtaaggccgggtctagccggtctaacccgaagctgtcttcccggaggtggcagcggccaagggtggagaaaagaggccctagcccgggagagactgatagagtatgtatcttgagcgctttcctgtgctttgtatcctcgtatcgaatgctcattcatcttcctcacgttcacttcgtacgcgtcagtgtggtctccaactcaaacactgcctccttgctgtatgatccccgactatcctacattcattcgtttgcagtaggctaccctctgcctgctcccaagacaccgtcctaccagttccgagcgccgactctattgagcgcaagtatcgccatgggtgtctgtaccagaaggtccgtctctcacgcgtaccaagctcaaggaccgttcatcttctcttcatcattgaacatcttctatcgttttttcttttatatcatcatagtaacccgatgactggcacacttgtcaaaggctacttggattctcaaggctcaaacggtaaggtgtcgtgattgttcagtagaaatctagaaatgataaagctcatgacgtcaggaaactatttgcttctctcatcagaccataccttatggagcattcctcagactcgtccaactgccctcctcttgtctccaagagatccctctaccgtcctttggggatttcaagacggacaggtcgcacagacctctatcatcgccggaagcggtcgaacgcccacgctgaccgctcgatccagaggagtcataggccatgatggaccagtgtggtccttggtatttggcccgcccgggttcttcatcagtggtggccaggatggacgcgtcaagctctgggcagaaagcacaggagatcacctgatctgtctctggacgagtgagcaaccggtccgaaagaaagaaacatcaaccgatggagcgcctcctcgtccatctcttgggccagagtatcgagctgtctctcatgtttgctgggacgctgcatcgggtgttgtggcgagtgtaacggaggctgggcttgtcagagtatggagaggcgtattcgctccttcagaaggaaacgcccatgcctcgacatcaatccagccttcgtctatcacgtcttggcaagaagaccgagaccgattctcgcctgggcagaccccgatgagcttttgtttggacgtcgtggatccttgtctgattgacaaaagagaccaaggcaagataccgttgactgtcaatgtcctcctccggatatccggtcgaccgtccttccaacgaatcaccttccaatattctcttcccttgacggacggtggtatcgataaagcttccgaggctgcctcgaccaccctgaccactttctcaccctcttccgccgagggctttccagagttgaccacactatttgccgagttcaaggttcccccaccaccctcacttccgtttcacagtacgccctcagtgacaccgtccgaaccgtcaacaccgtctggtgtgcctgacccaatgaaaccccaggtgtttcacctagcgacgagtactatacttgagaagagagtgaatacaaggggatccctcgcgagcaacaagtttgtggtagcaggtgatgcagaaggcatggttcgaatctgggactgggatgttgatgagaaaaacacagaggtcttgccgttgagatcgtggagagcggcggatgggaaggtcaccgctttagagtgtcaacagggtttggtcgtggtcggaaggtgagttaaagattttaaggatacttgccattttcgccggttgactgatccatgtgtgtgtgtgtgtgtgtgtgtgtttttctcattcttctttgcttgaaattagcttggaaggaatcgtgaagatctgggacccactccaggagatccctttactccttcatgagttaagtgaatgcgcgcctgccaaccgacgaatcgcccatcatcttcaagccggggcgcttgatcctgatctcttccgagtgtccaacgtcgttctcgagcgagatctgttgatatgcagtattggaacaaaaattcttagctggaggattggtagacggatcaggaggaacggaaaaagcccattcgtcggaaagatcattggtcgaagtgggaacggctgggagggaaggctcacacctgggaaagcaggtcatcaatgtttgtcgctcctctgtttttctctctgtgtaccatgatcaaacgctgactacatctgtttcttccatctctcttcctcctcaagccccgagcgacctgaagcacgagatcgccaacgcacaagcagaacatagcgcagaatccaggaatctccgggaaacgatcgagagggaacgtgctcagaaagagaagtttatgggtcaactaggtttgacagatgaagaagtcgtggcatatgcgttgatgcttagccaggaggaagaggaacagcagtcttctcgtgcccgtgatcgttccgaaaaaaatggtgaagagggttacgtgaatgttgaggaggaagaggaagaggagaatgacaggttgcttgacgagatggatacgactgtcgactccgacgccgaggcagaagatctccgattagcactcgaacgaagtctcctagacggaccaactacaccggactttgatccggttccttcctcgacttcgtctgttcctttctcaacggaccgatacgatagttcgttagattattcatctcctcgaccattcttaatccctgccgctaccgccgccgctgccagtatgaccagacatgcccacagcacggtcgataatgaggatgaatggccagcgatgacaccgtcgtctgtctcgcctacgaaatcattgctctcttcctccaagggcaagaagtctactgctctctccatcccttccctcaattccaaccacagctccaactctactcaagcaggagaagggagagaaaaccgtggtcgatggggaggaagagagaaggatggtcaacgagtacttacagctgccgaggtcttgtctgggaaacctcggtccagtcctcttgttagtcccatcccaagtcccgatttcaattcagcctatagctctggctccaacatgaatggaaagaccagagctggagctgagaacggggatgggaaagtgaaaacattgacaagagaagaaagagaagaagaagaactgaggctggtattggagatgagtcttgttgatcaatagtagtagtgatagtaaacaacgttgaagcccaaagatcgaaattatatagaatgtagattgcaagatacggaaatgaacgatatcagtttcgccgtttctcttccatcgtagatttctgttcttgttcaccacgcgtcgtcgcacacttcactctttcctctccagctaaataaaatgagaagagaaaacaagaactcttatcattctaaagatcctatataagagacgataataaagaaggagggggttagaaaaagaaagaaagggagtatgacaacaaacttcgacttcagcttggacttccgattcagcagattggcattcaaagttgggcaatgagcttgtcctcctctcgttaacttcttgatcgacttgataatcctctatcaacctttccacaaggtatctatgcaacatgacatgaaacgacacaaaaaaaaacatggaatataat

SEQ ID NO: 2702 - DNA, 4177 bp, Xanthophyllomyces dendrorhous
cagaatcggcaattgacttctttcctgttttcattcttctcatgtccttaacatcctgtcgatagggatgtcatagacagatgaaccgccatcgagccagagtcgaaaagataacaacgagaggccgaggagagatgatccgacgattttttccctccgtttctctctaatcctcgaagagctcaaagacgacatcgctgcttgtggtacgggcgtacgattctaatggaaacacttactccagatcggactgccggggtagccttgaaggactgggtagcgagcctggcgaaagacatgctggtgtattggacgatgtgaggatgggtggggtgggttgaggaggagaaaagaggagacggtcgaagggaaagagatcgggcaggccaaaagcggaaaaaaacgggcgtgcggctttgggatttttttttctaatgagttaccgcgttttcctaatgaacactacaaatatattcctaatgtttttccctccctgtcacgccagccagctgcgaaaaaaaaaacggccaatcaaagccgccccgtttttttctttgttttcaaggcgcattcagtcgactttcaccttctgcctttctagcttccatcgacgatggttaatcgtaacgatcgtggacacggctacactgactctgttggaaacagactgacctttgacttattaactattggatagattgatcgcggatactgaagaaatagtggacgagtgagctttgttcaaagaaacctagatttcatagtttacctaaaccaatgaggcagtatacaatcgcctgatagcgcgtcgtgggaataatcgaacgcctcggttctggatgtctttgttctgataggtgatctatggagatatatgtctgtcctcaagatgtatcatatatcggacgatctgtccactcggatcactcaggtgcagggcgacaggttcaagaggagaaggccgggggagagttcagaggaacgggcgcaagacacctcaacggaaacaaacagctcttccgagctccttctgcctgtgagaagtagatgtgagcagctctacctctctgtctgacttggttgctgaagagtcgaggactgtaggtcacacgacggtagaggtacacgctaatgtcctgtaacactcctcgcggagcagctcggatgaccactttctcttcgcctggcaaagcaagccttggatcaatgacgatacttcgatcttcctcgtctgatcagcgcatgagagatacttctgtgacagagttggataaggagggaaggtaatgagtgtctgtcgtacccttattagcccgaaagacaggttttgcgctagatgagtagaaggtgtcagtaactcttacttttcgttctccttcaatctatcgttctgttgcccatgtatctacgtatgtccaacaccaggctttcaataggctcctgtgctgagaaatctttacgaggactgcgaccacgaatctcttcctagagaaaccccagttctggtctctgcatcaggagtcatcccttagatattcgacttggctcatcatgctttcagcgagtctgctagcaaaggaatcactagcaacatagttcaggctatggccaacaccaatgtttcaaacactttgagcagtatgtttcaccatgaccaacctcagaggcaagaatgcaaagaactccatggaagctctccggctcattggtacatatccactttatcgatactgtccaacagatatcagcacacatgtatcgaacccagtcgatcgtctacaaactgaacgtgaacataacctctatcgatgtcaatgtcgatggtgatgtggatgcggatatgtgtccacgtgtgtctacacaagggatgggtatatgcgtcctcggacgttagggttaaggctcaaagcgtaacaaacatcataaccgcgacctggctagtaaccaggctacgcccatcgggcttatcaccgactccacccgatgggacacttccgctatctgaacgtttctccctctcccgttggaaaactggatggacccatcgtcttgatcataacaatcatcaaccaaccgttctctagctctgtcctcgttcataaggatactcactcgaacgcacccgtactagaatatacagttatccgctcagatatgcagactcctccgatcgatatcctttcgtcgtccagtggccgcccaggcccggttgctatcttgtccgaaacacctcgtttgaccacgtttccttcggtctcacccaccaactctgctccgtcggccagctatggtgctaccgcatcctcctgggaaattctactctccagctttgatgcagggacccacagcttctgtagagaagagcgtatcgaaggccatttcccctcgactgccaacatcacccagcccgcgcgtcgtacgtatattatccccgattaaatcctttatctttctttattttgttgctcccttcgatctgaaacctccacgactatgttcccttcttgtacgcgtactgtcccttctcacaggaccttcgttcaccttctcgtcctcttcctcttcctcgatgacgacctcgcgatcgggtccgtcgttgctctctcgtttacttctccatcaacctccggccacgccacaagtcgcactgggatcggtcatttcagctgatccaagcccgactttgcctcctcgtcgagcgcccaagtttgatcgtacgttatttcctagactctgtttctctctggtcgttgacagataagtgcataggtgactcaaccggactgtttcttttgatggtcgatagcctcgagtgaccctaggttgttgggtatttgattctggtctttacccgcgcgcttctctcgtctttcctcttctctatataccactcccacctcctaccttctcacccctcccccatagacatttcggtttggcttcttctttcttcctcgtcctgttcgttcctcatgatctattccggtccgtcttataagacgacttttgtatgtattaatactctcatatatatattcctctgaaatcatcactatccatttggcatccctctgttcctttgttctctccaaattatccttattggagtgtgaattcaggaataccggacgagactaagaagaaagacagtcatgatacattacagaacgaggaaaacatttcctggtatcagaaaattcaagtagaggatgactggagacccgtttcactgaataattgggaccctcggttcctcaactgaatgaatcctccttttgcgtcggtttcgtctattgatctgagaaatcaaaagtgaagaagtatgaacgaacgatcgaagaaggaacgtccgaccagattgtatggctcgatcaagagtcgacgaagaagcgcgcgactcagagaacagatgaacaggatggagacgaacaatttttgcattctatcactccatccgatcttttttaacgaggctgcatcttgaaggtgagccaacaggaagacaagcaaggcgagcgtagcttctgatttgatctgtacacccatccggtcagagcgaatcagatacgaagggaagggccgaccaaggaagaaaagaacagttcatcagacatcattactctcttgaaccaacagacgcgcaaagaagagaacagagacccaaaataggatggacaaactgagagaggaagcgttgtttccggtcgatcgagagctttcagatggcctaggtctatcaccgtatatccaagttcagagcagggcggaaggtgaaagacggtcagccaaaatacatcgaaagcactacagaccacatctgaggtaccctgtggatctgtagacctgttggatttgatccgaaagatcaacgagaaaggtcagagattaagaggacgacgggaaaaactgacattcataggcagagtaagcggctgagatccagatgggccatcggtcagctaaattccttgttgtatcaaacccagttgggaccaaggcgagaggcaaaagacgaaccatgggctgctacaattatagatgccaagatagcaagcctaagaaagtacatgacgacaaaagagacggtccgatagttgatgacgatggtgatggtgatggtcactgatctcctggcaaaagagaattaaagaaatttctggttcttacttcctttcct

SEQ ID NO: 2703 - DNA, 7538 bp, Xanthophyllomyces dendrorhous
acccccaccatccatcatctctaacccgccctttcgtcccttcctttggtacatacacacacacattctttcgggtcttcttgctcgacactatctcgtaatttaaactcaaatctactagtcccacgatggtctcaagaatcagggaagtctgggcagacaacctcgaggttgaacttgtcgcgttgagaaacgcgatcgattcgttccccgtggtatcaatgtacgtcccatttcttgtctttcttatcatcttttctctccagctacctatcgaaccagaacagagaatgtaggagaaaagaaaaacatcacgaaaaaacaaaaccggcttactggggtctcgtttatgggatgggcatgtttgatcggtctactatacaacagggttcgtgctctcctctcctctcttttaccttgttactttctatattctaatcctctgtaatctctttttgaacaggacactgaatttccaggtatcattgctaggccgatgggaaacttcaagacaggagcggattatcattatcaaaccatgcggtgcaacgtcgatctcctcaagctcatccagttgggagtcactctttcggatgaggacggaaatctgccggatgcttgtacctggcaattcaacttcaagtttagcttgaggttcgtgaaaaaaacaaaacaaaacattatttccctcttgttcttatctccacatatgaaagctctcgacgatcaacgatcaagggtctgaatcaagacttgatttgggctgacggaacgtttttgtctttaccctccccaatgactacaaacagtgaagacatgtatgcaccggattcgattgagcttctggagaaatcaggaatcgaatttaagctgcacgaagagcgaggtattgacgtagagtatcttggtgaactcctaacgacttccggacttgtattatttgaagacgttaaatggatttccttccataggtttgtctgatcattcttgtagaaccttctcttgattataaactaaactaatttattgtatattactttacattcaatttcacacttgtacatagtgggtatgactttggctatctcattaagatcctaacttccctcccgctccccgcaacggaagaaggctttttagaagttctcgagagatggttccccaatatctacgacatcaaacacatcatgcggagctgcaaaacgctcaagggcggtctccaggatgtagccgacagtttacaggttcgtctgttgtgcttctttaacgagaggagagggatgcgcgctttcaaaaagatcgcatagaatcttgcagcctaatcggtttactcttgaaacaaacacgaaacaggtgacgcgtataggcactcagcaccaggcagggagcgactcgcttctcactgctgctacgttcttcaagatgcgtaaagtgttctttgaggacaagatcgaggacgaattttaccggtccgtcttgtttttctgttgtttttgtcttcgctataactcgctcataatttttctggactgtttcgaatcgaacgagaaatcttttaggaatttcctgtatggtttcggaaacgctcgtcaaagagaatacaacggaaccccaagattcttgcctgcattgacgacggcttagacgtgaacaaccttccctcctctatcctttcccctcttctgatatcttcactcctctctcccaacacactcccaacactctcgtcctctcttgaggaggtcgagaatgaagagttatatatacacccagtctccagtctctactccgctatctctctcctactcaaacctccttacccctttaccccaatcactcctcttgcccgccattaatcaagtggcaagagttctgtctgtgctcccatagggttcttttcagaacgttgttgtaccatcaagtgtttatcagatcgattgggggacggtcggtcgctgtagacgtgtggcaaatgaattatgtggtcctctattaaaaatgtcttttcttctcatctcctttctgctttcaatgctcttgctttcactgttgccattgtttaggtatataaaatggtggtcggatgtcacagttaccatgacaacctggataatttgaatttccttcactcctttcccggatcaaggcccggacatacccatttactccttagaccacaacctacacccctatctcttataatccgacctaccttaaaaatcacagcccaacatggtcgcccacccatctcgaacgagaacctacgaggagcgattgccgctccatgtcaatcaggctgccaaggatctcctagagacgatgatcaggaaacagtcaaacttgtgtgtgagcgtggatgtgacgacgaaggaggagttgttggctattgttgaagccgtcggtgccagcagttgtgcaatcaaggttagcgttgcaaaacatactcttctggtctgatactctcttgacggagagcagtatgtgaagagaggctgactttgaaaggagagaatttccttttgttatggatatagacccactgcgacatcatctcggactttgacgatgatctggtcgacaggttgacggaattcagcaagaaacttgatttccagatttttgaggaccgaaagtttgcagatatcggttcgtttttctgtctctcatatgcgtgtgttacggaggaggatcctgtgtcttgtggtccaattctgtcagccagttattctcaaggctttgccaaacttactttgtgtttcttctgtctctatgaacgacttggcatgcgttcgcctcaaaggtaacaccgtgtcgcttcagtattcctctggtctccaccgaatagcctcatggtcccacttgacgaacgctcatgcccttcccggccccggaattgtcactggtctatccgccgtcggactcccccttaaccgaggacttctcctactcgcccagatgtcttccgtcgggatgttagccaacgagagctactcaagagaaaccgtccgtatggcggctgcccaccgagatttcgttgtcggtttcatcgctcagagcagagtggaggaactcttatcgaccgaatcggcggaagagcgagacgctgtggagaagggtgatttcttgatcctcagccccggggtaggacttggcgtcaagtcggacggaaaaggacagcaatacagaacgccagatcaggttattggagaaagtggatgcgacgtgatcatcgtcggtagaggaatctacaagggagctggaaaggacgagtggaagagtgaagcggagaggtataaggtagctggctggaaggcttacgaggatagagtccggaggtgagacttatctatgccataaaacaatttgttaatcctgcgtgtacatctgggtatagaagcaaggaacccttggtctttctgggatctaatatgttgatgtagatcataggcaaatttaagcatagattcatcaagaaggaaagaaaaaaccattcattttgttttacaagtattccatgagagaaggtaaaaattctccagataaagtgttatacagtaggttaggtgtcgacagacacctccaggacgcaacaaccccagagaaacggagagacaaaaccagagagtaagattgacggaggagtagagtagcatattgcagaaggccactcccagcgtaggacgaagagccgtatagagaaggaaacatagaagagagaagagctcaagaggcaaggaaagcatttagattttggacgcataaggtcgagacatgtcttcaatcatgtcctgttctccatcatacttttccttgttgagcgccggatcggacgagaggtttcgttcgagatgtcctggctcaacgtgtttgccagtcgcaattcctaagagtgagagatatccaatgtcaactacaaatttggcaagaaagagaagaaacaaggaatggaaagaggaaaacaaagaaaaataacgaacctcgtcggagctcatcctctcgtgtagttgctgagataggctcgtatttggccaaaggaacaatccagtgggtactctcaaagtagtgatccatctcttctaattttcttcctttagtctccgggacgaagagccagacgaagagagcgttggtaaagccacagatgccaaagacgagatagtatttccatccaatggcgctgaaagcgtaaggagtagcctgagcaatagcaaagttagcgatccaagcacccatggaggtgattgccgtagcctttgctcgcagtttggtgttaaagatctcgactggaacggcccaactgagagggcccaagcaactggagaatgcaaagttgaagatccaggtcatcatcacgaaagcccaagaagccgacacgttgtgagtgctatctggagggaaggaagccatgatggctgttccgacgcagaatgtcgaagaggacacaatgtttccgatgatcagaggccatcgacgaccaactttatcgatgcacataatacaagccgcctgtcctatcaaagccaatacagagttgattgattgcagcatcaatgtcttggaagcgccgaagccgatgtttaggaagatccgaggggcgtagtactgcaaaacggatactccggttgcctgcatagacatctgaaggaagacgccgatcaagactcgtcgtaaattggaaggaacggtgaacatctgggtataagctccaatggcaaccctgcgttcctcttcgatggcaagctgaagatctcgaagttcggtctgaacgaagatatcctcggtatttccattcgcatggagtcgggcaagcgcgacgagagcatcgtcttctctaccgacagcaaccagccaacgaggagattcggggaaaaggaaaatcaaagcagccaaaggaagtgcgggaaggactagagaggatataaagaagagacttgagatgagacgaagcataagagcgcgcagatgacaaacatataggacgcatactctgaattcctaatggcacccgccattggatctctcggccaggatagttggtgtagaaaccgtatcccatgaaggaagcgactgagaataagaagaagaaaatagcaaggaataatgaatactttttaatacagggatttcgatcactggattgatggcaagatagacttactgaacgctccaattcctaggaaaaactatagatgtaaagagtgcgagcgaaacaccctatgagattgttgtcaagattagacacggatttagactagaaatgacgcacctgttgaagagtcgtcagccgacctcggatagacggatgggctatctctgcctgataaagtggagcaaggaatgaaagcatcccgattccgacccctgcgagacctcgacctgccagcatttctcctaaaccttgggcagcggtctgcaatgaaccaccaatgatgaatatgatagatccaacaaagatagctttctttcgaccaaacttgtcagctaccaacgacgacgggatacaactacgaatgaaaaagaggaggaggatatatgtcaatcaatcgagcgcggggtgtacatgtggttcaagaaagcaaaaccaacccaacaaacgctccaaggagcatcatggacgtgatgaatccgatgacggtgtcattagggtggttcatggtctcgaggaaatttgtggaaggcaagacagatccgatgatgcccagatcatatcctatgtttattcaagagcgcaacatccgacgagcgatcccagagtcagttatctcgaacaaaaaattcgggatttatcgaactaaccgaacaggatggaccccagcgcggcgaaacatccacagaggaaagctgtagaggataacgcattaggcagaagttcggtcagcgtagtacaggtggaaattgttgaacctatgagacttactgtatagttttggtgacatcaccatgttggacaaaggatagagggtgtgttacaagacgaagccgggatgagcaaagattcaaaccaaaggtaaactgtcgatgtgttcacgttcggtcgtcggagggagcttctgaagccgcgcgcgagggatattcgaaggatgtgtcaaaagagaatggacgaaaaggacggaggggaaagcgaaacgagagaaaccaccactttataacgaaacaccaacaagagaaacgatctgatgggaagtaagatgtccggaagtaagcgcatggtgtcgttcatacgaggtgcgagtaatgccataatctccttatggccgtgtttcaaccttctcatctcctcgtttctgttgtcctccaccccgctcctccattcctcacaaccgtccgtgaatgattgggtattcaactaccggtcggattaagttctgctcgctcatacaaaaggtctcctaaagtagacatcttgtccggacagacatcatctgacttgaactttgtctgcacataagactgtctgtcacctgatacggacatctccatcgtttcttcttgctcgtcggtgaaacttttcaagcttcgctcttattacatccaatcgcatctctttagatcatatcggccttggcgaatgggcaaaatttatagagagcgtcggtgagcgaaagcagagaagagagagagctttacataacgtaaggctttgtattcttgtgtgttcagatgaaattttctgagaaaagacgggcatacaatttcgaagagagtacgcggatccgacaatattcctatcgagacctctgacacgctcctctttctcaaaatgaaccatgaaacaacccgaatccagttcaggctcatccatacatcttcccttacgtccttcgtcggtccgtccgtttcctcgacgtgtgttccgccggaccgccacttattccgatctagctatcggcccgctaagattcaacgacaacttgtgggtctcttgaactccggctctcggctctcggagtcggcaagctccgacatggcgttcgcgaatcaaaaaatcatccggcccttatgtttttctttcttgcttatttcatcttgtattttgttctccatcccaaaaacaaaaaaaaaagtccgcggttcttgccacaacatggtgcacccatacggttatacagatggaagtgatcgtattaaatcagagcaatcaaatagaaatcgattagggtatagaatttacaacgcagacgccttagattagcccgtgaattcctttgcctcctgatctccgcggagacgacggagacgacaatgacgacattggcgatggtggtagtggtggaacaggtggcgagatcaatgctggcccagcagctcctggtttacctctaacacaatcgaacgattcaaatctaggaacatgcgttccactgtctgctaaaccgatattcatcagtctatttaatcggcggaaaccaatagacgtgataaccagtgccaaggtggatgcgcctgtcatcactatccaaaatgcatatgggtgggattcaagatgactttgcagctgtttgccatttgaaaaaaaaaaaggggggggggttaaacga

SEQ ID NO: 2704 - DNA, 3470 bp, Xanthophyllomyces dendrorhous
gttatagatcttgatcataaggaatgccggtcccttcaaatcaacatagataaaccatctcacattcatacctgaatatcaagccgaagaagaataaaagggagcagattagtctttgctgattattacggacatatttaaggaagaaggataacaaaccaaataggccagctagtaaagcagacgttcctattcccatcgtccctatcgacaccttcatattagcgcccgagtggagaagacagaaacacgaagaacagagtcagaaagacacagaagaagaaaaggagaagaagaagaagaaaaggaggggcctactcgaagatccatcgcgagtagcttgttcctgtttgcatctagaatgagttcaacgatatcttgggttgattggacgttttgcttttcagaaggttcccgcacatgccacccagtccagtcgagtgagtcaatttctctactaaatccgagcttgacgaaatacaaccaacgagaatagactcacgacggtgttctccacttcattcacaattccttcaacttgcttctgaatgctttctagtaatacctcgacttctttatggtctttctcgttcctcggctcgggtgttaactggtttgatgtcaagtacattgccgccatgtcctcatctagaaacatctccgaggaacacatcattagttatgagttctatatatcgaaaaaagtatgagtaaaaagaggatggtttaccgttctccaaaacttcctcaatggcttccatcacacctgtcgctcggtttttgaacgcagtgagtcttcgagaatgctgaagtaacgatcgtagattttctcttgacagcgtattctctagatgattcagtagttcatttacaatttttcttttgttttgcaggaacatgaaccagaaaaagacaagaatattgtcaaatgagggactcgagcggaagtacttgtatgtggacatactgagtgtagtcagattcagcctctagtgctccacaggcagagaccaagatggcttccaaagcccggaactcatacggtattccagtattcttcattcctaaatttgtctgtaagtcgaaacgtgtgtaaggaaaaagaagcgaacacagatacgaacacatgcgcgcgcgatatatcagtttaaacgcgtctacgaaaagaacaatcgttaagaacgatgggacaaactgagaggtgatgcatgaagtctttttggagtgttgaatattgacttccttgaacgtcaaatacgagtacggaatccgccttgacgagggctcgaatgtgaaggatagttattaagatggcttgttttctgacgaggattgtcggtacaagtgatggagtgaaagatttctcgatccgacgaagatctcggggctgagtgtttcaacagggagaacacgagatttgccattttatttattagaggggcatcttggctgaggtgaagaggagctctttcgcgttcaaagaaggtgcttacgtctagaccatgcatcctacacaatactgatttcttggtttcgttccttgttggctgcccgttctgatcgaacgtgacacctgtatagtgcgaatatccagttgtcgaccaagagagtgttaaggaaagagatacatgtcttagtatcgctgcagacttcgaccttgattggaaaaaggaggacatacatcgaagaatgatttccccgtcgaacctcgctccaggaggagctctctgaacacgttgatattcaaagttagcagcctctgcatctgtctcggtctgttgcttctcggattttgtttgttctgatcctgaagagttcactcgaggaaagaaggataatggaagaaatcgggatttggatgaatgacttggagcggagctggcgggcgtagaagaagtagaagaagaagactgaggttgagaaggtaagttgggtgctgtgggagatgagaaggatgatttagataaaccgttgtccgctttttctagccgtgagcttgacgaaaaggaccgaacataactcgaaagagagacctgggcacgagaaggtagtaggcgtggcggttgaaaaggcttgtaggagacgttcagcaggccgattggaaacgggcttagcctgaatggtggcattcaaggttctttccgagtgagaggtataacagaggacgcctgatatgttgatattaacggtgatagcgtcaactgtgttctatggtatgatgttctctgttcaatcttctcctgtttcctctgggttctgtctttggtagagttcttacagagggagtgttcaatggaacggaggctcattagtctagtcccgactttgcccagacgatccccaaatttgcccatatgatgacgaagtgcttacctaatctagcgcttctcggcaacctccgtctctgttataccttgagcccactcatagcgtcttctcgagtggacatgttgagggagtgcaagagagacacgtcggagaattgaagattggtggaggagagaaaacatggtcaaataaaacattcaaaacattctcattcatacctcatggacgtccgtcagctcggacggagttaacttccagtttgggaaccatgctaaacatttggccggcccgggtataagacaagacccaagacccaggactctgttgactcctccgagaacttgctctttctcataagccggttttcatcttcatctttcaagctcactcatctcaaaataatcaaacatggccggaatcaacccttacgatgcccctctcaccacggcttcccggaccgtagccagtgacgaagatataacgactctcaaaaaccatccaaaataccttccaaggacccccatcgtagtcaattcgagcgcgattgctcatgacgagttggtctctcctttgctatactctggtttcgttgagcacttggtaaatcttgtcgaacatgtttctcctagaaaactctctcggtgaactaacaagcgctgtgatttgtttcatcctctcagggtcgagggatctacggagggattgttgacaacccagaagctccttctcctgacgatcttcttataaagcaagatggaccaggagtcaaaagcggaagactcggatggagaaaggatgtgatgaaagtcatcgggaaggatggagagcttcaaatggagatgttgagatggcctggaggtaagtgtcgcggctcagagtatcatttgatcacacccccatttatcctaaattctgtgaaccttcaggaaactttgtatcgaactaccattggcaggacggtattggaccaatcgagaatcgacctgttgtacgcatcacggccttttctagattcatagacagacatgtgcttacctgccttcgaatttactatctctagcgaatggaactagcctggctctctaccgagtccaacaagtttggaacagatgaattcattgattacgcccgcgcgctcgggg

SEQ ID NO: 2705 - DNA, 4822 bp, Xanthophyllomyces dendrorhous
ctaggctcctatctagcgcttcaggactgacgatatttgaatctcgttttgggacggttgccatcctagtgggaactggaacgtacgaagagtctttggtgagtatctcttgtttgctgacatccctttatttccagagcaccaggattgatgagtgttcgttcctgtttgttcgaacttcataggcctggctggaatactgcaatggaactggaaacacctagtatgttttctctcttctctttccagtctaacccgtctcaattctagctcactcgagagatgttcttatcgaaaaagctgggcaaacctccgaaggaaaaacaccggaaggaatgaaccccacaatgtcaagctttggggattaggcaacgagatgcacggtgaatggcaagtcggaaaactctccgcaacagactacactaagcaggccgctaggtgggcacatggactgaaattggtagacccaaccatcaaacttgtctcttgtggaaaccaggttagagagtctacaggggttcttctatcactctcttgttggccttcgttacacgattgtcttatccatggagtgcatctctcgatttgttctactttctagggtaattcggaatgggacagggaagtcctagctggccttgtcgatctggttgattatcattcgattcacttttattccatgttgggctacaacaaggaatctgtcgtggctgggtttgagtatgagaagaatgtgtttggccctgctgtgagttctgctatttcgttacagatcgcagagcgcaaagctttcataacaagatagactgttatatcgtatggtacttatgttgatcgttgtcttctctctttcaggccgctgagagaggaattgaaatctgctcatctctcatcgtatgtcttattcttcactctctttctcactattgaacattgagcgcagatcgattgcaccccgtaaatgaggtggtttgttcatgaacattgattagcatccatcttatttgtcaaaaccctcttgataccaaggatttggcaaagatcacgaaaaccccgttgaagaccatcgatccttttaatccggagccaagcgctacaaccaagcgggtgaagatttgctatgacgaggtatgtccttccactcatctgttcgctcttctgtgtcaactaatgactatatgtatcatggggtttcatctattatgaaagtggaatgtgtaagctctctcgcattctgatatcgtatgcgcttcattttgcgcgatacctaaagacaaattctcttccggcgtcgtctttactagttgggatgaaatcaaagctccaggatcatacggccttgagcaaacatatgactacacagatgcattgggcgtggctgcttggttgaacgtactggtgaggaagagtagagaggttgggatcgcttgtatagctcaaagcgtcaatgtcgtatgtcccttttctatgtgggtttctcatctgcgaacatttggattgatcctacgtccgttgtttgcagatatcacctttgatgacgtcccctacaggactactatatcaaacagcctactttccgtatgtacactctgcttcatacacttctcaggtctgttggttccctttcttgatggacccatctgaatgattctctcctgatggacacagtctcaagctatttgcccggtatatgagtaagccctctaactttccttctctctcatgaccaaaatcaattttctttgtctaacgttccacgtttctcgctcgcgcgttatcgagcagaagacggacatcttttagacctgtccttttcttcgcctttatataaaggtccaagttacccgcactggatccgttcgttcctcttgttctttcttttcaacaccgcatcttcgcgctaaactatttctgtgtctatcttcattctcttggggggttttttttggtgacgggtaattggatgattgaagctcaccttggacaggcagcttacgtagatacagcagctgtgatcgtccggtctggtgaaacacagagtatcaggattagtgtgttgaaccgacatccagagttggagtggaccggtggtttcatgtttgttgatttcggttcgtcttttcttcttcttttccgtcgttttaatttaagtgtagcgtcgaaacgagcgatgattgaacgataattctgtctcaatcgatcggtatccattcgattcgatagaacctacgtccgtggagattcatgagttgtatcatgatgacctatctgcttccgttcgtcctctcctaagtttctattctctcctctttctcttaagcaacattcgctaaacttctttcggcttttctcctccttggtccgaaaaatacaccaaactttatagaacacgttcgataatccaacgatggtccagccgaaagtgacgcatctctctggatcagaatgggtgaagaaagactgggtcgttaagaagcactcttgggccttctttattttcattgggcctgtccgaagtgcttaagagggggatatgagcagattcggtcagtgagcgctcaaaagctaggtcgaagttagcagtcgagatactcggtacacgtatcctccgatctctttttctttcttagaacgataggatacatgtagcgtactcataagcaaacatcacattaaatccatatatcaatcctcagagaagacaaggcaagaaggaacaagggagatgaagaagaaatcattttccatcgaaagaattcttgatcttcgtttttccagaatttatgctcgtgaacgcacggttttttatcaacgtgggttcgttgttccacgaggtcgtcccaaatctcgtccctgacaccgtcacggccggtgatattggtgataggggagaagatgatgaaggaggagaagaagtataagaagaatgaggtatactcgacgaaacaccagtcccgcgctcgtccgctcgtctcatcagttctttgttccgaatttcgatggtcttccttcgtccttccgacagaggctttccaggtttgaagaaatctcgatgtatgacgggtggtggagagagagttgtaggtgttgtaattagtgaagcggatgatactgaagccaatgatgcagatttcgagagggagggagaagcagatgggccagtcgaactacttgagagcggtgaggttaaatagaagttcggttcggacatgggtatggtattggtagtcgaatcgcttggagaagaaggctcagctatttcagatacgttcttgaaagatgaacctctaggcgacgaagcaggaagaggagaatgaagaagacggccatcacgtttcgaagagagatatttcacagctgccaaacatccagcaattgtcagagcgcacacagcttgatcttctctaccttctaagttggaagtattcggaggtccggcgctccattggaggacgcttatccctgcaatggctgaccaagtatctgccaatcggacccacgaatctaggtgaccattggtgaacatactaggtgtctgaagggtccactctgaatcagacaaacggaacaaggagacgagtgctcgaccaccggaaacgttgattgcactaagaataggtccagccaacgggttcaatccaattggactgtctgaacggccggttaggttggtgtggatcgatagaagagaaaaggaccgatagagcgagtcgaaaacggttagaagggtggttaaagctgtaggaggaaagagacgtatggccgtaggcaatacgttctctagcaagaggtaaagtgtggtgtagagtatgagaatcgtaggtgaggtcaaccaagctgatggttcacgaaggaggatggcgactaatgtagatcctccaactaggcgagacaaacgaagattggcggcaaacaaaaaaaattgagttacattcttgagatataataacaggaatgcaacaattgacatacaagctagcacccaatatccgaaaagatcttgtagaacgcttcctctcgatccagtttgtggggatcgcagatgatgccacgagacggatgtcctaatcgcatgaaggacaagaaggacaggcaaggtggagacagaaggatagaaaggctgagccaaagtatgtagtaaagagcagatgtggctctgcatcgtcgataagacaaaggagaagaggtagaggccgatgtagatcaactttgcggcatgctcgaaagacggatggtagtagctgaaagaaagatcgcgtacaacgtcatacggatataagctttaggcttggtgagagcaaccctaaccaatggtagtcgatgcgtggccctttcggacgtgggtgtccttagaccacaaaccatcaagattccatcggtcaagggtttgatccgcccccatcgatggagacagcatcagtatcagccttagcactaacgaccagtgcaacggcagcagctatatcaaatatcaatattctcgcttcctcgtcctcctcctgttgaagagccgggtgcagcatgttgcggaacgcattgacatccccgttccacagagtctgagagagagcagagagaagaacgagcacttgagatactattccgagacataacgctagtgatggctctacagtccatagaaaaagacatggtcagacagagagatcatcagacgaacaaacaaaagaacagagaggtgaagttgagattgatcgtttggtcgagtcacgtgcaatcaataaaacgacgttgtcaggtgtcagggatacggattaattaacacgtgttgcgcagcttgtgttactaccacaagctgtttcct

SEQ ID NO: 2706 - DNA, 86440 bp, Xanthophyllomyces dendrorhous
  misc_feature (51682)..(51691): n is a, c, g, or t
ggggacccgtcttatatatcatccttagactccaacgattatgcataatagaacaggtcatagaaggtgctagaagcacctgcgctggaaggtcatatacctgcatgttgatgtaatgagagagcataaggaataccgaggcaggagaaacaacagaaccaaaagaaggttaccgaggtgtaacactcaggtcacatccctgacatctcctctgcttctctctatgcagtcctcgtgatcacgaatgtctatagtctcttcatatgtatacacctacttgcagaccagatgcgcgaggcgtcccgacatataaggggacgctctcgcgccttcttgatgagagttttcttcaagctgaagttcttgtcgaatcctcttatcaaagaaggttgaataacatcgggtctacattagtcttgagaagcctaagtttcctcggtggttacagtttacaatccgtgccctacaagggatgtaacccgagttacaatctgctcgtaagccgtaacccatggaccgtccactcttatcactcctccctcttctagttcagtgtattctatacggtgttcatgatgtctgggaaccgtacatgagacgagcgttctcgaccagtcgtagatataaacgctaagcatggatcattcgtgactctctacctctgtcattccttcttcttctgtccttgttccctagtggtcctatcaatcctatctctgttccaagagcctgaacttctccgaaaccccaaaccccgttgcatgattacgtcactcgtagcccttccgttaccagctcagcttccacccctaacatttgtggtctgacacccaagtccagcagggccacgtgtcaatcgtcttcgattcaggttgctctcttccatcatccaactcccatcacctttcctatcaccaccttcgactcaaacacagcctttatcaaacacagtcaaaccatgcggtagggtaagtctgctgtagatgttgatttgtcttgacttgttctatcgtgtatagacaagtcccacttgactcatccatctatttaccttctgcatatgcccacacagtcctcgacggtccgccactcgaaccttgaccaatatagatggcagagactgaccatcgacttttcatatctcaactagagcctccgatgttgttctttgtttggtggccattttgttcccccctgctgccgctgcgtttgtgaccggctgctcatgtggtaagtgactctgtgatacgactgcggacacagcattcaataacgtcgaggactgatctcgactgctctcttctctaaaccaaacgtcataaaaagatctcttgatcgtgcgtcctcttcatcattcagagtgttgttcttctgaggtgagggttcatgagttaactgaatcgcctttgtatctttctctcctctcagaacattctcctcacagctgtaagcatctcggctctctatcctttcgtcgttatcctgaataaggcggctgacgctcattttgatggacatacttgtgcacctgagtagcttggatacattccaggtaagtttatatggtggttctcatcactaatcgttagatgattcgctgatcagacagccccctctcttccgttttttaaatgatcacctcttcaggtcacatccatgttcgtatacttttctttgttgtcttcatcattgcagactcttcttgaagtttgtctactaaaacaagagtctcttctgtttttgtgtgtgtcgaatgctacaggctttctggctcatctacaagaagatggccgccgaagaaaagtacggaccccaaggatacatctacatcggtaacggaacgtacgaggtacgatcactgcctctttctggctctacgcctttttgtgcctattcattttgaacaaggcaacattcagttacctgtaaggttacatatcgggattactaatcgtctatccctttctggggcttcttttctctctttcatgcagccttcgtcgggtgcgccagctcatggacacgcagccgtacacccctcctacggagccgtcagccaaggttaagctagcggtcgataaacagacagaccgattaaccgaccaaacttgtcccgatagataagctagctcgtcgcttgttcgacccttcatagtatcacctctcgtgggacgctctactgtcaactttctctacgtatacttgattgccttcttaatgatcttactatcatgctcccctctcttctccttggactttcaccttgattgagacaatggattcaatccggaaacgactggttcgaacatgtgtttttgtaggtacagagagcagcacagccgccaccagcaaacaaacgaagaaaacgagaaagtaaagggcgcaggggatacaaagggtatcaaagttgtaagtggtcccaaggtgacggaaagaaagaaaaaacaggcaagaagggaggggaatggagataagtaagaagaaggaaactgaaaaaaaaaaatcagaacgagctgccttcgactctgaacgtcgacccgaacttgagataggtctgcatgatgccaaggattccttccggtaggttctgtaacaaaacaacgtaatttatgaaggaagaggaaaacagagagtcagatacaagcagaatgacagtctgattccaattggaagaaagaatagattaagaaatgagaaacaaaccatgctaagtagagtatatgcaatcttcgaatgaccatgcacctggccgaccttgaagatctcatgagctgttgtcgtcaacacgtcatcggagcaatggtagatatcaagacgaagaagagcgagtaagagacatgtttataagaacatcgagagaaaagaacagagtcgacgaaccaatgctagtggggtagcaactctcggtgtaccatctgtcaattttgtttccacgaacaagatgaattcaatgcaatcagacgacttccatattcctctatgcttcgacatcaagaaagcgcaagtgtaatcagaccaacctccagttatatgtcgtcaacctcgtcgctgcgttcaacgtcttttgaagatcgccctcgtccgcataattctcgagaagtttttgccatgcttttgaggagaatttagaatcgaggcatctttggtaggcatctttggcttcctctttgtgttggaggcggagtgcgagatctccaaggatttcccactgaagtcgaagtaagacccaaaatgaacgtcagaagaggaaaaaaaaaatctatgagatgaagaataaaacacacctcagtgccagttttacggtaagacatgtctgtttgtagataaaagaccgaacggaaagttagaaaattctctcacggcatataagaatagagcaggacatgtcagatggacgtacgttgagtcttaaaatgagaaatctcggcgcgccatatagtgtacacacgcaagtcctgtgtggattcatttgaccagtgagcttctatgttggaccttaacaaagtatttatcataggacacacctcatagagaaccatgaacaggttgtccaaccatcgttcgcagagtcgtttggtagagaacgatgatcctccgtcatcctctggatccaataactcgtcctctcttgggatcccactgacttcatccccgccttccccctctccgggatgttgagctaactccggcttctccaaccccgccgtctcgcccgcgtcgaaacctgcattttcatcgccgttagccttgctctcctcctcttgaatcgtcgaccccttcatagcttcctcgacagattttatctttgattcctcgatctcttcggcatctcgatcagattctgatgagatcgtgatcgttgggatatcgtgttgctcgttaggttcttgttccagcctcttggatggagataatgatggcgaaccagattcaaactcaacgaccgaagacgaaggtgaatgttcacttgattgcttgttatgcacagcacgggttgaagatggagtggctgccccttctccggaagtattcttgacatctcgagatgatttggcccgatggccgttcgaggtggcttcaggcttttgcttttgtaaccgatattcttcctccatcacgaacaccgccgatcgagatcgaaggagctcgtcccagccgatctgagcgacaagcctagtgagaagtgcataggccttggcaaacgttcctcggagtgaaggcgcaggcaacctcagaagggcaatgtcggcctgtaagaaagagaaagacaaatcaagccgagatgttaaatatggagcatgtatattctgactttcctctcggcctagagaaggaaggctgtcttacctcgttatcccgagcactatcttcatcgaggatatttgactcggcgatgaacggccggacgggcaggtgggtcctcatcggtgtcggcattcgatgcaaatccctctcgttatacgtgaacatcgggcacgagtttagcgtcaaaagcgcctatagaccgaggaagagaaacactccgtgagtgtaagtcaagactgcgaatagatattcaacaaactcacactctcatactctccctgttctatgtacacctctgtcaactttgcccatgtgacgaactcactaggcgcacaattaactgcctccctagctagctgcaacgcccagtcgagtttgccttttgatcttaagaagtcacattgcacgtgcaatagaggatacgattgtgggttctcctgtagaccatgatgaatgatttgaacagctttgacctcctcatctgaaatgaatggaggtgaaaaagattaacaagtgatgacacaagaatagtgttgattaatataggacacactcattccgaagtaagatgtagctagaagggctgccacttctggctggtgaggcagtaatcgttcaaacagattgaccgttttatcaaaccggaacgagtcaccaaagtacttgagcagccctgccgttagatggtttgagacaactgatgcaacttgaatctcgggatctgagcctagttgccatcctaccaatcgaaaggtgtaatcaagaggaaacggtcagaacaaatcaaaccggctgaggtagatgtataatcataaaggaagacaaacctttgaagaagaggctctcagctgcctgaagaaatcgtatttctccatcgagcgtggttatcggatcaatctttcggtaactgttcatgaccaccagaaagaacgagccaagtggaagcagttgagcgaacgacatacttcttcctgaaagagtctaagaacaagcttaccctgcgagtctataatttgggtcatctgcgtatcgaatagcccttagcaacgcagacacgtaagtttcttgccagatatcaggagttgcttcgtgtcttttaggacggaagtatggagagaacgtgcatgaatgattagcctcgagctggacagtagtagataaagaaaagatatttcagacatacctctcgccgcgtagatcaaccacgtaagctgtttggacgtgtccgacttgatgagtacacgaagacagtcagagaaagaagagcagaaaaaaactctaaccatctacaccccctgggattttaacgtctacccgaacatctacccttgagaaggcgttgaaacaactgcaaacattcacgcacacgcatctgttgagatcgagttttctttgatccggtacagcaagcaggcaatcaatcgcagaatcctttcttaccagtacgttccactcctgactttccatgtcggtcctttagagaaccaagcggcttgttcttcgaccgcgaattgtaagctgtttaagtaagccgccagagaggctgaggaggatgcttctactcccgaacagtaatggtaggatccaacctttagatttcgttcaagcgtgcgtaatcggacaggaggaagcacaagaattcagcagaaattttaacgtctagatcaaagaaacagtacacagttggaagggaacgtaatggacaaacatctttctgggcagactttccggtcgatttcatgacatggcatagatctggccctcctaattctctgaagctagctacatatatcatcagaaacgtttccacaccgggcagacccaatcagttagcataatggtatcctccaaagagaagatagcatgtatatactatcaactgatgatgtgagaaacaaggaggagtgaacatacataacacctccgttcgggaagctatagactctccgatatcaccctgtgggagcacacgtaggaggggttagagacgaaacgttagccacactactcacccgtgcatcaagtctgcgttcgagtccaacaagatcttcgtgttctctggttcggcttcaggtatgccgaattcattcttctgataataggtatcttcctggtcaatagacgccatctcttacgtccgaatcggctgaatcattgaatgaatgctatccagcgctctacccctctttgtgatgcatctcgagagggatcctgaattcagacaacgggaaaaggaataaacgaagcggaaaactgacctcaataaattctggaacatccttgaacaactcggacatggcaagtcggatatatagatgagcttcgttttaggaagaggatgagtacaaagaaggcgagatggtatatatgttctcgaagggttacgtccgtggaaataagatctcgaaggggctgcgctgagcttaggtaagcatagcatcacagatattaacggtggtcaatttcattttggtacccaacatgacccgcctagaagtggagaatctccaagctatgcgtcactctgaggtgtttggatttagaatcgggtgcgattgccttcgatgaggaagaccgatgacctcttctttcttctcgcattgatacagagagaagagatacgaactaatgattgggtgcacgtcaatttctgagggattcactcatcctgtttctatactgattggtttatcgaatgtatattcactcttcgcagataatttctttaatagattccaaccatccctctggccaagcacactatgtagcatggttgtatcgcgtctgattacaccacaagactgattttcttcaaggtacatctggctatggaaaaaagaaaaaatagaagaagaatggatatctggaaactagttggatatctaacttgtaggctagaagatacaatgatcggaagtgatgtaagtcagccatcatcgtaaatatctggaggaatggaactaggaagcaaatcacttaccaaaacgtgcattctgtaggataggacgatggattgagcaaaggatatatgttagccataaattcatcgtttgacggaacatgataacctatcggttggagaaattcttactcgtcggaagcttaagaggaaaggagaaaataaaacaacaagtgagtggaaagacacttgagagataagcgaataggacagaagcggacacacatgtgtacaagtgtccttcggacaagaggaactcggtggcttcgctaattggccctcaaagtaacaaccgaaacaaaaggagtaggcaagatgatcaaaaagaatgatcaatcaagacaataaacgctgaacagaatgcaaactaaacgtacacaagagccgagttatcgtattcaaccaaattctgtgcgacgtgggcaatatggaacccatcttcaggaggattgtttgagcagaacttcataattgcccggtgaatcctatcagggtgtttacaggtagagacgagtagtaacaaaagaggggtgagttatcgccagctaaccgagacaggatcaatgatagaaagacggacggtgcaaggttggcgtattcgcctgatctatcgtctcctccaccagcgttgttgcccatgctgtagtccagcgtatttgatccactggtcgcatagaccccggtcggatcatttccggacccctaaataatgaatcaaatgacactttaggtgtattagagaatacatcatatgaaggatgaagatagaatgataataaactgtcaccaaccggcttgccccgtcttagctgcagactgacgagctgacattctaacaaatgataaaacacctcgttgtgatccgttactgggcgaatactctgagcagcaaaatgacgcttattggcaaagaccttgatcgtcccaatggctcgaacgtaaatgtcttgtctaggtgatgttgtcaaacaaagacgaaaaaaaagaaaagaaaacgcaagtgacgtggaaagactggatcagtatttaagaatgccagatgaaacagaattaagaagaatgaggctccaatgctgatgagatgcctaagaacatactgaattccaaccatcctgggatcctcctcatcactggttgcgagccatagcttggcctcacaagacccggttccatcctcgagagagagcgtgatgttagtggcctgggaggctacatttcgaacaacacccacgatggtgacctgtgcagtgataaatactgttacaaaaagagttctgcttcaaaaaagagccatatatgtactgactgaggcaacatcaacgtcgtccacagtaaattcagcatcaggatgagcctgagaagcttggttgaactgtttgatggtcaccggccgaagagactgatttccagaacgctgatgatgaagtgaccggcgaagaagtataaggagagagggagaaaaaagattcgaataagtttttctctgaccaggcaagatgagtagaacagctctggatgcaaaccttctgtgcctgcgaaccaccctggctgccaccggccatgaaacctcctccgccacctccaccgttatagtaaggatctaattcatagtgaggagaacgagaatatcagtcatatcaacataggaactgaaggcatgcgatgtttcccgacagagtagtgtccgtaccgctcatttttcaagatttgttttagaaggattcccggaagaagagtgaatggtcaagatgatcgatagctcagatgatgtgtgggtgtaagtgtgttgagaagtgaagacgcgtctctcatttagttggaagaaaagactgagacgcgtccgacgcgtccaaggacgaaagacgcgtcaacgatgaaaaagactatagaaattattaacgaaatcaacaagaaaattctcgtcttttcatattctaagtaacaaaatactaatacgtaaagacacgggcactgtctgactcctatagcgagcgcatacacccacaaactctcttcagcgactgtgatatattactattgcctcttctccataccttgatgtaaatcatttacctcgttggcaaacatgatccatacataaccagcatgttctgccgttgtccacaccgtcacagtgcgtacgcaggtcagtgggaagtaagtggatgacgtgtgccgaaccctagcggggcccattacataatcatatcccatgcattacgactgttccatcttttcctagattctgttttctagggaagaagcaaagagagagaccagtagagagtgaggagattggataccgagagctcgaagcatccatcccatcccatgagcacaactcgtgtctcttccatccattcatccttgcattaaatcgtgtaatcataatccatctggccctgttgtcgttgcttccactcctgccgccttcgccgtcggcatctcctttgtcatcaactcacgatcgtcttcagctcgtctggcaagcgaaaccataaccatgtcgattagagcacttctcacagctctcgcttttgtagcgagtacttactttcttcttcgtcggctcattcctctggtcacctccattttctctaagcaactttcgatcagaaccataagtctgacgagcgtgaagggcatccattggcagacaactcagtctactgacggcgtggatagagctgtcagtctgaaggttgggaggttggtcgtttcttcatgatttatatcgttgccatctacccaggctcatatggctgttgaaatttcaattcctgaagagtgggatacgtcttccattggtatgatcggtcccggcgagctcggtcatggctgacgttgacaatcgaagacgttgacgtgttcatagaagaaacaactgccgagccttctagctctgctccgccagcagcgagcgtacccggatctccgttctcctcacacccacttggagcccatgccactcctccaggctccattctgagttctcctcagatctttgactccccagatcaacggcggccttctggattgcttacccctcaattctctccgtcaccagaagactcaagccgtccaccctctatatcgaatacttctcgaccctcactactctccgctgctactggtggttccgctatattctctccctacgcgttctcggagtcggccggaggttattttccagatccctctcaagctagcagtcccttctacacccagctcaaaagacgctctaaacggcttctccggaaagcacttgagaaatccctccgaagcgcatttaacgcgactccaggactcgccaagcttgtcgacgttgagattgtcggggacgtcaagctgaaattcttccagcgggtgcagcttgacagcgagaaggaagaggttgaccaaaacggagaaaccatcatccaaggattccttgcgtccctcaaaggaaagctgaggatcagtacgtcggttgatctgcaagcacctgatttcaaccctcatgtgtctggtcacaaatccatcgttagagaaggacgcgtccgccgagcacaaaaccaagcaagatggttcagagctattgtgaacaatgtctggaaaagaggaataggtaaatcggttggggttggtagaattgtgctagagatcccaaacgaagggggaattgagatcaaggcgatcgaagctcccagagggggacctccggacggtgtctcagagaagaggctcaaacgggcatcaacattcagctctcttgggccaaagacctctccaagcgcataccccgagaaattatcaccctctacaagccctacacctcgccgtcgacgtacctctacctcgacgtctttcgagctgcccttcaaaagatcgacttcctttgcgtcgcttccctctgcgctattaggatctttcgggtccaaatcgataggcgcatatacccttgattcgtctcttccgtcgattctaagatcgtcaaacgagccaactgtcaatgaggcctgtaggtctatgattaaccttcaaggcccgctcagtttaagtgttggacatcaattcggaccaggaattgagctcataggcgaacaaacagtgatcatcgaggctgggttcgatgggaaaatcgcggtcggactgaacgcggtcgaggcgttcgtggacgaaagaaagcgggcgaagcggctaagagagagtgaattcaaggctaggttagagaagatgagggaaaaagagaaaacagcggaggaatctgtcgagttcacgtcagagatcacgttggagaggaactcaaaggtagacgatgcgaataacaagaagaacgtcaagaagcaggttagtatatcttatttctgttgtgttcaccttatgatcttcgttctagagctcacaaagagcttccccacattagaattttatcaaagcatttcatctacttcaagttcgcatacctcttgtggtagtctcttatgccgaactgatactagagcagaatgagtcaccttcaactgtatttcctaacagacagtcattcaccgtcaatcatccattcgactctgaatccgattctgaaaatggatctcatattcacaattcatctcagacccgaatccttcctctcgaacttgctctcaaaggattcttgtcgacctatcgagtctctcatatagatacctgtgcgctgtatcgatcatatagaggtattcagagacctcacgactcggaatcgaaccgatcgataggctgtgaattacagtcagcaatcctctccatcggaccctggaagaagcatcatatctatccttggttcggaggccaaagcttgaagccgttgattcagatagaaggggcacggatcaatatgtatacgaatcttctaagattgaagaaaggatttggcagtggaaaaaagccggcattgtttgcggatgatccaaacgagcgattgatggtgtgtgagtcagagttgaaaaaattcaaggggacggcagagttggaggatttagaggcgcttgtactggcgaggaaagcgagaaggcagttggagaaagaacaaaaagcatttgatcgcgctacttcttctgactttggtcatacctatgaagagcccccatcagaccatatgccagaacctcccttgccgttgttctcgcttagtaggagtatagtctccaaatttcctcggtttgcatgcgctgcgagtctcggagaggtgaatttagtcttgtcggcagaaggaccagactccgtctgtcggcctgcctttgtatttgagtgtggcggaggatcatttgctgcaaacggagagcatcaaggttttgttcccaagaaatccaagaagtgagtgtactacagttgcatttcataagccttgttagaagacgatgctaatcaaacattcctctcgatcatctatatctctttctactgataggaataccagaccgaatagcggtcattcttcaatccgagctctgccgtacgcctctctgttcgtgtttgagtctgctgggtcgataaagtccatgcaaatatctcttcgagatacgaatccgcgcgcattagaactggacgccttccatgatctgcctattctcagtatcagctcgagccattcgacctgcaaaggaagactacatcaggtcttggagtcatcttcccttccagtcagcgatggtttagcgcttgatgatacgacgaccatgatcgatctgatatatacggtaggagaagtccgcggagatctttgggatccatcagcaattgagaacttgtctcagttcatgatccctgttgaagctttcaggcaacgcctcaaacgatattctactcctccccaagattcgtcaccccaggatgcaactgatgaagcttcactcttccggcgtcttcctgtgggtctttgtgcgcacgtctctattgagagtgtcaccttagtgatcgccgcactagatcccaatccttcttgccagaaaggtttgttgcgcgggttgttcgtgaaggcccgaccggtttgggagtactgctattatcagccccaacacgtcgagctcgcctcgatcaagtcgagtccaacccgaacagctttgcacctccctccagacattgctgtacaggctgccgcattcgctacagatggtgcatctaagaaaggaggtttggcggctcttatcgcaatgcagtcccatgatttctcgttccgaccaatcttcaatgctcgtagtttcgcatctggccattcaactaacaccaaactattcacaccatatgcggcgatgtttcctgttcctgagggtaaagatgctgggctcatcgcttgggattttcaacaagttcatcgagggcaggaattaaaaggagatgaagagagtgacggtgagaaaaaagagaagaaaaaaagtcacaccgactcgcatcctctaggatcggcagattcatcaatttccgatccgtttggtttgacggcagccgagaagtcgagcacacctctacgcattcctctagttgaaagtcgactgttgctccgaacaaagctggatacggatatcgcttcggaacatactttgtcaatcgaccttggaagtataagcgctaggatcaatctctctcacctctattgtgttatgtgtgctattgacgccatcaaaagccttaaaccgtcagcgtcatcttctctatctcaatcaactaaattatccttcagtgaatctacctcttcttgccctccctctcgctcaccgtcgccacaatcttctctcaaagctcttccattcacgcttcacgtggttcttagctctctccacctcgatgtagatcttcctcttggagagcgcatttttgttcgcctccggaatgttagcattggcctgtctcatccgggcgaagtctcttttgacctagataccgccctggctctcgtccctagcccgcgacaaaggaccaagtgggaagagttgttccgactgcggaaagtacgagtcgcgattactagaagaggcttccaatcagatattgcagccaatatcgatggaatgcgacttcgaattccttactcgtacaagctttcccagttgattctcaacatcaatatcaccataaaggccgtcaagcacattatcttgatgttcaaggagtcgaatatgagccttgttctggctcctaaagtcgagggaccgaaacacgtccctaatatccatttgaagtgtaacgtcgtcacctttgaagccaaggatgatccgatggaaaccaaattgaatctaatctggagggtaggcttagaggagcaacaggcgaggcttgagagagaagatgcgtttgaggctaaagtcagagctatcaggtcttcaaaagatcatcaaccggctctcgcagtaaatgagatgttgaatacttcaagatgggaatttacggacaagcactcggtttcgatcgaggacgcccgaaataggcttcacatgttcaattcgacaaactggattaggaggcatcgaaatgctgttcgggaacaggtttgtccatcttctgacggttgtactccttccgtgtataagacagtcagtttagtatagtcgtttcttatatcaccgaactttcgaatttattctcatagggccgccgagaggatgaagccctccgccgggtttatggaccttctcgtcctgaccctcggctacccattgacgttcttccacctgttcgttcagcacctatgttcaggataatgttttccggcgtagatctctccttgtctgcgctctctctaaagcctcaggagctcaaggacttcttgtacgagcgcggaaacaagttacctcattctacaaagttctcgcttttggtaccgcttcatatccattggctcttggatagcgcaaaatgggtcttgcgtgattgtgagtcttcattcttatctatgtcttctttccatctctaagccatgactcgagccaacagcttatgttgcaacatataatttattttgtcaacactctttccatcaagaccctatacctctgtttaatcttcctcctctagaaagttcccaacatggattgaagaaggcgtttgaatttgagaccgatctagttatcggagaagaactagcggaggaagggtcatacttctgggttccgacagttgtgattcctcctgatttaggggccgaaggagcttcttctttccagctctcggtggctaaaacagtcatgcctgttaaaacatatgctgcgcctgtaatcagagtcaacacttctagcgtaaccgacttttgttggggagcatcataccagccaggaattcaagatcttatgaaggttatagaggtaagtaagttattcggtttccaactcttccagcagtctacttactgtcacaacgatgtatccgcctattcttttactatcaatcgggggttttgttgctgccgaaactactcagacactctcgcatcctccccgagatccatcagaacggatgggattctgggacaaactacgcctcgtgttgcattggacaatcgatatctctttctttgggcctttgcacgtccatgccaaaggtcggcaatcaattttatgcgcattcatttcaacacctactgatcttgtttatgaaaattctgaacaggatcacggaatccgtacgatatcgttgagcatggcgctggtttcgtcttagcttggacaggcaaaccaagattgatgatcaaccaaccaaatgaagaacgagaactcgtacagattgaagcagattctctactgtttgccatcccagagtgagcaactttgccaacaaacatgatactctatatgttgctcatgcttctcttctctttcacgcgtatctgatagtttccgagatcttcaggatcaaaaggctatgggaaatcctgatcccgattccgatgacgatgttaatgtcgagagggaatatcaccccaggtcaaaaaagattcttcggaagatttgtgcaaagtttaccaacggtgcccgggttggttggggatttatgatagaggtgagttgagattcgaattcagacagcttatctcagccagaaacttatacattctactttgatggtcacatcccagcgcacttgcggggatgaatgcgagtcatgttcaggtcctccgttacaacgcaaatgtagaatgtttgacttcaaacctcattatactgtcgtcatgaaaacccctgaagcgattgcaaagcatcacgaccctgtgagtcttatctgcatcctagtggctacctttattacacttcttaccccgagctccctgtttctccgatacagaagacgtatgactctttccgaggattcagatcgaattatatacatgcgtcaatgtctgttgtatctcccattcgcagacggggaatagataaaggcgaacccggtttcttagatgggtacaattcttttcacttctctccgaaaggatttgcccacttctttgcatggtggaggtaagcggttctgctctatacatgtgcaaatgtaatacatttacggaaagtgatgttttctgtgtggttctcagactgtttggaggcaacatgacactgcctattcgacaagggcgcctgtttccaaattctccaccaccatccaagaaatttgggaaagctatggcgactttcaaggtatgaatgtttcgttcaacatggtttcttcgcgacataatgctaaccatcaaggttttgcttgtccgttcgatgccatcagtatcgctttgatttatctccgcttttcatcagccacttataccgctatgagagcaaagccgattgggagtctggagaaggctctcttttggggttgaaagttcaactcgctcattttcaggccgacttacaccagagagaagaacagcgaacggttactaatgcaaagctcaaccgaactaagaaggtccttcacaagcccttctatgcggccgatgtagttgtaagcaaaaactgtcagcaactctggggtttctcgaatcgttctcactctgatttttttgacatcatcttttagctcgataatcttgaccttcgagctttgttcgctcacatcaaagaaccagaaaactcaaatgtgaagttggatgagagcacgtttttagacgacaagttctcgacccaaggcgctcctctctccgatccgatatggttcgactttgacgattatgtagagaccgactggcggcctagtgatcgaaaacccaaagtcgaacttcatcctctagcattatgccctcgttttacgtacacaaagcgagcaggtgactgttgtttgcctcgtaaagacagtgaagacagcaatcaacgttctgactcggatcctagacaagcatcgaagttcggtaaagagccttcacatttggttagttgtgtactgttttcctattttgaagatacggctcgcaattttagttataacttcttacctttgcttctatttacggaatacagtgttttcttggccaattcaaaagtatgtcccgctatctttctcctcagctatcatcttgagatatattgtccttcgtatgcatatgtgctttccgtactttcagtcacagttgcatactgactggcttgaaaaaatgtctctgaatctacttcaggtacactgggtgtgcaaaccgactttgctgagcatcgcagaaaaaatttacaggatatattggatcagtatcaaggcgacgatgctacaaaaggccgggattttatggcggatggggtctctgctgaggtgagtcgacgctatccatgccctagtagtacatcactccgataaatacttactgctttgccatcgacataaaacatcaatagagcgaagtctcagtacaggactcactaaaacaaaaaattgcagttcttgaccgtcacatccatgaacttcgcgagtctgacaaggatgaagatttcgacgaaaagcctacattccatgtgtcgggacacaaccggcaagaatctgccccccttgacgctgcctctcctagacacgctcgcttcggaaattcatatcaagctcactttcctagagtcacatggagtaatcatagtcggaatgtaagttgggtttcgaacatcacttatttccgcgttgtcgtgccacactcatggcttctacggggtttttagattgttctcaagtattactatcatgcgagagcatggcgtggatttgagtatcatatgagtagtttgtgagtgtcattttagactcgtcatttttcagctcttcgtgttgatcacgtttccttctctgaattttcttcagagccgtcaagtttatccgtgagatgacatctacatcctccaagcatccggatcaaccggctgccaacgaacctcacaagaaaccggccgcacctccatctccacctccagccatgaaaatacctaccacacaagcagccggagcagccctcaccaagggaatcctcaacatgatctctaaggaaatactgacaggtagtcgttcagaagaagaagaattaggacctcaacaaggacaatcacaaagaactttcattcaccgagacggcgtcgcacccacacctgatccctggacgggtcttacagacgacttcgaaattgagcaaagtcatcatctctcactcatcaagccacagattgccctctgtagcgttgtcgatgatgactcggctgtagttttggcggctctatcaacggaggtacagatgtatacagtctttgataagcaggatatggacgatccagtgaatgctaaggttatgcgaaggtgagcctccaaaataggatcaattaacttcttgtgcagggcttagatcaaaccgctttttttgctatatgatagaacatataccaacatgtcctctctccaagcattctatccgacaaagctatctgctctttccaatcagaaccgaagctctggttttgttcctttggagattctgttagactcacgtctgcacaatactgatgacttcgaaagagttgtgtctcacacggatgccgcaattcaatacgacaagttcaaccttcttcgattgcgaaacacaacagccaaggtcctctcgaaagctgatctcggagccgaacatcttcaaagtcataccgttcgtccatttgcttttttcatgatgcataggcattgagtaggaatacgttctcactatttgacccatatattccctcctacctaaccttaggatcttgtcgcagtacatgtccctcgctttggtgttatcgcaactccagagcagtttgcttccttctataatgttgtcaacaacttgctactctaccaagatcctatgtaagtgatgtctgagtttatcagcttatgtgcctacctgctcatcatttatcgtatactgctgtcctgctgtgttctagccaacaagcgaagaataaaaagcttcagaatttcgtctactctttcgaccattcaaatctctccgggactgccgatgtggttcagatcctccagcatcggattcgggaatgccagcgaatgaaagccgactatcaagcccaccatgacgatactgagaacagttccttccaggctcaacttaaagctcaagctggacaacttgccgaggagctcagtctcgtattcgaggcgatcgctgctacccaacaagtgaaggatgatcaacaaaggaacaataaatcggctgtcagatttgaagcgacatcgacagagatcggctggcatctcctttcgtcggagaagaatcttctagccaagctcactttgaaatctcctcaatatcaaaacttgagtcgagtcgatggctccactgttaatgaatttacggttctggatcttcaaggtatgttttacatatttcgttttcagagtaaacacctctatgtgttggatcttaatgatactgtctgtattcctagccctcaatggacatcctgaagcagtcttcccagaggcgctttctcgatggtttgtcgatggaaagtatcactcagtcagagtaagcattcaagtatcacctatgatgctagtggatcaaagttatctcatgtcgtcttatcgttatatcctttttaatcaagatgtccccgttcatcgtcgctgaatggactattcttgccccggtgagttttcgactaagacgctttgttgcaggaatcacacaactgaatcagtccttctgcaccctaggttggtggcatcagtatcgtccagcactttggtgagtatctctgttattttgaatcctactatcaaggaagacgctgattctatgttacataacgcttccaaatacataggtctccgacttcatcctgttcgtcttcaaattgaacggaagacgggtcgagagatgttgaactacttcttccaggagaagactcatcccaaggggtatgataacacgaccgagaccgagcagcccatggcccactcaaacccctcgatgtcgtctttcgctagcgaaacttccactgatctggccgccttgaattctcacactgcccctcgtttcagcatgcaccgaacatcaccggatgggtcctctacagttttgagtgcgcctggagagaacataagttcaatttcactggcctcctcgaatactggggtctctcaccctcggcccttcagatcaaattccatggcgagtctgacatctcagaatgaaagctctagcctagcatcgttgagccgagccgatatgcctgtatcgctgaccccttcggggtcacaaaagctgagtcggccaaggtcaagccagagccttcaaaagattgcgaccgagagagaaaagcacgagcagactcaggctgaggaaatgcgaggtaagagaactccaacgagagtttagaacttttagatctatcttgacttatgatctttgaggttcggtagtgcgagcttctagaaaccggacgttcatcgccattcacatagagagcacgtcttttgttctgagctacaagatgcggctccttcctgctgtttttcttaatcaaggagtgtcctcaagattaaacggttctctttttggatgcttactatggttcgctacagggtgacaaggccaagaacatcaccgatctgagggatttccggataacctctcccgcgctaacattccagaacaagacggctagctttgaggacctggtacacgagttcaaaaatcaactgatcaaagccgcttggaagcagaaaggacagctcgtccaacagatctttacaaagacaggaaactcggcgcggtctccgccgtcgaaggggtccaccaaaaagcagtcactgaaggataagaggtcccttccgactcgactgtcagataatctaggcaatggttccttccttgtaggctttccctcttgttttatttttctcttagactgtcgataaaagtatgcgggctcactaaccgagctgaaacccaacctcaaatccacaggatcaacccatccttcgggtgtcttctccggtctcgatatcttcttcttcagtagagagtgaaccaggtcaagatcaagaaagcccaagttcgaattcggattcttcatctgcttactctggatcgggttcagtagatcacagtggtctcggtagtggtgacagtggcgggggaaataaaacgaaagcgaagtttggtggattgttgagacaggcattacatttacctcaagatcgcaagagagttcccaatctaaatttcgcttctgtaagttctttcccaattttcagtcattaactgtcctgcgatgcggtgtctgggaaagaggtgattgacgcaatatctctgggaatgtgaattctatagacaacatcctttacgtcgaacgtccagggcggctccggctagaccaatcatctcccttctcgcctttgtctttcttggtccattatagactctaaactcttttcttcctattcctttaactcctctcattcatgcatgccaatcttagtgtttcctcgtctgatacacatgctaatacacaactcaatacgacatatgttttctcttcaccctctacatatgacttttttttttcttttgccataacgacccctattttctttgccccatatatcatgatctcttttttgtctccttattcctcttggtttctcattcgagagaaaaaaaaactcttacccgaactccgaccttcaggtacagagaatgaacgaaaggagatatcagaagaatagaagagaaatcaacagaaccttcaatccacaagctccccatctatatttcattatcagcaatctatgaaacaacatccaacatctcctctactgtactgatcttctccgatcctgtccgtcctttcgcaagccctctctccaattcagcctgttcgatctttttccaagattcgtacgagatgacagattggcctgccgaagatatttgagaaggtaggccctggaggggcggagtttgaagtccgagcgaggtcttgatcggcatcaaggtagaggtctcggaggaagagggagacggaagagggagaagagaatgatcggacaaaagaagatccatagttgaataagcgtcgtacatggtggacgcgatgacacctatcggtcccctagagacccaacctgaagagtaaacgttggggatctttaattgtcatgaagaattacgatcgaagattagcttttcttcgtttgaaagcgtgcaagggagagaagaaaggcaataatggctgacaagcaagcaaaaaaaggagaaaaggggaaaaagaaaaagtcgactgacgggcactccatcctgatcgaccactctgcctgacatgtttctgattcttcccttgacttcatcaaacggaacatcttctagaccttctgatcgatagccaacactctcgataacaaggtccgtctctgtagtaatttcctctgccgtcggcattgccagtgcttgttgaggactcgtaaggtctggcgaatgaggtggactagggctaggattggaattaggcgcggttgtcgcgacaggtggaacgggtggactgagcagtgcgttctttgtccaagtgatggaatcaatcttgtcgggtgactctggagatggatcgaatgatttaggtgatcgcagaaatcttaatttgaatgtcccagtctttaaagaagaggtcgagggctggacgggaccgtttcccttggcgatgagacccagcagccgttttctcatcctggcgtccggagtaggtgtctgatcaacgtcgtgaatggcccgctcgatcacgtctttctcgattggctcgaaagcacatccatcgaggttcatcatctctctaaattcttttgtagtgaacgcaacctgaccggcacctcttctaccgacaacctcgacggtgtggacggatgattttttaagaatatcaagcacgctatctggaatgtcggtatcctttaaatcgtccactctcttaagcaagatcctcgcgcaatcgagcgcgacgttgccttgaccgatgatggtgacatgtctgacgttttcgagatctggtcgaatatgtcgggagctgggatgaccattataccagccgacaaactcgagcgcggtaaagacgttacgaagcctgccttttggcgaacccgaggagccagatacatttctgagtgaagaggagagtgaggaaccgtaggaaagcaacaagtgggtgtagtggggagtcagagagcgaagcggtagtgttgtcgtccgttcggccgaggccgagctgtcggctggaggaggtccgatatggacgttgccgaagaatcggaatcgattatctgactgaagaaggtcaaatttgtgttgaacgttctacgactccagagagacagacgggaagcgcaaaaaggggtaagctagggtacagtaagggtgagaagatagggtaaagagagaatcctaccttcacttccgggtgatccggagcaacgccatacctaactagcccatggggagcgggcaaccgttcgtacacatgaacctcgacatctttgccttgaggcgaatcttttgggagctgggccagcagacgggatgccgagtagagagctgacggtccggcaccaatgatggctagcttgagtggagagcgtgttgcgatggcggaggccatgatgttgatgggtggtggttcgatgtgtgagggatcggaaagatgatatgcaacaagactgacaacagacgtaatgcattcctttgctgactaaccaagtttgcattgtacattgctttgctattcattgaatgtctcaaatgtcctcaatgtcctcagttgtctcttgatgagttgaacagattgaaaaaaacattgcattgaggagaaaatggaacatctaaggtaggaaatgattgtactcgatgactccaactggctctgcctggaagagcttgagccagcctagagaatagaccggacgcctgtaagagctagtcatcgagagtttgcggtacgttctccccctactttcccagaaaaacaacagtctttgggatctgagcagtgtcttggatagagtaagggtgcttggatggagcgagcataaagtatggagaagaaggacgatgtggtatatgttgtacaaaaaaaattgggatagagcccgagaactactaaaggttagtacagtaccctctatctcggtttctccatcctttctccctgtttgccttcctcctgtccctgtgtcctcttctcgactacagagagaagagaacccagaaagagaagagagcagaggaggaagaaagaatggagaaggatggagaaggtaatctgttcaggatacaaggatcagtcagggcatcggaagccaggaacggcaacaggaacaggaacgattccccaggcacgtcgaacgcagcgtgttcttcggatggggatcattgggggtgacgaaggaacggagtggacaaacgctgacaggaacaggccttttgtgtccctgaaatttcccgtcagggatgaagctggccctgatgaaaatcgacgccccgactgcgccaaattttttcactgccctcgtgcctggttgcgtccctggtgtctcctttttttttttccttctccccttttcttctttccccccatcccgtcaagcctcaagactgtaagagtcaagtttcgtgatagaacagcatacagagcatacgctcaccttcttgttctactctcgcttcattcatcatcagtttcccggcacactctttaggttagatcctcctttttttctcacttaagtgggctcagttcaatagaaggaaggggagaagaggagagaagcaggaaagcaaagaggaggatggaaaccaagacgactcaaacagcatagagctctcttcctagacatctccaatggccccagtccactttcttgttccccagcaacttgtgattggagaagcaactgtcaaacaacacttggtggcgaaacatcgatcgatcgactaacattcgaaatttgactttttccagaaatggcttcccgacccaccgtcaccttctactccgaggctggagaggcttccggctccctcccccttcctgccgtcctcaccgcccccatcaggcttgatgtcgtgcagcaggttcacagtacgtttacgttccttcgactccttttgtccaaatccttactcacgctcttttctccgttcacctatctttctttcagagagcatggccaagaacaagcgacaggcttactccgtcgcttccaacgccggtgagcagacctctgccgagtcttggggaactggtcgagccgtcgcccgaattcctcgagtcggaggatccggtacccaccgatccggacaggccgccttcggaaacatgtgccgaggaggacgaatgttcgccccgaccaagatctggcgaaagtggcacgtcaaggtgaaccagaaccagaagcgatacgccgtcgtctctgctcttgccgcctccgcccttccttccctcgtccttgcccgaggtcaccgaatcgagcagatcgaggaggttcccctcgtcgtctctgacgccgctgagtcttacaccaagaccaaggaggccgtcgctctcctcaaggccaccaacgcctacgccgatgttgccaaggtttccaactcccgaaagctccgagccggtcagggcaagctccgaggacgacgacaccgacagcgacgaggacccctcgttgtctacaacgaggacaagggtatcgtcaaggccttccgaaacatccccggagtcgagctcatcaacgtccgacgactcaacttgctctccctcgctcctggaggacatctcggtcgatttgtcatctggaccgagggtgctttcggtcttctcgacgaggtctacggaaccttcgacaaggcttccaccctcaagaaggactacttcctccccaccgccaagatctccaaccctgatgtcacccgactcatcaactctgatgagatccagtccgtcctccgagctgctggtcccaagatcgccaagcgacctttcacccagaagaagaaccctctccgaaaccccgccaagttggcttccctcaacccttacgccgcctccgtcaagcgagcggccatcaaggtccaggagaagcgaaccaagaggactggagccgccaagaaggctgttgccggtggcaaggccggagagtccttcctctctacccttcactctgcttaagcgagcgctttccatgtttcattgcgtttctcttgtgctgtagttttaggacccccttccccatcaatttttttctttttgggatggaattttatgacccattaatgatcattttcttccaaccaaaatattgtgtctactctccctgcgacgaaaacgcgagacaattgttcctccaagaaagcttcttattcccagaaacaaatatcgaatcaactggagaaagaacttatggaaaacaaataaaattgccagagaaaaaaacatttgttggctgtctacgtactgatggtaccagctagttggtatccgtttgtggttgtgtataagcttaagagttcatgacgttcatggggtctccctcctctttgtatctgcttcggccggtcctttgatcaatcgtcaacggacagaaagaaaacacccacacacatatggaggtaaagagcatacagtcatgggaattgttatagaagacgcattggagaaataagctaattgctccgaaccgagacgtgaaaagaaccacaatcagagaccaagacaaaggaaaggaggagggggggagcgggagaatggagagtcgaaaatgagaggagaggaaaggaaaatggtgataggatggtacttcgccacgaaagcaacgaatcgaggtagagggtaggtgaaagaggaagaagagaatacagcgagcgaatttgttcataaccccaagtttgggtcatcgatcgttatcagacttttccgaagaattataagtaagacagataatccccaggaagggccgtcagagttcagctttctttacgtcaaacgtcatgaagaagcgataaagaagggctctacctaaattctttcatcaacacgcattctcctccattctcaagatcgatactgtaggcgtgaaacaagccggacgcagaaataacaaacacctgaggcgtagtgctgtatggtgcagaaagtgtagaccgaaatatctgcttagtagcgcgtctcttcttctcttctttcttacttatccttcagtgaataacagtttaaaacatagaaaaacggtcagactaacccgcttaaagcaaccacacacctcactccaccacccctaagcttgacatgcgcaaaatctctctggggctcccacatctccgttaccgcgctcgacagataaccacccacgcttcctgcaaggtgtttcccaaggtacatcgatctccttcggaagctggccgtcgcggatgaggaaggcacaatggcgttctctgtcgatcttccatttccattcccccgatcaactccatatgatccagacgggtctgtcagagatgaatacgaggatttcgctccggcagacgtgtcccctatgacaggcgacttgggcaattgaaatatatggattgtatccgagtcactgctcacagcaagaagcgtgctcatcaggttaaagttgatgctccagatctttgccggataacttccccgtctgaactgggcgactttctccgcgccaggaacggtccacactctgataacagttcccttatcggaggcggttgccaggagagtgccggccgagttgagaacaaggaacgagatcggggacttgtgggcttggatcacgttcgaagccgatagagaggttgtatcaaacaggttgacatcaccaggttgggtcgacggctggggatgaggcggttgggatggggaggccaggggagacgtcaatgtcggaacaggagcagggtacgcgacgtaagagtttgtggacgagggcgacaaggcgcatatagctaaacgagtacaaacacgaattcctcatatcagcttttcgagaccaatgaaatcttttaagaatcaaattcaacaaagagaagctcctcaagacgaaccattcggatttggacttgtttctatggtatgcatcagcttcatcgtgcttacgtcgtagatatagatttccacttccaacacaacgaccatccgtttcctgttcagcttgactgccaagatggatgtcggaaagagaagctcgcagattgtggattcgcgctggtagaggattcgaaattccagtacaacccccgaccaaagatagaatagggtgaatcagtgattggtctattgtacagggcaagaatcgaaagggagaccaggagaaacttgacacggcctaccttggtattgacgatgtgcaaccttcgagggctttctttgggttgatctgccgctcctaccagagcgaccagggatgtgcagaacaacatctcagcaatccctgtggctccttgttctaccagtgcccagaacgagttcattgtaaccagacggacggataacccgttgatccctgttcagtattgaacttgacactgatcgatgcgagatgtcttatcatgacgcgtaccttttgaatgaatcttcccatacggatcacagttgatgatcgtgtacccgttcttcgttcctatcgagatacatctaccaccctcaatgtgatcacaccagagtaagaagccatcccgtgcagctaggccgatggaattaccaaaactacgcgacaacacgttcagatagacttacgagtaatcctgattgaatcctgcaaagctaaagactcgaagaagagaggcagaaagaggagttacgagctcagtaatgtctctgactaaacgctagagaggtgaaacaaagcctttgaaacgtttcccggaagagaccgagctgtgaagctatactacaacgacgtacagtagatctggattctgcttggtaggggccatagatgacgagacagattagaggaggagattgagagtgttgaggatgtgtgaggtgagcgagagagagatgagggtatggactgattggatgttggtggatggattaaagaactgacgacgaaggctgatgaatcatctctagaacagcaccttcagcgcaccgccgccgtcagtccatcttctttctttcttctttctttccttcggttcttcgtgtgctcgttcgaagtgttctttcatcattaaaggcatcaactgttttggtacaagaaagcagagagaacaatgaggtctgtgttgattaaagtttagccatgaatcatgtttttcttttcttttcattctctattctacaaacgcactacaccgacttttctctgtcttctctttatatttaaccgatacaatctgaacgggaaagaatcaaaagaaacacaacaacagaacagagagcctcaaggaccgtctaaaccacttcagccgtgtatttattcctgagtagcatcggcgttgtaagcgctctcgtgaatcttgactgctcgaccggacggatccgaactcataccccaatcggctcgaggaatccatcggacggcggtcttggcagcagcttcggacgggaagtgcttctcaaagacctctcgaatccagtaagcctccttggtatcaggagtatcgaccgaccatctctcaccagccttagcgagctgctcatcagtaatgtgagactcggcgtgggccttcatgccatcgatccaagagtaaccgactccgtccgagaactgctccttctgtcgccagagaatgcttttcggaaggtagggctttccgccatcgggggagcagtcgaacgcctttcggatgatgtacttctccattcgggggcaaccatcttcgtccacggtctggtgagcacccttgctgaactccttgtgcttcgcgtcgatctgcatagcgacctccaagaacttcttgtcgaggaaaggaactcgagcctcaagaccccaagccatggtggacctagaagtagatacccaaacgagaactagtcagcttctttatctttcccaaaagtctattatcaatggaaaaaaagacgttgaaagaaaattctcacttgttggctcggaggcagtcagcggtgtgaaggttcttgattcgcttgacgagttcctggtggaaagatttagaatcgggcgcggcgtggaagtagaggtaacctatacaagaaaacaagaagacggttgatgagaacacagttgagcaacctgcacataaaccggtatgctaacataccaccgaagatctcgtcacttccctctccactgagcaccatcttgacacccatagccttgatcttccggctgagaaggtacataggggtactagctcgacaggtcgtcacatcgtaagtctcaaggtggtagatgacatcctcgatagcgtccaaaccctcctggacggtgaaggtgtactcgtggtgaacggtaccgaggtaagcagcggcctttcgggcagccaaaagatcaggagagttgggaagtccaatggagaacgaatgaagctgaggccaggtggccagggaagcctcggcttgaacagagctatcgggggtagcggttccggacggtcctctcctaagagcctgctcccgagccttgtgttgggcctgggcgaccttttcggtttccctggcggcgatggcagcaataagactggagtcgagaccaccagagagcaacactccgtacggaacctcactcatcaatcgcttcttcacagccatctcgagggtttcccttaaagccttgtagtcgacgtccccagtgggaacctcgccgacatcgctgtcccaccaagtcggcttgtagtatcgcttgatctcaccggtggcagagtcgtagaagtgaccaggggggaaggcaatcaccttgtcgcactgatcgtggatagccttaagctcggaagagaagaacacggtttctggcgagcttgacttccatccctggtagagagtagtgattccgatagggtctcgggcggcgattaatcgagcgggcgagacagaggtgtcaatcaaagtgaaagaaaacattccatccaagctggcgcagagctgttccggctcggtctccttgtactatttgacataagttgaacatatgatggaaggaaaccatactcgttcagatttcgagttagagagaaagtgtaagggtaagaatatcttcctgctgaccatgtgcatgatgacctcgcaatcagagtgagtcttgaaggtagcaggcttagtgagcgactttcgcaagtcgaggtggttatagatctctccgttgacgcaaaggaagatagtctcatcctcgctcacaaggggctgggctccggtatctaatttgaaaaacaaaaaatccaagaaagttcagcggttataaaggaatgaaaagaggagcccaactccgtctacaccctctcatggagtctacaataagtctgttccgagagtaaagttgagccagccggaaaaagaggtaaagagaacaaaactcaccaacaccacagatagccagtcgctcgtggcagagaagacaatctgcctatccggtccgagagaggaagaggagaaagcagggagaaaagagaagaaacccgaaagaaaggtggcgcacgataagaagagacatgaactgtcagtaaatcaagaccttaccagaagaaagatagtttctaaggccttcgagtcactccgaagagaagagacgactctacaggctgatgagcagaagaaagaagcatcatcacccacagaaggaatctgaacaaggccggtccaatcgggtcctcggtgttgctgtcgcttagagagagcgacggcctgtgctcgagtgatcgagctgttgttcttgaagcagcagaagataccacacattctaatgatttacctgcgtacttgtatgagtgagtgatgtagagattgatgaagttgaacagaaagaaggagaatgagcggaaaaaaaagatgcggcttcttttttatttgacttgggctgaacgaaaaatcagtgactcgggcgatttttgaaattatttccgctcaattcatgtttcttcgttttcgagtttttctttccgatcgttatctttcagctgatatttacacacacacacacacacacacttacgtacatatgcatggtatcgaatattggtagagagagaagcagacaaccagcttcacagatagatctaagagtctccatcttcatcagacgaatccatcagctcgtgaacttcgggcggctgcggtttgaatacaccaggctcgacatccattttgtcttcccggcgcggaatctctaaagaagtttctgttagcttccctttcaatgagaccacacctcccgagcgagtgaatttcttgtctggtaacgattgagtcggcccagacgagtctttcggaatgatctgtcggaggtttaccatcgacggagaggactcttcagcttgcgatacagacgagcttgtactcgcgggcacagatctaggactgggctgagaagtaatgttagggacagaagtgctggtcgtcgatttgtctgtgggtttcttcgcgcccgagattgcagtactagacggagcagaagccgtcactgatgagggtaaggcttcggtagatcccccgtcctctattccattttcttttctccactcggcttgcaaatcaagtaactggttcttgattgactctctctttgttggtaattccgactgccgccagaattcatttctatccgccgttctggtggccttgtttcgatttggaatagggtgctatgtgagaggatcaaataacacgcgtcacacgattagcagacgatcacttgatagacgcatctaagtgaaccagagagacccaccaaaattttctccagtgctgcttccgggtcatcaaagaagacttcgatgtagtggagcaagtacactccgcaggatgaatagtcaggttgtaatggaacctgtatcagaacgactcgaagtcagtatacgaacatctaggcagtcgaagagcagatcctctctcaaaacgatatcgatgaccagacgaacatcaactttctttgtttccagtggagtgacctctttctcaccccatgccttgtggaaccccgcttctgaccgcagatatttcgtcaacacttttctcggttccgaccggggcgttccgaacgaatcgaaaatgagcacatatggactgtgtccaaaccaggccacagacgtttaatgtaagctcaaatcgagaaaagtacgaaggatcagagtaaaataaaagaaagggaaagaagagcttacaccgacgatgcaggggcgtcggcacctgacatctcttgatcggctccatcattgccgtcagcaacagcaccagcggcctcaacgtcttttacctctggttgtacagcagggtttctcaagagggcggatggattgacgataacggcacaataccaatggtacctacggaacgatcaccaaaatccgacgacggtttattttgttcttctcagtcgctctcgccacaactgaaggcttgatgttgtaagaagcagaatccaaaaacttactcttcgttgattggcacgacaatatactttttcgaaaacagatcgaccttgccgttcgtccaacgcttgaccgtctcccaaggatctttcccagatttgataacactacgaggataggaagacacaagaaataagtcttcagcccagatccgtaatcaggttataagatggacagtggacttactttcgatcggtaagtttcatgtataggaaagagttgaaaatatgcacctcgtcggtaagttgcggtcgcttttcgacagctcgtctaaacgtttccctttgaagatcaacgccccgtttacaagcaaaacatcagtttaactcccgaaagaacagaacgaaacacatactcacttcagtccgaattcaatgatggtatcgttaaggtactcagcatcccatgtcgtccgatagaaatctccctttgtgatattgatctctcctcttccttttgctggccacatacacatcctaaatgaggaaagaatcagtcaaaggaccaacaaggttaagattaacaatcgttttcgctatagtgaagataagataacctgaaacgaaagaactaagacacgaacagagtttcaggatcaaccggtggtggtggacgactcaatgcgtgaagagcgggatcatcctccgcactcggttttggctccgatttctgtgcacgctccgctggcgcggccaaccgagtacccgatctggtggattgccttggtattctattttggttgatgagaggaatagaaattaaacagacaacaaaaaattagggaacaggacgggtagagtacacaagctatgcttggtcaatgaaacgaaggttttattgacttacgcgatagggatcggctccttatttggataaagtaattcccacatctcatgaaacctcgactctgtgttgtttctgtatttcgtcaaaaaaaattaaacaaaacacatgtcgagagaatgagaccaagaaccaagaggtgaggatcttatcaaaaggtcccctccgcaagcacatacacccaaagaggaacgttttctgaggacatacgcttgaaaactatacggaacattacgtccatcgacaccaacgaccagtaacgaaggaacccgttcccaatcgtccaccgctgacccatctattgaaatctcgaacaccgccttcttggtttctaccttgtcagctgttattgaaaacgaaaacatatgacatgtttagtaacgcgcatattctttcttatcatattttagtatatgaagaccaaccggatgtaactccgcttgctttctctctgtactcaacctgtagaagcagaggtttctcgtactcttccgataactgtacgcaattcgaaaaaacgaccgccggtcaagttgtcaattaaaaaatcaggaaaggactgctaaaggcaaattttgacaaaccatgacatgcgtgacatcagcgaaattgatcgtgaatgccacatgctgcatggaccgcacttgaaagctcgaactggtcacacaaagttttgtgacgcgcggttcgaggaatgatgatctctcgacaggaagagcaacgtctccgatatttatcggccgagtatcctgcgcttttagaaacgaagtttctatttttttcttcacctttggcactgtcgagcttgacggtttgattgattctccctgtcagagtcgagaaaagaaatcgaattcatcatatatgtggatgaaagaagaaataatcaatcaatcgaccaattatcataagcgaagatgcccttcagataaatgagaaatatcttgaaaggaaatctaagactgaccgatctggacttcagatttgaagcgagtctaggagagacgactgtcgagaattttagtaagctctgctgtgcgctggcacgatcattcgctgcctcttgttgttttctgacagactgccccatctccttgtctctatttcgaaccgttgccatatccttctcaatcggtcttctggatctctccggcgcaaatatcggacaaggctcaaagctttcgcgtaggggcgtatgtgttggtaatgaagggggaaggggatttgacgactgtttatatcttggtgcgggtgagaacgaattgattggatcatgcgagtcgtcgtccgagtcagggacatcaatgggtgttgtgctacaccctgtctgagcaatatcctgccaatgatctctctcgacctcgccgcttgtcatttgaccagattgatgatgcggtacttttgtcggtgaatcaaacctctgacgcttgatctgatgttgccgatagctttgattgtggttatagttgtggcgactaggatccattgaaggagagattctgacgtctacggagggctggtgcctctcgaccaatgcactatgagctgttgactgattaaatgagacagcaaggacgggagaccggctgatcgtcggtggcggacgggagagaggtgtggaggaagttgacaagctgtttcttcctagtgtgaacggctgttgattcacaatttcattcataagtatagtcagccagaaagaatgataggccattcgagctctattctacaaggaagcagaattcacttacactattaattgcgcttgaacgtttcttgatgattgtgaagatatcggagcgcaaaccacacacacacagatgaacaggtgagcctttagaagttgtggtcaaatgggtgaacaaacttggccttacaacaggttgcctatagcttagttgcgcgggcccacgctgtccaggttgaggggtgatgatcgggattggctttggttcggtctcgtaaattggagtctgcaatggtcctgtccgggaatcagccgattcaactctccgaggccgaggatttgtatcacttttggaaaggcccatgctattgatctcactactcacgaccaatcgtatagcaaaccaagtccgagtgagtttagagtacacaagaaggaaaccataagcgacacatactttgagagactcaaccgagccctggaactcccctcactgggaccagcgtcattaattggaagtcttgtgcgtttgatgattatcccgtttgatgatcgaggaatatcgagcacttgcaactcatcttcttcttcttcttcgtcgccatcatcagccatgtccatggtttgagaaccatcgagcattcggatggacatctttccattagaagagagagcgatcctgttcaagaggtttgtacgaggatgttcgggcgcgggacggttaacatgtccgggcgttgatgttccagcgacatttacattcgttgaactcgatgtggaaacgatagccatatgatcgttcggggcggcgaccgacggtcgcttccgttttgcaccgaagcctggaagtagatccgagagagctcgctgaaatgatctgaaaagacagaaagagttggcagagacagtgattcaacagaagatgaaagacatcagtcgttttctctaatgatgacactgtgacaggagattctctcaggatattcgaatactgtgtgcctgtccgacatccggtatagccattctacctggtgcaagtcatacggagaaagatagagaggacccacttagatttctgaatatgtggagctctttgtccagtagacggcgtgtagaaaggactggagtgatgatgatgattcggcatcacgagagatctccttcctctaaaagtagtgatcttgtgaaggagaggtgaccagcaaggcgggagagatagagcagggcgtcttgacgaatcactctatccgaggacgaaacgagcaaacccaagatggatctgactaagtattatatctctgcccaaatggcctatgctttgacaagaggactatgccacgattgatagaaggaacaagaggaaagatagacagagatagaagaatggaggattagctgggtgaacgatgaggaaggattaatagtccgtcagagtgagaagcagcttaggaggtatcacgttaagttgatgtataacagatacaggttaagaagtataacggcgaacatgctatgttttatctctcatatcatggtaagatgctactgcgtttcgctgtgttatattttacatacagcgctcaatataaatcttagtgcgtaatgtaggtcgatattttcatcaagatttgattcatttggcaagttttcgcgtcaaattcacacatgaaatcatacttccggctgccttctttccgtcagcacttgccgtcagcgaaccacggagtcgaccaagatcaagaacacatacgatgccggttgctccttcatcaatcaagaacgcatacaagcggtcggatgtgtaccgaaaacagaagagggagaaaagtcaggataagctgaggagacgattggaaaccaagaaagacgaggcttctgccgatggtggtgaggcgcgaaagaaggtttgttcagaccatccttgtgcttctcttggcttggttcactatggatagagatgctcagaggaaggtttgttttcgtatttggtagaaacgagtctcaacaaacatcccacgaacaatcgacaacacgagagagtttggacattcgtacttgacgtccgatcccacggccagcacctccacctctgcgttgaatattgatgataataactccaacgaggacgaagatggaaaagacgataacgaagccggtccgtcggcctcctctttccctcccgaagaagatcttgagggagggattggagcaattccttcgagcagaggaccgggaagggatcccagagtgctcttgacgacgagtccgaaagcaaccagggagacgtacacttttgccgaggagcttcgagggatcttcccgggtggcgaatttttcaagcgaccggtaggaaagtgagtacacagtttttccttcctcgttttcattccgtgtatgcaaatggacaagaaggaacttgagagtacacatgttcgctctggctgacgacttgtccggccgacgtccttattttgcattctctcttcacagaggatttgagctggggaggatctcgaggtgggctagtcagagagactacgacgcggtgattgtgatcaatgaggaccgaaagaaacttagtgagttcgactagaacgtcaagacatacatgtgggtcaaatttggggaatcaagtctttgttcgctaagtacacaaacttttggtatcgttcctttctcgcttctcttgcttttgaatagatgccatcacaatcatcaaccttccgaacgggccaacggcgtatttcaagctgacatccgtagagctctcaaagcagatctctgttcgttttactttttttatcaactctttgttgtcttcacactcacgcataattgcatattcatctgggcatccatagggacatgcccgaccgacccctcattcgcccgagttgatacttaacaacttttcgacccgattaggtttgtctatcggaaaactgtttggatccctcttcccgccgttgcctcagtttgaaggtcggcaggtcgtcacattgcataaccaaagagattttctctttttccgacggcatcggtgagtcttggtcttttgtttgaacctttttttcccttgcctgtcttttgctgttttgtgttttgtgttttctttttgctgacctgaaaggcaatatgtgcgttgggtagatacatgtttaagtcactagaaaagacggctctacaggagatcggaccgaggttcacactcaaacttcgatggttgaggaaagggctgcccgctgtcacagcaggaggtagtatggctgtggatgtcgctcctggagctgacgaggacgaggaggacgaggacgaggctgtcaacgtagaagatggggaggacaagataaacgatgagaacgaggctgaggctgaggacaacgaaaaggaacgcggctcggacgaagacgaagaagatgatgatgatgaagatgaagaagatgaagagaagaagacaacgaaaaagtccaaacgggcggttcctccgttgaatgcacagggcgagttcgagtggaaatggaaggttagtccgcatcgcgtaatgtctatcatttttgtgaaagctttctcacaaaactgactgaattgtctcttggtggtgggcgcgcacgtacgtttgtgtgtttgcgcaaaattgttacatcagccgaagatggaggtttcaagaaagatgtttttcctatgagcttccaggcccatttgttttttattatcgatgtgcttttcttcctgttcactcgctatgtggtgtttatgtgtgacccagatcaaaccgtggacaaccagtctaagcaacgaaagaataataataaggctacggccaaaataccaaaggatagattgactacaaaccggaacactgtgagccaaaaaagcatcgctggccgggattggcaaaaaaaagcggcgaaagaaaattgtgcaaaaagtttttttccttgttatctttctttcagtccggccggtctgactcgccgcctgttcattctctcgttgcttctacctcttcttcttcttgaccacaactctcacacacacccaactccataacctccatctcctccgcctttgcatgctctacacagaacgtgtatcagacgactacatctcggaccaaatttacaaaacagccaacctttaaagcgaaaaacaagaacaagcaatcacctacttacttttttttcccttatcaaacgccaatcttctcttatccatcttcactttttcttcgttcccttgagaagaaaaaaagtcccattctcctatcattcaagtacatcccatccagtaactaaaagaaaagaaaagaaaagaacaagatgtctgcctctatcctctcatctcttcgattcggctcagtccgatcactcgctttcgcccgaggactcgcttccgcttccccggcctctctcgtcaagggcgtgcctgctgcgttgcatctcaaatccggacaatccttctatggaaccagctttggaagcaagaagagtgtctggggagagactgtgttctcgaccagtatcactagctgtgagtgacccttttgtgtctgtagatggccttctgtgggtccaatcagttttgtttaatctctagatttttttccctcctccagacaccgaatccatgaccgatccttcctatctcggacagatcctggtgttcacaacgcctttgatcggaaactacggagtccctgataacactcctcttcctgaattccctggaattcctcagatggagtctgacggagtgaagtgcgccggtgtgattgtcaccgacgttgctctcaagcactcccactaccttgccgtcgagtctctccacgagtggtgcgaccgacacaatgttcctggaatctctggaatcgacacccgagcagtcaccaccatccttcgaaaccagggaaccactctcggccgaatcgctgttggtgaagaagaggttgcgaaagaggctcccaaggctgaggagtactgggacccagccggagagaacttgatcgctcaggtctcgactaaggagccctatgttctcaaccccgacggcgatgttcacattgccgttttggatcttggtaccaaggccaacattctccgaagtctcgtcaagaggaacgccaaggtcaccgtccttccctggaactatgacttcaactcggtccgagatgaggtcggtctcatttcttaacttttttttacatctaaaagtcatgctcaatctgattttttttccctttccctctacctagtttgacggattcttccttaccaacggacccggagacccgaagtcgatcatggacgttgctctcaacgttcgaaagaccttggacgagtggaagaagcccatctttggtatctgtatgggacaccaaatccttggtctggccgccggtatggaggcttaccgaatgactttcggtaatcgaggtcacaaccagcccgtcttggctcttgctagcagtggaagcatcaaggccggacgggtctacgttactgtatgtcctgttctttctcatttgggatcttcagaagtagtttgtgtgcagatagctgatctgttccatttctctcattagtcgcaaaaccaccaatacgccctcaaattgactgaagagttccccgaggactatgctcccttcttcatcaactgcaatggtgagcttcgtatcttgtagacctgttcgttggtcgatagactgggtgttaacatggcatggatatgtgttcctttctccttcctctacagattcctcggtcgaaggtatcatttctactcccgagtcgggcaagcaggtctggggttgccagttccaccccgagtctgccggaggtcctctcgacacaatcgaggtaagtatctcggacggaccctcctgatatggcctgtaagaacccctgattctgactgcaccgtaaaccgttatacttctttactagatgttcactgacttcctgaaagcctgccgaggaggcaaggatggatctgctacgttgacggctgaaggcaacaacgtcttgggcgaggttcagaaggtcgttgaggtttcagcttaagcgaaaagaaaataagattgtttagccggaccatgcagctcgttctgtgactctctgttctttcttcgtagcagatgagatgcatgttgtaatcatatctgtcaccatgagtatatgggtgtgcatctgcatatccagagcagcagcggcatcagtagccaggtttgttgttataccaattgaaataatcagccagtatcttctgcaaaccaagtgaaagttgagagtatctgacaatgagagaatgcgataaaggttgagcgagacccgaagtaagatacaccgagagtagaagagaaaagaacagaatgacaaacagacccaagacgatccctcgggacaaatctccatggagctaatcccgagagtgcgggcgggcaaacccaatatgtttgatcaccttcttcacctttaccttctattcacctccgaccgacaaactttctcttcttcctcctttgcttgtcttctttcttcatctttttgcttgttagttctcctctaattagggagattaatctctcaacgaagggattcatccgggccattaacgtcggctcatacccaagacatacttattcaaaataaagaaacctgcaatcgatagtatccccaagagaaagtgagaagaaccatgccagacatctcgtccagcacatttcagccaaaggctaggcagccatacattcatccttcgacatcgttctcaggctcgctatcccatcaaatccagcctcaagttcacggacccaatgcgtctcacagctggaaggacgtaccgttacacgtcgcaaatgggaatggaaatgggaatgcaaacggaactgcaaatgggcacggagttgggaacgggacttctgttacggatgggcaaggttcgatggatggcctgaatggaacgaacaatggtagaagggcatcgagtccttcactcagcacaggcagacggcctcctctgtcgtcgacgctgtcaaacgcgtcttcctcgactggttctcttggttcactcaaatcatcacccttgtcgtcgatgtttagattcgcctcggacttgctgccctcctcagtcaaatcatcttcagtaggcgtagcaggaaacgtcaagttcatcctactttgctccttgtggtacatgtcatctgccatatcttcaaacaccgggaaggccatttttaatgtcttcaaattcccggtcaccctgacccttgttcagttcatctttatcgcctttttctcttgggcatggacgagcccggtgattggaatgggcaagcttagaagaccgagtaggcagctcttgagaggcgttttgcccatggctgcttttcaggtaggaggacacgtgttttcgagtgtagcgacgagtagggtccctgtcagcaccgttcataccataaaggtttgtcctttttatttcatccttcgctctcttcccatctcagttgtgttcctcttcctatagcaaagatcgcagggattgaaatttaccaccttgtcatctgtttccttgcaggccttgtctcccttgtttaccgtgttgtcgtatcgatttctgttcaacgtgtcatactcatccgcaacttatatgtcacttgtcccgctcactttgggcgtgatgtttgcctgttcgttcgacgtttccgcttcgaatgtattcgggctggtttgcgctttcggctcgacgttggttttcgtttcatccaacatattcttcaaaaaaatcgtcccttcatcatctgcgccatccggttcttcaaaagacgacccaaacggaacgaatgcaaagttggacaagatcaacttgcttttctactcgtcctccctcgccttcttgtttatggttccactgtggctttactctgacgcgctcaacatcctggctgattccgctgaccgagccgccctcgtaccggccccaccgtcaaggacgaagacggttctctactactttgttctcaatggttcttcccactttctccagaacgtactcgctttcactattctttcttcgacctcaccagtaacgtactcgatcgcctcgctcgtcaaacgaatcgtcgtcattgtcatggctatcgtctggttcagacagaccgttcaccccattcaggccctcgggatcgggctcacgtttgttggtctctatatgtaccaaaacgcaaaaggcgaagtcgagaagatggaaaagaaggtccgaaagatcgaggccatcagggacggaagtttcttgccatcgagcaacggagatgcctatttgatgtcgaccgagaaaggctcgaaagtagctggtggcccgattggtggagatctcatcgcatccgcatttggcgctgtaagttgtttccgtcgtttcgttcttttcttcttaccgttcgattttcatgaatgaaggctattgatcagagactaatgctgtgaaatgtcttctttgctctcttggactatcaagacatcgtcgaacgacgtctctaggcagactggcccccaatttcttccaccaccaccatcgggcggattgaactcttcgttacggaatcaccatcctcatccgccaacaaggctttatgcggccggacctatcaaatcatagaatcatttcatcttttctcttcgctctagactcgtgtttctttcgttgcgtttgtccttgatttgtttcgaagtttgagatatcctttcttttctcttctctctttttttcgggacgttagtttgtctaccttatcatcatctgatccctttctcgtccatcgaaagaagacgacacatcttttcttcttcttccttttcgaatctgagcatttcttcaaagtctccattgggttctccctttctgctttcctccatatggcctctttgcctaaagaaaaatagcgacaaattgcgttcaatggggatttgggctagatatctctttccgccctcgtcggatgagttcccaagttctctgtctctctcagtatttctgttaatattttttctgtccactcttcaaatagaatataactttctgatcttgcctgctagcccatccaaagatgatcgcatgtagcgcatagaagtccatcggcacagctttctgtggcgtcttagctgaacagggtagcgatcccaaagcttgactgactgaccgcccgaccttcccttttctccaacttcgaggctcatccttagaatccctatcctttctagcttcttcaatcgcgaccgtttcggttcagggaagcacgttcagtttgttagcatcatggtctacataaggagctggcagcagttccaaatatcagttcaccaggttcgaccgtccatttgtgaagaatcattatctttcatccgtactcgtggtgatggagatctctccttccaagcggaaaagagcacgcgaacgaacatgctaataagcttcttattcaccttctgtcttcgttttacgataagttatatgaaaagagtcctcagagtgtgagtttgttcatgttctgaaggaggaaataattcttgatggaatacatcatgcactcctcattcaagacaagagattgtgtttgaactgacctccaagacatcccgcttctcttctggacttttctctctccctatatgtactcttatcacggttgaaaacacgaacgaaaccatgaaatagacaagatatagtatcaagtttcgagcggtcgatggggtgctagtccttaaagtgacggatgataacaaggttagtattctcttctttttcttctctttctcttttctctttcctcttccatttctaccctttctaggatgtttttttcccttcctgaagccatagggactcggacatcgattctgaactaatatcttgtattctttcgctctgaaatttctcatcttgctcttaaggtcatctctcacaagacaagatcttccgtcctcctgaataggttcgagcaactcaacaaaacgctcatggcacgaatgatgaacctccctttggctcctcccccttctctatctacgtctctaccgaatttcataaatccagcatcaaccaccaccaacctgctttcatctagtgcagctgggttggattcaacgcatatacccgaaagagcagaaggaactgaaggggctgagaaggtgacaagtgcgggtgcagggtcaaagaagaagaagaacaagggcaagaaaaagtagagatggatgtatgtacgtgtttgaaaatccaaacgtataccccgaagagaaagagattgaatccttggtaagatgactatcaagatgtggatactgtcgaccacctggatcctatcatcgtttctctctcctctttctttatcgtcctcttctccgccagaaagaatcttgaaattggagaaagaaagctgttcccgactgtgactatctttgagacttttctcgcgctgactgttctcgaccgttaacctcatcttgtctcaaccagccgggtcagttaggtcagagtggctttttgttttttactcatagtgatctggtttgtttgattgtgtctctctctcggagccagcgcatgaagatcaacggcattcggatatatagagccagattgacaaaaaagatatacgcaggcaaatatatggagtagttcaagatagaaaagaggggaagggggggccaagataaaaatacaggaccgtccaactatatatatgtccgatcaatcctttttctcaaggtatttcttctggggtcagcagaggacttgaaaagcgtaagtgagggagaagaggcaaggaaaagagagggaaatcaaggatgtgatggtgcataagaagagtgaagaggaaaagcgagaaccgcatgtgtacggagcactcaaaggtgagagtattatcagaagagtaaacaagttgacaagacagataggggagaaggatacgataagaagaatctgagtccagctctgggagttcttctacgatctatatgatcgtccgacagtatcttccaggttgtatctacgggttacgccagttgctgtagctgaagcggaagccgagatcgtagtctgagtagccgaagcggacgcccgagcggttgcttgggcgggggaaagacactggttgctcagtgcaatatcgctcggaacactgtggccactcgtcgagtttgtgtatgtggggctgtacacctcgatggcccagcttcctccgcaaagtgcggttgaaagaccaccacctgtgacgaggagggagaaaaaagatacggtgagcaacctggtcgaaaatagatacaagtccaaatggatgagacgtacaaggtgttgaacaaagtagactagtggtcgagatgatgttcaaggagcttccacagtagcactgggttccaccctccaccccggccatcgagtaaccagtggaagagcagtattgagtacagagcaagggcgtcatcaatgaatgagtcaatgtgtcgcctgagagggtcctatcccaattatcggtgtaacatcccgcgtccgaccaccctgtagtgacgaaagaacacgactggtcagcgacaggacgccggaacgaagtggaagagggtttgtgcacttaccagatattgagggaatattcacatttgtgaacaacgaggacttcgatacagtcatagcggaactaccaccgcacgactcggaagaatcaccgggacctatttaacatcaaagaaagataagtatacagaaacttttgaggatacaaacgtagatcgagaattggacgcaagacttacaggccgtggagcagagactagagctgacatcagaggatgaggataaagaacttccacactaaatcaacgagaagagtagcgcaaataatggaagaatgagaaaggcgtcagtctaatggtcgacggaattatgtacggatttacacatacgtagcatgtgttgcctgaagtaccggcgaatgcgtaacccgcactttcacatcgctttgtgcaaagagtttgagtcatgctagcgtatgtcgaagaaacaccattgaggactggcacatcaatcggagaggtaatccagcatccgacgtcagaccagacatcagtcgattcttcgctgctataaggaccaaacaccgtcatggcctggcttcctccacaagtctgggtggtgtttccagcacatgaagtggtgcaggacgagtcgagcaagatgttggacttggcgagggagttaccgcagaagcagtcgaaaccctctactccggcataagtaaatcctttcgaagaacagtattgcttgcaggtgtcctgggtcatcgttccgatagagtacgaagagccagtcagggccgtgtgatcagtggtatcggaccaacatccgactgggctgtacgcggtagtcgtttcgtttacgatgacagaagacgtgtctgtagctgatttctggtacagacttagagcccaatagccaccacagatcgacgaactgaaaccaccacctgtgaacgcaacatttcgaggatcagccagtgagcgttgatcagcattgaatacaagctaaactcacaagaataagtgcaactcgataacggaagataggtggaagattcaagaactgagtttccacaatagcactcagttccatcttccactccagcgtaagtgtagttggcgctatcgcatgtgcggatgcacaggtcgagagtcatggcgaagcttgaatacaaggtagacgcgtccaaggttctagtccaagagtcacttctgcaaccgagagacgtccaagtgttgcttgcaggaagtgagacggccgcggttgaggaacggtagacagacatcccgtaagctcctccacacgttttcgagctgtctcctgggcaagtagcatcgcagtacctggcatccacagctgtggatgtgctcaatgaatctccgcactgcatgtgaatcaatatttgatcaataaaacgaacacacggctcggcaggaaagcatattgacctacataacagttatattgaccaacaccagagaacgcaaatccaccgaaggcacatctagactggcaaagatctagggtcatcgacccgtcggatgtctgagaaccagacaaagcagaaacaccgttgatagtggtaagccagcagccgacatcggtccaggtggagttggcggcagctgctagttgttcaggtccatatacagtcagtgccaaatatcctccgcatagctcgaaatcgtcacctccgcctaaagtggtttaaataaaataagattgtgtcaaataaaatcacaaatagaaaacgaactactcagttacccacaagtggtggtgcacgaagagtcagcaaggaggttcgagtttttaagagagtctccacactgcgtataggcgattgcagtcaaatcagtgatatgtgatagaatacaaaatcaagagacagttataaagactaacgtagcagttgtaaccttgaagtccagcataggtggaaccctgagcggagcagcgctggaggcatatttcatgagtcatgacaccaacgctgtatactgatgcaccaagcgtctggtgatccgaagtgtccgaccaacaaccgagggacatgtattgtgatacagctgaaaggagagatgaaaccgaacaacagtgagtatatatcgaccaagagaaacgagtaatggatcactgactagcattagcgtaaacgggatcgttgttcgaggaaggagactggaacatggtgagggcgtacgctcctccacattgtttgcttcccagtcctggacaggtcttgtaacaagacgatgaagccaggtaggtcgatgtcgagctcatctcgttaccacagtagcactcgttaccgtcctccagaccagcgagcgtatagccgtgactttcacacgatcggatacaccaatcgtccgtcatccagctgctcacgacctgggtcgagtcaagcagtgttcggtcgctcgagtcgcttcggcaaccgagcgccgtccaaccaggagcagctggaagagcagccgccgccgccgaggttgatcgagagagtgacatcgtacccgagccaccgcagatatcggttgagctaccagaacactgccaggtacagtagctcgacaagagcacactcgacacgcccatcgtgttagcacagtagcagtagtcgccctgcagaccggcgaacgcatagcccccgaaatcacaccgcgatcggcagagcgactgagtcatcgcgctagacgacgtcgtcaagccagacagtgtggtcgtgtcgttaccattgaagacccagcaaccctcatcggtccacgtgctgttcgagctgtctgtgttctctaccgcttcggtactgtagatcgacagcgcggacggaccaccgcagatctcggtcgagttaccaccacatggtgacgtgcaagatgaagcagccaggagcaggcttgacgaggcgatcgtgttaccacagtagcagtagaagcttgcttccagtccagcgtagataaagccctgggtgctgcaagaggacacgcactgcgccgtcgtcatcaggccgagtgtcgaggacgaaccggtgagcactcggtcggtagctgagtcttgccagcagccggcggacgagaagttggcgaccgttgtcgggtcgactgtgacgacaggagtactggagaacatggtgagggcgtacgctcctccacattgtttgcttcccagtcctggacaggtcttgtaacaagacgatgaagccaggtaggtcgatgtcgagctcatctcgttaccacagtagcactcgttaccgtcctccagaccagcnnnnnnnnnngtgctgcaagaggacacgcactgcgccgtcgtcatcaggccgagtgtcgaggacgaaccggtgagcactcggtcggtagctgagtcttgccagcagccggcggacgagaagttggcgaccgttgtcgggtcgactgtgacgacaggagtactggagaacatggtgagggcgtacgctcctccacatgtcgccgcggagtccaaatttcctgagcaagccttagagcaagacgatgaagccaggtaggtcgatgtcgagctcatctcgttaccacagtagcactcgttaccgtcctccagaccagcgagcgtatagccgtgactttcacacgatcggatacaccaatcgtccgtcatccagctgctcacgacctgggtcgagtcaagcagtgttcggtcgctcgagtcgcttcggcaaccgagcgccgtccaaccaggagcagctggaagagcagccgcggttgcagtggtcgattgaaaaagagacatggcgtaataaccaccacagaagtcggttccattaccagagcctgaacgataaaggggcaagtattagtcccattttgttaacttggctgaagatacctcatcgatggttgtaaggagcgcaaagaaggcaggtccgaacttacacggcgtgttgcagaaatccgatttgatcaaacttgatacgcccatcgagttgccacagtagcattcgttctcctgcacaccggcaaatgagtagccgtcgatagcacatcgagcctggcagagccctggtgtcatcgtgctcgacgaagaggacgaacccgatagggtggttgtaccgtttccgttcgagacccaacagccgacattagtgaaggagctagtggatccaattttggagccggatccataaagcgaagcgctattggttccaccacatatcttagtcgaatctcctccacctgtaagcgaacaaagtttaggttgtttaatatctcgctacccgctctctgtcgagataactcggtagccttctagatgagcataagacttacaagctgtagtgcacacagaatcgagctgcagctcgctagtagagtaaattgtgtttccgcactggaagtattacacacaaaaaaagttaggccgccttcatggttgatcttgagggaagaaaaaataacataaagaacgattcacatacctggcaagtgtatccaccattcaaggcggcatagacgtatccatcagtaccacacttggatatacattgatcgggtgtcatagttcccgacgagaatacctctccatccaaaattcgatttgttcctgacccttcagaccaacatccgagggatgtgaaattggagactatggttgaatcaactggtatctcggcggccttggaaaatacagatactcgataatctccaccacacttgtccgtcgagtttccccaaccttcgaaaggcgaaagaaaattaacgcaagtagaaattaacacgataaacaacttaaggaaagctcagagtgatgaaagaataacgtacaaggctggtagcaatcactagaagctgctacgaggccagtagcggcgatttcatttgaacactgtatgcacattgaaaaagtcgacattcagtgagtaacgtggtcaggcttaataaagcggtaggagactctaaaccactcacgaagcactggtacccagcttctgtaccagcgtatgtataacccgtgctgtcacatgcctcaatacatgccgcgtttgtcatcatgttattagtgatcgtactgccctccaaggttctggttgaactatcggtcatgcatcctacagaggaccaacctgaaagtagttgagaggaacaggaagagaaaaaacacaaaccattagcgttcagcaagatttaaaacaggaaggaaaagaaaatctctcagaatacttactgttcgaagcggcggacactgtcgcagtcaatccatgtttgagcgagaaggccgacagactgtaataactaccacaggcctcgctcgagtttccttggcctggatgtaatcaatttattagtcaagtttgattagatgaaagacagcggcttagaaaagaaaactactgacatggaacgttgcagagtgaatcgtcaactaccgacgaagcgggtatactatttgcgcactatataggagatgcaacagatagaaagaaaagcatcagaagcggttgaaggacgaccgatagaacttgataaacatgttcttggctcgacaactcacgaggcagatgtatccattttcaagaccggcgatgtcatagccatcgaaagcacactgcctcctgcaagcagcgtatgacatagtgcttgtctgagccacaggagttcccataagcctgccactaggatcaccaaaacatccaaggggttcccaaactaggtcggacagacgggcgaagacgatgagtatggcacatgaagatatttggacaattgaagagtcggtactgaccagtttgtgattcaggcaggttagcggtcaacgcccagatcccattggcgtatcctccaccacaagtctccgacgagttgcctgtgcctgtagagagaagattggatcaagaaaagatgatgaagaaatcattagcctgacgagtctttttaaatgatgttgatgatttcttaataggaaagaaattacaaggcgtctggcagctgctgtccgagagagagtttgagccttcaagggagtttccacactgcgcgtatcgatcaagaacaaaacggaatacagtcagtatagcacatatgaaaacagtgaggaaggtaaatacttacgtaacatgtgtctccatcttgaaaatttttttaacaagtaaaagggtcgataagatcagatatcgactatgatacctgatggagaaaagagaaagactgactttgagtaccggcgtatgtgtagtttgcaccggaacatcgaagagtacacaactcgggcgtcatgttgttcaatacgacatattccattccatccaacactctgtctggatcaggattgtccgaccaacagccaatgttctcatatcctaccgtggtgcccgcgtctgtgttattcgagacatccgcataaagatccgtctgggctccgtcctgcaaggaaatttgagagagtcaaagtgtactgttagaacgcaggatcgagaaaaaagaagagatccagtgggcaagtcgggcacataccatcattccgtctgtgggtatcaaggagggtagacatacatcgagtgagattcgagtcaatcttttagaagcggtacatcaacggagaatttacttacagtcttcattgtagtatggaggatcattactgttttgatagatgttgttcctctcaagttgagaccagtagtgaggttgctttggacctttcacgcagtatctggaagaaaaaggagatatgaagatgagacacaggctccatatgtggaaaagtaagtatacaaggaggaaaaaatgtatttactcgggcgcgcctacacatttccttgacactctgggagaaggaagtggcgcggtatttgttgctccggtgactttcgctcggaatggagagaggtactagaagggcaaagaatgaaagtcagtgtttcagcgattcagcgattcatactcaataaggttttgctgagcagagatgaaaaacgaaccatttggtacgactgtcctccatagtcaccagcttcatggatccaaagccaaaatctgtagttacccagaacgacatattgggaatttctgtttagcacaactcgacacaaaattgataagatggaattctgcatacgcattgcatcctccttcgggactgtcagtgcataccaggaaacgaagagcacagtcaggatacagagaagaagataaaagagtgaaagaacgagcttgaggcgcaccaagcagggagatcggacgggatctggaagtcggtaaaatgccagaagggctgcaaccaagaaacaagagacgataacaaagatcagagacgcccaagttgctcgtttgtacacatatacaggaggatggaagggatcagatgacaacgggtgaatcgaaaggcttaaattggaaagataaagaacctacacaagttctgttggtggagataattacgaagtcttcgggttgagttttgtactggtcagattcgtaggcgatggcaagggcgcatcctctggtgtgatacgttggaggtccagttggtgaaagaattgcgtcggcattgtggaggactggagtgaatatggagaggcgccaatatcgcttgaataagtatggattaaaaggagggctggatcatatgatgatgtagagaacacacctgcgggtgaatcacaagcaagcaaaggaatcgtaactccatcattaggttgccattgtgtttgagcctgatattgtaacgaggaaagagatggaaccccggattagagaacacaaactcaaaactgtaagcagaagggaaaagacaagaaagactgactttgttacatgcaagttccattgtgatagatcctccgacgggcaattcgataaattccccgtccgccgggggctgatccaagttaccgtggtaccaccatccttgacctttcgttcctccgaaagacagctgtgccaacggtctggtggtgcgagattaagaggcagaagacgatcagtgtctgatctcaactgtatgtatgcagtgtatatgcgagcgcgcaaaaccggggggacacagactcacgttacagggttggaagtattgatacagtagtcagatttaccattacctccgtcacagaagccgtacattgcgggatgccagaatctgtcggatgcaccatgaagtatcagtcaaccaagtcgattggtgggctaccgaatggaacgcagaacttttcaaacgacagaagacgtacgagatatgtgccgatgccataggggccaaaagcatcgaggtggcgaggactgccagccgatgcttaatgaaaaacatcgtggtggcgaatttgagattgttttgttttcacgagctagaaagcgaaagaggtgatagtagataccaggggtatgtaggtcaaggaggatcggtcgaaagaggcgtcgattaaagaacgttccacccgagaggtttataagtagttcgagaaggcagagtgggttttattaccacgtcttataacaagtctacaggaagagagatcgaaagagcgaggtggtttccagattcacagttaatttgaaccggagccggcttaaaaggaggaatgtgagtggccgaagaggaaataacaagggaagaaaagagaacaagtagacgtaaattcgtccacagggaatcaagcggaacatcccagcgaggcaaggcagatggaaagacacatatcggaaaaacatagagtgagacaatggacgatctttgttctttttgactctaagttcaagagcgaggtggagcctcggaggggaggacgaacctaagaatgccaaaaaaatcgcgcagaggaagaaagaaagagagagagaggggaaaattaaaggttcgatggaacagataatgttaaggtggcgctttgaaaaggtttcgcaagaggaacaaacgtcgacgagaccaaggtcgatgtgtgaattgtgtcgagaggagagggaggtatactggacaggacgaaggagaatgagaggagaagggtagaaagggatctgcaagacacgacgaagtgcgaggttcttaagagttcgagagtcgacgaaaaagaaacctctactcgaatcttatctgcctaggatcgccagatcgaccatgatcgcaaacggaaaatctatcttctctcattctctcgtcgaatcggactgccgtacattgggcctcggtcgttgttgacggcgttggtccagagaataaaatcaagacggcaaggagacagatgttacccgacagtgccagaatcggctacaaatgatgagtctcatccggcacgagaagagaacaaaacatgattatctaaatctgcacacgaatattctaaagaaagaatctaggacacagacagaaacatagagaacgagcgtgtgtggatgtgtatggatggatgcgccggaaggagaagaatgagaaagaacgcaaagaaggaaataatgtgggaaaacaatgtttcgaagaaaacaagaagcgcgtgttggtagatgtttcacccaacagggcaattatcttccagaccgcgtcgagttgccgctttgcgccgtcgggtgcggctcaaattatatccgcagtctgacgtttagtgttgtgatcggtaataaacaacgtcatcagacaagctgctcttgaagcttcttcgttcagtcactcgggccttcctgcacagccttgtttgtttgtccccgtttgatcgaaatgtcgtcctatttatttaccacacttttgttgatgtttcttctaatgagatttacgttcttacacacgatgtcttacatgacttactatatcttggctgccagagatacttgagaggaagcctgctactccccagctcggtcgaaccctgtagacaaatccattccccttctttccgtttgtgcgatgttcttccggcgtttggtacttcaacgactgtctcagagacacctgaaataaaggatctccagtcctggggtcacaagcttctcaaatcgttgagaaccatgatctttcttttcccgatttaaactctttctcttttcctttccttcctcttttcgttccttctcactgtttatgatctcagcccatacagatctaattcagtgtatgacgtcaagacgtctaaaaacaagccgatcaagccattcaattgttgtctttgactctctatctccctatctctgccttctttcacccgtctctctccctcctttaattactactggactgtgtaagcctgtgcgtgatccgtctggttaggtccacaagagccgcctttctcgataacgtgatctgcgatgcgttatctactaagattctgttatccgacttgatctagatgaagcaacatagagcgtttgttctttgagttataatcatcatcgggcttcgatcgaaaggacttgaaaaggaggttgaagataagactaacgcctatggcttccaatccggcacactgtttggcaacctctttcctcgaaccagtcgaaccaatcttctcgctagcattctttatctgagaagcaaccgatttgaggattgatctcgattgggcgaggatcgtcggatgtgcctatattgagtatgatgaagtcaacttcacgagcttgttctttccacgtggtcgctgataaagaatcaaatcacagccgacagactcacaacagatacgagtggttgtcgttttccgttcgaaccaagctgcgagcgtgaagctaacaaatccaaaaggacgtaaccctagtaggcccaaaccagagagagagggggaaggaaagttatcagaagagatcccagatatcgtcaacaaaggcatacagagacaaacgaaagaacagagaaaaagaagagagatgaccgacctcaagcgctaccgaacctagatgaagaatttcccaacccgtagttgccgcgatcgacgatggattcgtcagaagatcctgcaagcgggttcttctttcttcgaagaatttgatgaccttggcttcttcttcaggctttggcttacatccaacttcggaagaaaccaaagctcgggccagctcgagcaaagcttgctcgtctgccgtcagctttttcgatgaaagcaggttgtacacatctcggatgttatttatttgttcgaaggagatagatcgctcgcgatatagatagaagaaggaaaaggaatgactcaccggtccacaggtatcttcggggaacacctcactcgatgacgagccaatcgccttgcacagtacgtttcggtacacgctttgcatcgtcttcaaccattgcacctggaacggaaatggaagaaacccaagaaaatcccacggatatctcggccggttagagaaaatacccagccaaaaacgacaacaagaacttctcccgcgctcacatcaatctctggtcccgtaccagtcaacacttcaagagagcttagccctcgaggttgataacttggcatcaacccaaaatctctgttatctttgaatccgttcttgatggcagctccctcgaaagacttcatgtcttctctcatcagttcgtctgattgattgaatgaaagatgattccatcgggaggattcaagctggaggatttggtgttgaagcgaagtctgcaatgacacatggaattggacgaaatcctcgatctgccaaagccgacattattcagtaccaatatcaacatacatatcgtaagagagtatgcaagtagagcgtacctgaggataactctgccgttcaaacgcggtaatgatcgcgtccggtagctggaaaagagagtaggagactgagattagcataactgaatcccgcagaacaggtcgaagcgtatggggacagaagaactgtgcccacatcagtctctgaagcatcaaagtatcggagcacgtcttcaaacttcgaggagaagtctattccgtctgattctgtaccaaacgtcgcagctctagaaagtaacagatgagacatcgtgtcctgttgaataaatcccactttaatcgccgcgtatagagcatgtgtaaggataggcgcgcctgatgatccatcaaacatacacgaccaagtcagatacaaattcctagagaagataaggatcgcccggtggcacaacggacataccaagtagcctatagagcttgatcaatattagccggaagtaatgattcatcttgctcgccttctgagcgtgctcaaggatgactactgccttgtacagatgagatatatcacctgaaagtcgaaataacaaatgacacaacttagccatatggtcgaaactttgttatcatatgaaaaagacataaagacggacgactagtgtcccaggcgctgattagactgttcgcagcaataattgccagatcgtctactggctgaagctcggtatccactagctggtctcctgttttgcataagtcgccagatgaatgcgagaggaagtgtggatatagctggtttaatacaccttgagaagaaacggatgcaagtgaatgtagaacaactgaccaagatgaaggttttccttatagagactcatagaacgatccgccatttggatatcagtctgtacgctatcctcgtcgttcgaagaagacgaagagaggtatcggcgaattttgagggcattgatgtgtcgttgaaggtctttaacggatttctagcatcgatgtcgagaccgttccttgtcagctttccgccagcaggaacaagatatcagtagggatagagcactaaccggagggtctgtgtcttcgtccaagaaggccagaaaactgtctatagattcatgatccgtaggcagatacggcttcaaatcctcgtaacagcatgcctttccggcgaatgcttggaaatatgcccgaatcaatcttggcacatctgtccaatcacgcataagtagaatggatttgtgtttgatatatatgtctgtcgtttacgtttccctccaaacgagtctgaagtaacaagaaaggcgtaccatcatcctcttgggactttgtagtatccaatttctcatactgccaagccagttccaaacgagccagcagcggcccgcgatctatctgtccagcttcctcagctagcagcttgaatacctcgctagtctggactaataaatcaggtctcaatttatataacttgatagagagagttatcagacgcaaatatgtcaggtagttggtatctctgtgtgaggagacgacagacatatgagcatgattctatacggtatgatgaacataatgaagggcagatgacgagagatggtatgaactgactttgcatcagttccctctccaaggatgaatttctttaatctctcccactccaattcccacacttgatgagtcggctgttcatctcccaggagctctatgacctcccatctcaattcttccagttccaaatctcgattatctcccaacactttgtgaacctcttcgctctccaaataattcaacgcgtcctgtaaatacttgctcttagcaggtgttgcttctgttgaagacatttgagctagagagagtaagatgcgcgcagaaagccaaatctgagaaggcgaaggaggtgttttgatggaggttgtgaggcggtatgccaagtttagagaggcaatcgcattgtgaggaagatgtttcgggtttagtgtctaaaaagagaagcaaaggcccagagaaatcgtgtgtgagaatatatttagaaagctagtagagatgccgacaacagcaagaagatgacgacgggcacctgaagatagatacttgatgcagaccaccagatcatctttggatcatgaaacttcgaatacaacttgaaagagacctgtatgtttaaatccaaaaggaaattagatagaagaagacccaactgatcagatggtgcaccgaacttaccatctgaacgttcgcccagtctcgaattcggatatacgactcgcaggacagctgccagattgaggttgatcgacaaggaaggtatgaatcagaggatatatcttggagggatactcacagatactcaccacagcaagcccttgatcctctggacatttctcgtacgccttagctacaatctctgggaacatggtttctgaatgatacctcccccgatgaggtccaacattgaaatatcagtgtatgacggaagaaagagggctgaaacgatacgtgttgaccgacctcgtttaaagtattgcatcacaattcgcatatacttcaacgcaatctccgactcaggcaccatcttctccaaagatgagcatagcacatctgcctcagttgctcggccgagcttgatgaggaggaatgatttgagagcctgtgagaccaggatattcaagaaaccggtcggtcggaaaggtcagcaatggatggctattcagaatgaagcaataggtggacttgccaaaactgtatgataattttgtccagacttgattcgaagtagagcacgatcacaatgcctcaaaccggccgaagcattgcctgtatcgagagagtctacgaataaggaaatggaatgagagaatgacaaccaaaaatcaatatgtcggccggaccaagagcgcgtcattctaataggaccgatgaactgagcgaaccaaagatgggtctcaacagagctgtttgctgggctgcgagcgctgacatcctttagtgcagagttgtctacagaagggaaactatcaataaaaacgtgagtgatgatgatgatgatgatgacaatgagagagaagaaagaaggatgtgtagaaaatcgagaaaactcaaaaaaatacgtttctccatcttcttcggcctactccattcaacaaccgattgcaaccaacggcgaccgtgtctcccctcatctcccttctctccttgttacagttcatatatagcttccgaagatgtcacccaggatattcttattctctcgaccctggaagactcttcttgggaaacaactgcatcaaaactctatttctgcttcttgccgaacgtgctcttcaatcccttcttctttcttaccccctcgcttttctcgctcgggtgtctgtccaacccctcgaatttcctccataaaggctcttcttcctaaacggacgtatacatcctcttcatccccaccaccaccgctgaaacctcgggtgtctccaccgacaaagcgagagtcagactacacgattcatctcgttgtcctcgctgcggtccctctattttgtgcatacctcggatattggcagatccaacgactccaatggaagttggagttgattgatgagctagaagccaacttggccagaactccaatggtccttcctgatgtgcttgagtgagttctttcttcttccttttgatctttttgaaagaaaggtagaaagaaagtgttctgaaagccgctctttacacatgcatttgtggggggaaaagcatagacaccttgacgcaatataactatcggaagatcctcgtcacaggtcactacccttccatcaccgattccagctttccccgttgcgttctcatcggaccaagagtctaccagggtgataccggttatcagctcatcgtacctttcgttcgatcgtctaccgacccagaatccacctccccgcctacaccttttttgttgaatgctggttttgttcggaaggacatcgccgaacagggtcctcaggcgatcaaacttccacctcctgatgaggagattacagtggaagccatgctgaggaatgaaggacagggcaaactttggagttcgttaaagggacagaagccaacgaggttcacaccagacaacgactacagggctggactttggtactgggtggatgctgccggatttgcagattactattctcgcgaagccggacttggtcaaatcttgccagtcttggctgacgtcgtctacggcaagtcttttccctctttctccccagttgtcatcttcttctctgacaggatctctctttgattatgttttgtccactacagacggcgatgcgccaagagagatgttggttgaccaaggcgttcccaccgggcgaccggcgaggatcgaacttcgaaaccaacacgcggtctatgcgctcacttggttttccatcgccgccgtcacctcggtcctctgggtcaaagttttcaggcttggtcgaacaccgaaagcaaagatcggtcgaatgggacagtgatggatatgtggtttcatgcttgagcttggttctcactgaagaagagatacagaagcacaatttaggacgctgactaagccatcgctttgtggtcaatggtgtagcgagaaggataggatgtacagaacacaacgtcaaagctaaagacggggtattgttgaaacagtaaaatgagtggagggaatagggtatagtgagataaaagggtatatacgagccagccagttatgaactggtatggaggaaagagcagaaaaacaaaaggagggagagaagagaagcaagcaagcagacgatgaagaggacagaacctcaaagctttccagaagccaagtcgtctaaaagtgcatcgatcaagtaggtaagcgagagtctgtgggagcttcttgttgaagaaccggaagtgctccgggtggatcgtctagagagacgcatcggggccttcgcgatattggttgatttttagaaaaagtctcaattgagaaagcaagagacgagaaggtgctcacctctcgaacagatgtcgcggcttgcgacgttgatacactatgatccacttgaatacttagcctagcacctagcaccttgcccattagagcctatgagcgtaacatgagaaaacaaatagagattatcttgacactggccaaaaaagcgctcaaactatgtttatacaaattcacactcacccacatcaagcctgagccatctgccgcgagatgttctagttctgacgcgtaggtagcgagaggggttgtggaatctagatatcttgcctgacgattcgtgatttcgacttggtcatcggtacagagacagaacaaggaagagaaaaggggggggaagaactgacctgatctataaaatgacggaatttggcaggcagtccagctgactttgggacggctattggagacgcgttcggagccagcgggaaatgggtcctaaagcgtttggcttcgtcttctaaaagctgatcgaatagaggactatcagcgttaagattgattcggttcataaaatagtactccctacccatacaagctccgataaggcagaggcgacacgttcgagaacgatcggaggagccgaatcaatctcgatgggctgtgcctgaagagaagaagaggggcgggtgaggagacggataactatggattcaaaacaagtggaagccatcgagacaaaccagttggaggaaagcagagagtcttgtacgagcctctgaggcctggttgagtggattatcaaccgatgtggttagcatggggtgtagaaaggatacggatacccaggaacaggattcacaggagatttggtcagtctccgagaagacctggccgcttttgctagtggctttggggagcgaagaacagaacgaaatcacagatgagattagatagaaacaatcagcatgacattagcaggtagtcctctcctgagtatgcaagacggactgggacagacctgatctatcgagggaggactgatgttcctgggtcgtttccaactgaagaagctgtcgagtggctgagccgtctgccttttctgcttcgaccgacgttgaaggggaggaatagccagctgttttgatggcgcgttagaagaaacagacagcatgtgagtgtactaaggaggtttagggcggggagaaaggaaggaagggtaacgcggtgaagaagtcgaaggtgaatgcagaaagaagatgagatgagagaacgaacaaagtgattgacaggatcctcagcggaaggcgacaaccctaaccaaaacctaatacagccacattttcatataccttatctgatacttaactgaatcttattgctgcctactgactgtctcggctatcgtctgggcggagcatcccgaagagagtcgagcgaacgacaagaaggacgagtagatcagacgtctgacctaaatgtgagcgtgcgacgagtaggtatatcagtagtagcagtagtgatattagtagtagtgacatcagtggtagtaggatgaaaacagtgggcagatgatgtagcaatgtatgtatgagcagtaagtatggtgttgagtgttgttccatctgttgttctttcaatcccctaagctggactgggggcacacgaatctgttgagggattgtttttatccattcgttcattcgttctacttagactctctagtcaatccttctcttcttttctcgcactgccattatatacccacaacaagatggatgtgttgagagatatgacaaacgcacgaactaaagagaatcgaaggcaaaaggcaagaagacggaagaagagatgaagcgacatgcttaaatccagtttgtttgcaaggatgacgccgttgtcccggggtttttgcttttttgctttttttctctctcattctccagacgtcttccttcgtctctcgctctatttttgatcatcttgagtgttgtccttgtctctcaccctgctcaacgtatggtgaacccgttggtccgaactgtctgtgttatcaattctcttcttgtgtggtacccaccgtccatcgtccggtcgtttcgcttctcgttcctttgccccgccggctcccatcgtatcaacatctggactaaacccgaacaacaacgtgttctttgtttttttgtcttccgtctttttttcccctcgtgttcttccttttagtgaaatctcgttgattctgccctcctttccaatcttcatctcttcgccatcttcctcctgccattcgggtctccttcctctttccaccttgcccagtctctctccctttctatcttcctcttcgtaaaagatgagcgaccctcggtcggcgtttccgcatttgtttcctcaacaaagaccacctgtagaactctcacaacatcctgatcacagaacacacgaatcctcctcctcttcttccgccatgtcgtccactccttcgacatcctcagtctcgtctgaacacaaacccgatagctcaagttcgcaccattcctattctcaatcccaatcccaatcccatccatccagtcctccctcgagtcacccgccggatctacctctctcgccgacccaaccacggacgtcacctccttctaaagcagcggaattagcccgattcgaagtcctcgaaactttaggtaagattccaaccaaatctctcttgcttgttcttctttcctctctcctcttcttatcggcttctagctcgataacgattccttgtaccattttgacggcatctcctatcttaaggcaccggtacctttggccgagtcctccttgttcgtgtccgatcgccatcgaccccgatagatacccctcatccgatataccagaagcaggttgaacagaaacagcaacagcaccagcaccagcaccatcagtctggtgtaatgctcgctccaacatctaccggactgaccgcccaaaaaggaaagtccctgccgccccaatcgatgccccattttgcactcaaggtccttgcaaagacagaggttgtcagactccgtcaggtcgaacacattaacaatgaaagattcatcctaagcaaggtcaagcatccgttcattgtcgaattgtatgtacattactgtttctcttgtcttctcccctcattctcagttctatctctccatgcaagcctctgatcgcccttgtcgcgtctttatgtatcgttctcccagatatcaaacgtaccaagatccgatcaacgtgtacatgttgctttcctacgtgccgggcggggagctcttctctcacctgcgtcgggcaggtagattcactccggacgtcactcgattctatctctcatccatcattcttgccatcgcttgtcagtggtgtccttctctcacctctctaccgagcttcatatcaaatgtacacttatctctccaattttttttggcttgagggcgcgcagatctgcattcgcaggacatcatctatcgagacttgaaaccagagaacctgctcctagatcgggatggctatcttcggtaggtcgtcataccatccgacacgggaaacccataatcaggaaccatccatactgatccttaaagccattacattacgacatatagaatagcagatttcggatttgccaaggaggttaacgaccgaacattcacactatgtggaactcccgaagtacgtctcgtctcagaagttcttgtctcggatcaacgcgtgtccttgaacagatcgcatacgtatctcaaaagtctatgttgtgttgaccaaccgttcttccgtatgcaacgtatatttgtagtacctcgcaccggaaattgttctctcgaaaggtcacggaaaagcggtcgattggtgggcgatgggaatcttgtgtttcgagatgttggctggctatcctgtttgtttcttctctttcctcctgtctgtgtaagaatctgaattgaatcaagtgctagactatgctttctgacactgaaaaaaaaacactttgctcccaattcattgcgtctcgaaatttccttctccactcttttatccgtgatctttagccattttttgatgataacccaatgggtatttatgaaaagatcctcgcagccaaagtcgcgttcccctcggtgattgacccatacgctaaagatctcattcgaaggcttctcactgttgatagatccaaacgacttggtaatctccgtgggggcgctatggacgtcatgatgcacccttggttctctggtgtcgattggggaagcttggaaaggaagcagatcagggcaccgatcattccaccggtgatgagcatgggtcggtcccttccttctctgttctatcattccatgcatctatcttgggagatactttgtcgatcaccaacagcagacatccacttgagctatatcttctgactttgaactatatttcttacttgtcgttataggtgatacacaaaacttccaaaaatatcctgtacctagagcggacgcgctccctgggttgttcccagattatcaaccatcgactacattggattcgttcagccatttattcgaggtcagctttccctccctctctctcttgtaccttgttcttcgttacaatcaattctgtatactgatagacgattgactctccttcctctctcgtttgctacggtgtcacagggtttttgattgattcttcagctttcttatcaaatgattctatatctccctttcatcctcattacttctcatctagccttgtccttaatattcagtcctctcccagtgtttggaggttggatctttcgttttgcatctttttctttatcattttgaattcataccttttggatctcttgggtcatcgtttctctcttcccgtgcttttatctcctccgtttcactcttaatcacaatttctttcctcctgccttttcacaaattttctacttccccaatgatgtagtgcccttctcctcttcctacgtcttatagctctttcacctgccgtgttttcttggtcgttctggaagataagaaagaaaaaagaaaagaaaaaaagaaaaagaaaaaactaaaacagacccaaaagaaaacaacgagagtcggaaagtttgacgttataggttgatataccatgaatcgagcgagacgtcgtgataggaaaagtcactaacccaaggttttcctccctaatattctgctctctttcgtgtctgtcgtaaagttctatgatttccatcgaaaaaatcatcaatcaactcaactcaaccaacgatcatccatctttccttatcctcttctatttacatttatctattcgctttgacccaatcagctttacaatctcaagtactttttatacaccctgttctccgtttcctccgaataggggtaccccaattcttccaagaacgtatcgaacgcttggtgatcgtgcgcaggcacctgaattccgatcaggactttaccgagatctgtgtaagacgcaatatcgattgaagccgaaagaaggtgagtgatgatgacaggttggatcggatgcgcttgagatataacctcgagggagaaaagaagacaaggaagaagacacgaaccggcgccgtggtttcggtagtggaacatcgagatgttccacggtttgtcggtttttgcgtcatgcatgttatgcaaaaatttgtgtaacgcattcggtcgctccggaaactctgatcatccataaccccaaaccgagagaacaatcgcataagtcagaatgctatgtctttcctccttcctctttcgcctctcaggtcactccaagaggaagaaaaaggaaaggagaggatgatcgagggacgaaccgaatcggaatactcgctcgttagcggcctcaactttaccaccgatgaggaatcgagcatgatctttgctcagctcgtcgttactcagatcccaagcatccatgtttccagccttgagatctttcacgatggtctctaccgcttgttttcgctcttccggagttgggccggtagtcgattttgaggagagtaagaaggaagtgaagatagaggcccttgcttcggacgtcgcctcggacgaaagacgataggaaaattcggtgacagctctaggatggatgacagaatagaacttgaggaagctgtacggattcagatcgaagggaagtaaaatgaatagtcagatatggaaataccatgaaaccaggaagtagtcaagacgataaggatgacgacagcaacgaaccttccaggtgtctcggggatagtaacactcatgagaacttctcttctctctcccaagtcagcccgctcagacacaaacctcaatcgaccaaagttgacattcgcgccagacaccacggctacaaagcgtttgccagctccttggagcttgtttttgacgatgtatgacttcagaccagccaagccgagagcaccagaaggctctggtaccgcccgggtctctatgaatagtatggacgaacatatggagttttcgataagcattgttcttcggccacacacacatgaaagaaagactaaaaagcaaaaccagaacataccttcaaagatatccttcatagccgcacagatctcgtcattatcacaaagctcgacagagtccaaaaggttcttgcagatcctgaaaggctcttcaccgacgattttgacagccgttccatcgctgaacggtccgacctcgtccaacatgactctctcacccttacccaagcttttcgacatggcgtctccatcgtatgtctcgacaccatggatcttgagactgggaggggcaacctgcttgatatacgagcatagcccactggcgagcccacctccaccgatactagcaaagataccatcgagcaggtccggctcggggacctgtctgaggatctccataccgatagttccctgaccagcaatgatgagcgggtcatcataaggtgggacatagatgagtgaatattgtttagtcaaccgggcacactccgccttcgcctgatcgaaatcgtctccatggaggacaaccttagcgcctagtcgctcaacgtttcgccatttgatagtcggcgttgccacgggcatcacaatagtacacgggattccaagcttgtaaccggcaagagccactccctgagcgtgattgcctgttcgtgtgagaggacaccggtgcacaaagaaggaggacattaagaggggatacatacatatcaatcactttagtcagttaagcgctttccgaggataatagtacctgacgaaggaggtcagtaaacttgcctgcactgcatgtaacaactcctttccaacgctcttcttttccgagggagcacatgaagttataggctcctctaagcttgaaactgaagacttcctgcatatcctcccgcttgagccatatctcgtttccgagcttggccgacaagttaactgcctttgtcaacggagtctccttcatgttgagcggtggagagtacgtccgggagagcaagatgagtttcaagtagtcgggcgttccatcaggaagaatatggtgaggagacaacctgctgtagaggtgggtaggaagttggttttgggtcgaggcatgatctccgttgagtttggtgccttcgaggttggcatctgacggcccgttgggcggtgccagatgtggaacgttacgaggtggcatcctttgtagttagttgatgagtataaatgacaagagacctagcagaattaccaagagatcaaggttggagaagaaagcaggatatgtttagaagaaatgaaaagggaagggaaagacgaaacggaaaaaagggaatatcgttgactcgatcggatgttcgggcgaaaaccaattgatgacgatacagatcatctcgcgcctactagcttcttctcattcttctttcctttcgtgtgacaaaagctttcgagtgtacttcttgttgctctaaatgaacttccatattcttcattgcttcttccgaatacagtgatatgtccattctatgatgtcgattgtatctgctgctttttcttagcttctgccacccaggctttctcctcctccccctttactaaaaccacaaaactcaataatccatccttcagaaccacaccgtcctgccctttaccttcctgaccgcgagcagcttcgaatacgcttctaagtgccatctttctgggaatcttgagcagtcggccatacgcggtctcacaataaaccaccacgttcgacggtcggtaggctcttgcagtatcccaagggggaggcgtagcaaagatggcgtccaaatgatcggcgaacgcagtgttttcttcgaacaaagagatcagatcggactggccatgggaaggatagaggaggaacaccggaaagatcaacggagcttctggtgaaggagcaatccatggtgaaggcggttgatagctatagttgtatgaacaagtagatacgtatatgagattatgtacatagaaaagagaaagtaggctcattagtacacactcacagaggtatgctcgacatcgagtcttctggcacacactcttcgtcaaagtgaggcgggtaggggttatctggcggagaagaagtcttctgaacatgaattcctcgaacctatgagtgggtccggaagataagtatccacatgtctgaccaaaagagaaagagagaaagaggagaagagaagaagacaaactcactccaaatgccaagttgagcgcaagggctccctccttttcccttctggctcgttctgtgctctcaacgtgctttctgtctgctttctcctgtctttctctcacagtcgcgagtagagtctggacaggcttgttcccggccccaccgggaatggcgagtgcgcgctcacagcagtcgatcgcctcgacgtgttgttctaatgcgagaagcgcaagcgaagatcggtagagcgctttcacggatctggggttgagctcgagagcggctgagcagtcgtggagaaccttccggttattttcttggtggtgattggtaagaaaggcaaagaaaaaaagaggaaatgaatgtatcagtaaagaaagcggcgagaaaacaaaagaacatacagggcgatacttactaagtgctaagttacaagccgctcggttgacatagagaacttcgaacagagccttgtcgtccggcttaacgtcgataccttgggtatagaatccaattgcctctcgatactgcttgaccgagaaacagtcgtttccgtgctccttgaaattgagagcgatctctttgagatgagaagatggtcgaaaggacatcagcttgattcaatgaatgtgtctctgactaataaaattgtatatatgaagacaatagatacacaagaaagcttaccgtccggggtaccgtcgtaggctagactttgaagggcggcgacggcgtcgttctcctctccctcaggaagagactgcatgaagagcggagagctcgcaaagagatcatctatattcttggatgatcctacggagggtcctgctggagcttcgatgatgacggccatgatatgagaggttctggtcgacgaacgaggcagaggattttggtcgagatagtcgtgagggaagaggaaaagacgctaggtttggctgatgacggatgtaaccaagagtggaggtgcacgtgtaggtgttatcatgtaacatatctgtaacggcccacctcataagccacctggtactacatcagacgctgacacacgagactatcgatggcgatgatggtggcaatggcggtagcgatgacaatgttaatggtgacggtgacaacgatgatgacaatatcgatactggtgacagtacgactctacgatggtgttggtgatgaggcgcatacagcacagcataccacatatcatggcaaacgtcgtgtcataaaccgatacaccacactgcgtccaagtaagagtgatgcgagagagacagaatcatgaagaaacaaggcggatgaacagtgtgtgaggcaggaaatctacgttccagatgagcgaccgtacgctaccttcataaagacttgggtcgcctttagggcatctcgaacactacaaagaagcactacagaccagactaggacactagccggtgaagactacagaaagatgaataacctgagggccccgcggcgtcttttgttttggtcatcttctctcacttggacccgccctcaaagtctgtttcccctaacgttctcccttccttctttctaattccctttccatcctcctttttcgtgtctctttcttcttagttccttgttgagatacttccgaaatgtctagagacagacttgctggcctcagagtgcgtttaatcttctttctcaagaacttctcttcccctgttttccctcaaagaatctcgaatggggtaattctgggccaagggcaagaggcgatgcaacagtggcttttcaagctcttccaaacctgattaggaactaatcatttccgtctaaattcctcttctctgtcgttttcaactctcgttctggatgtttcttttttgtttgactggaacgacccacagaacgctcctcagcaggagacgtacaaccctataccctcgcctccccaaacgtcggtcatttcttcttcctaaaagcgacgcgttttgcgaagaaggaaaagacaagagcacgctgaatagacatcttctgttttcttatttttttcccatgaattttcaaattcaaacaaaacaaaagccaatatggatataatggccagcagcaccaagcctacgcgccaacaaatgcgtacgagatgaacaacgttcagcagccgcccgccgatttctggcaggaggtacagttctttttccgagtcaaattctggagtctgtctgacctaggcttgcagaaacgtcttctcacttgatcttttcgtcttttatagattggccagattcgaacttcactctctcagctccagacgtcgattggtcagataaagtcgctccatgcgatctcgttaaactcgacgactggcccaccaccggagctgtcgtcccaggtagaagagacgagagagctcgcgcagagcgtcaagatgatgattaagagcgcgaacgccaatacccagggtgatcgaggaaagaaggcacaggtgaaaggagtcaaagagcaatttcttggattgctccaagagtaccagtcggtcgagaggatgcaccgaagcaaggttaagcagagagcggaaagacagttcaaaatcggttcgtttctttcccttgtctgtctgcttgttggcattcatttcttcacgcgaaggagaagaagctgagttacccctgggtttcgtgctcgttcaattgccttctccttcacctctcttcatcccttcttgcagtcaagcccgatgctacgcctcaggagatggaagccgtgttggaaagcgacaatccccagatcttccagcaagcggtaagcatggctctgatcggttagagtgtctcttagggtggagtaggtcgactgatcgaatacgtcttgttctggctttctatcctatttttggtctgtagctcttgtcgtcaaaccggtatggtcaggctagctctgcatacaaggaagttcagcagcgacatgaagacattcaacgtatcgagcgaacgcttactgagctcgcccagttgttcaatgatgtaagttttccgattttctttttatttcatccttccgttccttttttccttgcttctctgacgagtattctgtttctaaccgactgaaatgtccttctaacctgtagatggccatgctgattgagcagcaggatgagacaatcaacgtggtcgagcaacaggctacccaggtcaatcaggacatggagactgggtaagtttaatttgggaaggcgaagaacagccagtgtcaggaaatcccatgtttgaacctactgacaagtgaggtttatctcttctttcgcgtgtcttacgaattgaattcaatagtaacgagcagctcgacaaggggattgtcagtgcccgaaaagcgttcgtcctgttccttgtgggtgtaggcaagtgaagaataatcggccagaggcttacgaagctgttgctctacatttacgtttcctttttacacagccgaagaaagcgttggatttgcttctggctcatcatcgtcattttgatcatcatagccgctatcgtcgctgctgtggttgttacccaggtaggtccaagctgaaagacgatttgtgacatccctgtggacgtttctaacatatgtacctctggctcctcttctttgatcaatctgcttttgagcgaaacaaatagacatgattgtcttccagagactttctcttctagtctggtttctttcttctctctattttttctctatgcgtccgacttcgacaagctttgggtgaaaccccaattgttattattcatccgacacacatccgtgggctttgcagtccttttcttgcacgctttatacaactctttcttttcctttctctttcctctttcctcctcattacccaacggactacacatacgagatatccatccgaggagaaaagccccatcgaaaccctccatcgtcttaccaccttacgatcgttattttcttccctactttcctgtttgcctatcaatctttctcttgtttgggtatcgagtgatccttgggatttatacctgcttatcagaagatgtttatctcttgcatatgtgattacaaaaaaaaaggagaaaaaaggaagaagatcgatcgtgagaatgacgagacaggaaatagtacaaagagctccttgatgatgaaccgatggcgttctcggccgaccgttttcttcctttttttgtcctttgggtggcgaaacaaggaaaaaattaaagaaaaaactctctctgctcccgatgactgccgatgggccagggcggccaacaggagatctgactgcgcgttccaagaagaaaaattgacgcacattcggaaaaggtgcctgctgtgaatttccgccctttttttctttttttttctgttcgctctatctgtttccactcagcctttttcttgcttttttcttttctcttctctcttattaaccatgttcactcgttctcttcttcgatcaaccaccacctctacaaagtctatcccgttcgcttcttcatccaggttgcttaacaactcgctcagaacaatgtcctacaagatcgccactcctactgatttcgtcagtttcctttctttcatctcttctttatgacggaagagggaaaaaaagtaaatgctgatgtttgtcgattcaactgactcacttactttacaattttctctcctttttctcctcccacttgtatgtatgcacgcatggaaaacagaacgcttgcctctacggtcctctctccgagcaggatcctgagatcgccgatcttattgagaaggagacctggcgacagttctctggtctcgagctcatcgcttccgaggtttgtttcgtcctgctttagatctcctttccttcgtttgtttctcttttccttgccttattccttggctgatgaatgtattattatgtttctttttaaaattctcacagaacttgacctccggtgccgtcatggaggctaacggatccatcctcaccaacaagtactctgagggtctccccggagcccgatactacggaggaaacgagcacatcgatgttctcgaggagctctgccgacagcgagccctcaaggctttcgatcttgatcccaaaatttggggcgtcaatgtccagccctactctggttctgtcagtagcttgttctttaatatatgcttgtggagattgagttggtaggttcaattgactgacttgcatcgttccattttttgggcctttttcaccttttatcaagaccgccaagtgagctgctttcataccttaaattctttgtacccttatgtctgaatttcgaggttgacaccgcgtaacgatttctcttcgccagcttcgccgccttcactgcgctccttaaccctcaggaccgacttatgggtctcggtctccctgatggaggccaccttacccacggttactatgttagtcgaccctccttcactcggtctagtctcttcagatcctgtctttacttttaattctcttccttcctcaacagaccgccaaaaagaagatgactgcgtcctcgatctacttccagtcacttccttaccaggtcaagcacgagtctggtctgatcgacatggagtctcttgctacaaatgccaacttgtttaagcccagacttctcgtctgtggtgcctcggcttacccccgagactgggactacaagagcctccgagcgatcgctgacaagcagggagcttatttgctcagcgatatggcccacatctccggtcttgttgctggtaaggcccagagctcgccgttcgagtactgtgatgtcgtgaccaccaccacccacaagactctccgaggtccccgagctggtctcatcttcttccgaaaggacaaggaggccgacctcgaagcccgaatcaatgctgccgtgttccctgcttgccagggaggccctcacaacaacaccattgccggtattgccgttgccctcaagcaggccgcctcaccagagttcaaggcctacgccgctcaggtcgtcgccaacgcccgagctctcgccgccgcccttcttgctaagggtcctaactacaagctgtcagtctttatttcctgtttatcttttctttgccatttctcttgttgaccaggtaatttgtgttctgcagccagaccgagggtaccgataaccacttggtcctccttgacttgaggccagccggattgaccggttccaaggttgagaagatctgtgatctcgcccagatcactatcaacaagaacgctgttgccggtgatacctcggcccaggtgcccggtggtgttcgaatcggaacttccgccttgacctccaggtcgatggttgagaaggatatggagattgttgccggattcctccaccgagctatggacattgctcttgccctccaaaaggaggctggttccaagctcctcaaggatttcgtcgccaaggccaccactggtgacggtgagggtcgaaaggccatcgagcagctccgaaaggaggttattgagttctccactcagtggcctttgcccggtgtcgatgcttccaccatcaagcgattcgatcactaaatttgaggttctcttcatcgcgctttttgcatcttttctctatcatcattttttcccattcattcatccgctggcgcacgccacttttgtttcaacaccctgttcatgatcttttaggagagatcagtagaatccagtctcatctcttacacaaaagatgaaatctctcaatctctccttcatcaggaggattggtttctgttttctccctcttctccctcttgtcttttaaaatcacccagtgggctatatttatgtgtgtaaaaagtgaattcggagttcttgtttcaaggtttgcctaacaaacaccgcaagattaacagagagaagaaaataacagaaagaaaagaagagaaaagaaaagagaaagcagaaaaatatccacactaatagagtccgaactggcttggccgaacgagtcatcggcattttcttacataagccggttcgaacattttatttgactcggctgatcttagattacaaaacgaccattttttttctcctttcccttctcttctcaaaaaaaaatatccttctttgcttctcttttccattcaatatcaatcagcccttcctttctttcgctcctttttcattaccttacatacatacttacatttcatccctcatcatgtgccccggagagaaccaagagcctaaggtggtttccaaggaggacatggtcggaatcgacctatccagcaccgttcacaccaacgatgccgtttctgatgtcaaggctgctcccgcggtcaatggtgtcaagaaggatgccacccacgctgtgagtttgtcctcttcttttcttttcattgtatatagttttcctcttctttctctttctcggtctggaataccggttgtgcttgcgtgcagcagaggaggaggatctgggtcgcctgccagttcctttctttgttgagtcaagcaattattggggctttgtttttgatggcttaccgttgatagagatagagatatatcttatataacgaaaactcctcttttactaatcgtcatgcctttttcatactacaaacgtattagggatccgtcaccaccaccactccttacggtccccaccctgccgacttcctcagcaacgtccgaagtacgtcaacctgcaaagtactccaccccgtttcgatctatctttattgacgatcgtttcgttctcctccgttacagacttcaagatcatcgagtccaccctccgaggttcgtttgcacacttatagagaaaagcgaactagttttcttgtccatccgacttttggtccgggcgtcatcgtcatcaattgtcctgattcgctcatctcgttttgggcattttctttttctttgcgtcgcctcttgattattgcagagggagagcaatttgccaacggttagtgtcatcctgccgagttgatgtgtccatgacttgcaactcgctgatagccatggtttacttcttccttttctttaactccagccttcttcaacttggagactaagatgaagattgcccgagctcttggcacgttccactgctccaacattctcataacctaatgcacatccgagatgctcatgacaagtcttgcttattattcatttcaaatgattttcttccttctaatcagatgatttcggagttgagtatattgaacttacttcgccggctgcttctcccgagtcaagagccgattgcgaggccatctgcaagatgggtctcaagcgatctaagtgagttggcgtttttttcttctccaactagatggaagggaagagttttttgactcattcctattcctttcgctctttcttctcaggattctgactcacatccgatgccacatggacgacgcccggattgccgtcgagaccggtgcgtgtcttctccaccttttttttctctcttggcgttcacgatttcatacgcgggccggcccttttcttctttcaactgactcgctcttaattatacaggtgtcgacggtgtcgatgtcgttattggaacttcgtcattcctccgagagttctctcacggaaaggatatggcttacatcgagaagaccgctctcgagggttcgttggttcctactcgttgcggacctttcctatccgaactcgaacactcatctttctttttctgttcgaacgtgtcttggtctcttttttatctttatttttaccttttcagttatcaacttcgtcaagtccaagggtatcgaagtccgattctcttccgaggattctttccgatccgacctggttgaccttctccacttgtaccgagctgttgacaagattggagtcaacagagttggtgtggccgataccgtcggatgcgccaacccccgacaagtgtacgagcttgtccgaactttgagaggtgtcgtcagctgtgatattgagacccatttccacaatgatactggatgtggtaagtcagcccgaggaaaaactttgtggaatctgtgaagtcggtgttgatgccctgttctctgttttgtacaacatcagccattgccaacgcttacaccgccttggaggctggagctactcacattgatacctctgtggtgagtctacagtttattttttcttttcatatgaacatcaaaaactcgtctcttgttcatagttaaccctcttcaatgatcctttctttgtctcgtcttttcatgtgtgtattgatctagcttggtattggagagcgaaacggtattacccctctcggaggacttgtcgcccgaatgtacaccgctgatccagagggtgtcaaggccaagtacaacttgagcatgcttcgagaaatcgagaacttggtggccgagaacgtcgagatccaggttccgtttaacaactacgtcaccggttggtgcgcgtttactcacaaggcaggtattcatgccaaggcgatcctaaacaacccgtcgacgtacgaaatcttgaacccggccgatttcggaatgacccgttacgtgtcgatcggtcatcgattgaccggatggaacgctgtcaagtctcgagtcgagcagctcaagcttgagatgaccgacgatcaggtcaaggacgccaccaacaagatcaaggagttggccgatgtcaagacacagaccatggaggatgttgacgtgatcctcagagtgtaccaccgagccgctcaggccggtgtgctcggtttgggggaaagcgtcaagctcgatcagctcttggaggcacaccgagaaggaaacaacggtatcgacgccatcgctgacgtccctgccaccaagcgtcaacgaaccgaggcctaagccgaataaagtctatttctctctctccctcgctctcgtgacgtccgtagcttctctattactgtcttttcccgctctccaccctaaaaaaagatgagcgctatgccaggaggtacgccgttgatgaatccacaggccgtcgacgtcgtcgttcccttgtcatatccttgtctgtttaaatgttgtgtatcatatgaagtctaacagctctcaaattccttaaaatcaaaatgtctgctgtcaatcggaatttaccagactaagtaagatgaacttgaaaaaacacgtcaatcagacttaagaaaagctatgaatgcaagcgtgaacatagaatataggattgtgctcagcgtgctcaagctctcagaagggaacagggcataacttgttgtgtaagggtagcaaagaaggactgtaggcgaaagttagaaacagatgaggctccatatctgaagagaaaaagggaagactttcagcagacaaaacaaacgatacatgccatttctttacctctatccccgccaacttcgagaaaaactaagggcagaaccaaggagaagaataagaaagcagaagagggaagtaaaagaaagtacgagaagaaacatctgatgtatagcaaggcgacagaatataaatataatgattacacagcttccttgtatcttcggtctggtcatcgtttgagcgcgacctgagctacgacacaggggcagccgagcgaggatgcagtagaagaagaagaaggagaagaagaaggagaagcatatgatgagtggatagcgagattagctttgttcaactacgaaggaatgttggtgcatattctagacagacagcgcgcagacaagagagaaatagcacagaaggaagggaagaagggagtttttcactgtcgagatacacgaatatgttaccggaaaccctaatccagactgaaccaacctgggtcagatcacgacataaataaaatcacaggcttaacatcctataacgagaagcggcgcaagagcgcttctttcatgctgtttggagctctatagtcaacaactacgacacatgttaagtcatggtggaagggagagccgactcatatgaagacaacaatgaggtgatgtgcgagtacaaagaacggtatggggtggtaatgagacgatctacttagatgagcttatacggttggctcgtttgagagagaacggatcactcagatacctgacccaaccaaaataaacatcaacgcaaggcgctagtacaatgaatcgggggaaccagaaaagaaaagcataaaagagagctagaaagtgttcatacgaaatgaagtccgagataatcctatacacgtgactcacacaaagctacacaacacggactacgtatcaaatattaggattcagagttgagatggtatcaggaagattgcagtgggagtaaacaagtatggacggtagctaggcaaaagagaaatgcagactcttgacggatagttgatggatgaggagacgaggcagagaatcacttgcgattcagtgataagattgatattgcacaaggtacaaggataacagggattgataaaggttcagggttaggagactaagctacgggtggcaatggaaggtcttcttgtaaatggtcctcagaatccaacaatactgtatgaaagaacacatcgtagaatgtgttagaagcacctacatcggaagaccgtatactcacaaagcaaagccttggaggagcgggaggagttgaagcgtcgtaaggacgaagatgttgagaatacttgaatatggtgcatcggtttctgcttgtcagctatgtacctcagccttagctagcgcactctgccagctgccatacttcttttcttctccttctttctttttctttttctttttctccttcctcagcatttaccagaaatgtttctgtgccgctgagtttggaaccatttcttattctattctacagcaatacgaaaccgtatctgccagcagatcaagagcctgacttactctactgctacagatatgtctttcgatgttaagccagccgagcccactgatgcagagccgtcgagtgtgccgctgtacaccaagctgtccgagtcgtcattcgtgtcatgatctgacccggtttgatccgcgcagggtgaccttgcgcaatgtagaccgattcttgcaacagtatcttggtactgcttaactcgctcttggttatatcttgactcttccttggtatctcttcgctcttgcttgtgtttccttgtgtttgcttgtgtttccttggcttgatatctcgaatgacatatataccatgtagtcgttagctatctccccttttctcccccaagcttggaacctcgttaaatcctcatagttcccttcaataacctcttcatatccctctgcaatattgcatgatctcttccctcttgagagctcaagcgcactgagtaccgtccccactcagcctccttgcctgcgctcataacagttcgccaacttcgagaaccttctgtaacgagattcgcggtttgttctgcaagatagaacaaatatgttctaactcagcacacaaacagtcttttgtgaatactgaggaagggaaaaagagaaagaaaaagaaaaagaaaagaaaagaaacgaaagtatcgagcgcacatatatgtgagagaacacaatgtgcttggatgagaagatagataagaagaaagaggctaaaaagacagcaagagaaacagccacgatggaacaagatatctgccaagatggcgatcgagacatcatcagtcgaagatgaaacagaaggattgtaagaaataaatccgacatactgaattcgaacgaatcactccaacactttccaccctccgaaccatcctgccaacgactacggtgtctgggagagccgactccggttcgctcttcgagacatgaagct

SEQ ID NO: 2707 - DNA, 638 bp, Xanthophyllomyces dendrorhous
cttggaccctatagagattggttatactcatgaccttcgtgcacagctggatcagtttgtggacattgtgaatgacatcagacatctcagaatcagatgcggatgcgaatgcgaacgcacatgcaaatacaaatgtgaatgcaacacgagtgaccagtcgtggagctttactcttcttcgggcccttcccagatctgcagaaggcaaacagctcagaagaagcatcatcgcaaacgcaccgaaagacacatagggcaaagcgatagcaatgacactcgagtacgtcgtcggcttcattctccaggacgctcggtcaaacgcagctgccatcaacaagacacatcggatcgatctgacagacgaacacaaagcactagcaacgactggctcgatcagcacgatctgtttctcatgccagcaacctggccacctcgcgatcaactgcccgagtatgtcgaaaaggaacggccgagcgagcggaagaaggtactgcgagtaccataggtcgatcactcataacaccgcggactgcaactccaaacgtcatcacaacaatcacaacaaccacagtcatcacagcaaccatccccattcagatcggcagcagatcaacgccatcacccgagagatcgtcaagc

SEQ ID NO: 2708 - DNA, 1446 bp, Xanthophyllomyces dendrorhous
  misc_feature (1105)..(1114): n is a, c, g, or t
  misc_feature (1181)..(1190): n is a, c, g, or t
cacccgagagatcgtcaagccaacggcgcttgatcggatactctctgtgatgtctgtttcttctgcgcgcgctgtccaatcgaagcgatctgacgccggccctacttttctgctagactcgggatgtacgcagacctgtgtgagcgaccggtctctcttttcttaagagtatgagttctatgaatgtagagagtagaatgaaaaccgcagtataccagaccgaatatctggagatgactgaggtggcaaaagtgagatggtaggaagaagctggctatatagtaggcatgggatcgagcgtagaacgataagccgagtaggagcgaagaaagccgagagcgcagaatcatgtggaaatgatacaggatgtagagcatggtcattgtacacatgatggcacagcgatggctgcgcatcggtccggattgccggagatattcatgcaagaaggtggaagacactatccggagaacggcgaagaacggaagggcgggatgctgcgcattaggtaaggttttatgcacaggttcgtgatcgggaagaaaatacatggtctaggtcgggtcacgtgatagacttatgcaagtgggatgagtaagctgctggtcgccttacaaaagcgtaaccacggttacggtgtaattttaacatcttttccacatacgactcatacgacgagacgatttatgtagccaacggccagccgatgaaagtcgtcggtcgaggccagatcagcttgctcagcaagccagcgacaggtgacgaacagtgcggactcacactgaccgatgtgttccatgtgccggggatgtcgtccgacatacttgtctctctcgtctctcagccagctttgccggatcaaaggcatcactttcagcggcgacatggatcggatcgtgttcagagacaagaacggcatctttctcaccgcttcaccacacttgcaaagcctgtggtcgctcgatgtgacggctcggccgccggcattggctgcttcggtggtgccctgcaagccggagatcgagatcgatctcgttcacagacggatgggacatctttcgagatcagctatgcatgaccttttcgcttattctcgtgtgttcannnnnnnnnnacagacggatgggacatctttcgagatcagctatgcatgaccttttcgcttattctcgtgtgttcannnnnnnnnnacatcgacagtgacatcgatagatactttgacaagagcatatgcattccctgtgttggctcacgtcagcacaagactccctttcccacgtcacagatgttgaaatatacggtataagttccttgttccttgttcctggttcacagtttcatgttaccctgtcttggcagctccacagtttcaggttcccctgtcttggcgtttctatctttagaacctgtactttagccgccatcttttacaaccgtcttccacat

SEQ ID NO: 2709 - DNA, 1171 bp, Xanthophyllomyces dendrorhous
  misc_feature (792)..(801): n is a, c, g, or t
cctcaatcgtacgcgcgttccctcctctgtccgagcttgagccacccgttcaccttccttcttgacactggctgcacacagacctgcgtcaatgaccgatcgctcttcaccacctacgagccatacaccgacgagctcttcgttgcgagtggtgcgtctctaggtgtcgttggcaaaggaacggtgaacgtggtaagtcagtctcgctcggacggtcagcaggtcgaggtatcatttagtaacgtatggcatgtccccctcttgtcatccaccattctagtctccctcggtcagatctgccagaccgatgggatcaccttcaccggcaacagagaggagatcgtgatcagtgaccagaccgggcctttctttactgcgtctgcatacagcaggaacctgtgggctcttgatgtcactgtgcgatctccgactgctgttgctcacctggtcaccagccaggtgaacaaagagattgatctgcttcatcgtcgaatgggccacctttgttgtatgtctatgtatgctcttgtcaagtcaaacccagaggtgctcaacaagtccatcacttcacaggacatcaaacgatattatgacagcgagttctgcgtgccctgtgtcacatcacgacagcaccgcatgcccttctcagcgtccagtaccgtcatcagccagcctcttcagcttgtccacaccgacatccaaggtccaatgccccatacatctcttggcggtgcccgctacatgcttaccatggtagacgagtacaccgactaccactgggcctgggcgacnnnnnnnnnnaggaacctgtgggctcttgatgtcactgtgcgatctccgactgctgttgctcacctggtcaccagccaggtgaacaaagagattgatctgcttcatcgtcgaatgggccacctttgttgtatgtctatgtatgctcttgtcaagtcaaacccagaggtgctcaacaagtccatcacttcacaggacatcaaacgatattatgacagcgagttctgcgtgccctgtgtcacatcacgacagcaccgcatgtccttctcagcgtccagtaccgtcatcagccagcctcttcagcttgtccacaccgacatccaaggtccaatgccccatacatctcttggcggtgcccgctacatgcttaccatggtagacg

SEQ ID NO: 2710 - DNA, 767 bp, Xanthophyllomyces dendrorhous
cctctctcggcatcactcagcagccgtccatccctgacactccccagcagaatggtaaggccgaacggacgaaccggacgatcgaggagaagatcaccgcccttctcatggagtacggccttcctggctcgttctgggccgaagcgttgacatatgcactctatgttctcgctcggaccgtgcgaccatcgactggcaagacccgctatgaacactggcatggccgacctgcaacatacgatcggatccatgtctttggctgcactgcttttgcacacaatccaaaacacaagaagcaccagtcaaagtcgaccccgtgctggttcatcagcccgtccgaggatagctttggcaagcaggcctaccgtctcgtccataagcggaacgtccagaaggtcatatactcccggaacgtcatcttcgcagaggactggaccatgcgaactgcacatcagtacggccagaacaactacagtcagtccaagacacttcctgctgctggtacatcacttccgctatggactccagacctaaccgatcctccttctgcgctatctcaggacatcccttccgagccactcggtcgcgtggatgatgagtctaccgaaggccactcagctgatgtgagcggcgttgacaaaagcacggctgatgaccatcagttcgtgatctctgaagacgagaccgacgacggtgaaaatgccgaggacacacatgctcttccacgcactcatctccgtccacttcttctccgacgatcatcacgg

SEQ ID NO: 2711 - DNA, 2278 bp, Xanthophyllomyces dendrorhous
cgtagatgacaagcagaaacctaagcaccatatccaagtgttttcaacaacttaatcggtctgtttttatgtcgtgtggtcgataccaaaattatagtctgttatactgtgtctcttcttctgtatctttcttgacaggacctacaaccttataactgcctacgtcgcatgcacaaaagactttacacttaccaccgatcacaagttctccattcgttatgccacttgggttctacactgactcttactatgctaatttcacaccgtaactacaagttgcacagcccaggctataatcgcacagctgttttctttccatttgtcttctagtatttattttcatgactttatcacctcccatcgcgcgacttcacacaaccttgcgctcgacattggtcgatgttcctatttgaatcaactatcagaactgatacgttcgaagatattcatttcaatcgatctcttacatctctatgagggtagacggcctcgaaaacctttctgtttcgacttgattgaatgtacagttgtgataaaagggtgtgtgttgaagctcaagctctcgaggaatgacgaaaatgccaaaattataagcatagatgcaacgatagataggacaaagacacttcgaacgtagatgacagagtccaaaattgacaggagagaagagagaaaagaggaaaagaactatggggaaagggaaagcgacgaagttcttgtatctcttggtcgctcggcatacatgcaagccagaaggagtgcaagacggaaatgatgcatacaggtgccgtaatgaatgaaggtcaaaaacaagaaacatatattgtaaaggtagtatgcagatccatgcaaaatgtgttactcgatcagatctctatcaatactcagcttattctgtctcagtcgacattttggcagacttgtttctccgttgtgatgtcttccgatgttcatttagctttccttttacttatctttatatctatcttggcacttgtcttctactttgcatactttgacaaattcatatttgtgcttaacgcggtcttttcatttcctatctctttttcatttttatttttccacagcattcataaatgttcacttataaactaagttggaagaactttgtaccgtttaacggaacggattgggaattattcaagggaatacagtgtgaaagaaatatacagaaaaaaaaaattaatggcggtagtttaggtcaaccaatacgacaaacaacaatgacgttgaggtgagaaacaagacaaacggataaaagagacaaaaaaactaacatgaccgaagaggtccacgtttcaaggaaaaacggaggagaaaagtcgcaagtacagtgagaaaggcacccacaataaaaaactatgcatattaggatgtcaactgaaataaaacaagtcaaagacgtaagaaagaagctgtacgaaatcattcagccctcctattttcaacagttggttcgaaccattttttcgtgtttctatgttcttatctttccttctccatttctttattggttacccatttgaagtatgaaattatgttgataaagtatagtcatttaagtgaagaatctctggatattctcctcatgagcatacaaacagagacttgggggttgcgaagcatctgaaaacattattcaaatgagacatacgaaaaaacgatagcaacaacatatcacttcacttgattgccaccaccatataactctccaatgtgattgcccttgacaatcactcttatcacctcttgacaacccatatctggataatgatgatattgatagtcatttcatctctttgttcagaattcaaaggtgaacgaaacagcacacaatttgagaaggaaacaaagcatgttttatgtacaatgaatacttcttgaccacgcatagcttgactgactcaatatgtcggatcttgcaagttcgaaattagttttttcagcctctgttttctacgatttgcacaatactttgaatacttcgacaatggggtatagcgactggcaattgccaaatcagcttgcaaacatgtcgatgtaaagacgcatatctcatgccttttcatttcaatttaaaacagattttcgaaatttgcctcattcaaacaatcactgaaacaatatacgtaatgtcgaaacggtcagtacacaataatttttgttctgtcaacactcttttttttaatacagaaatgctttgtcaattctctctttgtgcttttttcaataaatatatgtccaaatcattttatat

SEQ ID NO: 2712 - DNA, 1921 bp, Xanthophyllomyces dendrorhous
attttatatttttttttacaaaagtgccacactgatgaattacaatcaaaacatttacaacaaagatactatgatgaatatagaaatatcactcttcaacactgcatcgcgtaaggctatatgacaaggctttgagatgagttcatttcactgctttatcactttcaatgtccgttgatataaattttcatcaacattgatatacgtcagattgagcgtatgattttgattgcaaagttttgtttttggctacatttttacaaatcacgcctatgtttcacgaattatgcagtttggaacatagcaacatctgctgaaaattgtccatcgtaatcgtcaggttttgcttttcacgcagtcaaaacaagaattttgcaatttaagacctcatccttacaaaagattggcaactggccgtggttaaattatcaaacttggcatgtggatctatgaagcgagcggtaagatttaaacggtatacaataaaatatctgtgtcaagtttatttctgtaaaagtgagtatataacttgaatccagcatcgatacttgattgtgaaatgaagaaggggaagaggaaacaatacacattaaaacatatttgggctgtatgctcaaattgttcattatctctacttctattcatcatgcaagtcgtgatttgatctcttctttgattgttggactgaaatatatcaaaatgttcaattatcgcatcatgcgtctctcaatcacttgaaagcttttgaaatttgcaagtgaatgagcctgatacaattctcgcttggcattcgtggatgtttcaaaaatagactggacacatgtactagtcttactactttgtgttcagtgcaaatatatcctaccgcgttactcccgacatatcgaattacacttagcaagcctggtttgccgatatacgacccgctgaactatatactcagaacccagaaaaagacatagacactaattttatgtccattcaggagctctagattacccgataaggtataaaatgcacaacaatcattaggaacacaaacgaacagacgttaatataagcccaactctaaaatatatcatcaatagctggaacgaactacgttagtatattaggcgccatcaacttatggcgatattccaaatctgagtacatgcatatgctctgacctgtcactcacataagcttcagttacagaaatacatttttatgtatctcttaccagtagacgaacaatgaaaactacactttctgaagaacaatggaagctcattgatagatcatgattggcggaatgaatagtttgtgacagataaaggtcgtaagcaatcaagcagtttgctgacaaaatttacattgcacgttcccttctaatataactcaatgatggctcttagccatctacaatgtacatagcaaagcattacttagtagatgcagtacctagataagctgagctgttgcttcatggactcttgacaacgtttttcacctacacagagactctgttatgctcgtattgtagtgaccgtgacaagttgatgaggtgataccctatatacctgtgaggcatttgaccgacttgtcgcatgactgtcatctctacattctcgatgtcacattggataccaatatgctcaacagacttcatgcagatctgcgtcaacgtacatagcttgttttgcttcagatcgaggtcagtgaccatacacttcttgccgacggcccagtcgactctgttgctgttgcgacagcatcggcccatacgcatcgacgtgacagagtgttgtgcggcaatcatggctcggtggcgggtgcggtgatgtgtactgattgttgcaagcacgcccaagaaaagattctggagttgtcttcgtactgactacccatgtcgatgtttcgcatgttgggcgctggacac

SEQ ID NO: 2713 - DNA, 924 bp, Xanthophyllomyces dendrorhous
gcatgttgggcgctggacacaggaggctgatgcatctgtgacagatcgttgcaagctggtccggatgtccccttcctcctctcaatgccgtgcgcagtggagttcgctctcatcctcctacttagcagaccgcatcgtacactcgcgttcatatttctttgtctgacgttgttcacttatttcctcctggcttatgctcatcagatcgacgatgttctgcagcacaattgcacatgcacatcacgtaatggcgggtaccgagagccgtaaatggcatgtctcatgctatcgacatcaatgtcgtatgcaaaagcgtggcgactcatgcttagcgctctggtacgtgactgtgttggtccttcacaaagtagtagcatgctactcatcagggtcgtagttatgcacgctcagagcatgctcatcgcggcagattacaagctgtgccacgctgcgactggcatcaggcttgtagtcggtgagggcgtaaagctgaatgtagatatccgacgaggcttcttgcctgtgtctgtcgttcgtccccgtcgtgtgcagatttctccagctcagatcgtcagagcttgctaaaggcaagaattgcgcgtgtcgcacggcaacatgacagcgttcactgagcttcgcaagtgcattgacactgagggcacgtggtccttgtctaaacgagccttcgtgccgggcatgtacacaatggtgtttgggatcagcgttgacgcacatatcgtgagaccagcttgttgctcgaggtccttcgagtgattctcatacacgctgatggcgcaaaagccactttgcagcagctgagaaaacgtgtgacagaccatcgcactgagaccggcaagcattcacaagaatgcaaccacagccgacgcctgaacaacgcacctactggcatcccaccgtcatatt

SEQ ID NO: 2714 - DNA, 1107 bp, Xanthophyllomyces dendrorhous
catgcgcacaacggcatgcataaagcgtgtccatcaacaacagatgtggcgcgttatacctgtcggcagctacctcacggcagctacttcacggtaactacctgacgttgcttcacacttttccagtgatctctggctgtggaccagctgacgcatatgatgcacacgccgctccagctggtgtatatatcacaacgtatgatgaaggcaaagtgagcggatagtcgtgacggcggttagaacagtcgtagtcgtcgccgtcagcagcatgtctgaacatgaagaatgggtcattcaagccagttgctgatatcttgtctatcaatcacacactgaaagcctggatggctcgaaagttttcagcctttactgtacatctcgtccatcagactcgtacgtctgatggttgctgacagcagttggtactgggtcagtccatctgtttgccacaagagcgcttttttagaatcgcagctgagttatgcgatctggctgatcgtcggggtctcaattctcactgaaatagagtcagtacttgtgatgcgtgttgacttcattataagagtggctgttgtaaggataaatatgtgtacctgcagcccactaacagcatgacaatgggaacatcatggtgcacggtcggcctatcaaccaagaaagaataacatcatcgcttatgggcatcatttgtcgcgattgctgtatttttctaccgagcaagcctgtgatgtggatggtccatggctaggcttgacagacttctattcaccagcaggtagtagagcttgtatagtcatgtcggatgcataactaacatgaaacggatgaaagtgcatatacgatttttctgtcatactcgtgtggaagactaatcaatgcatcaaactatggtcagcggtgatttgtactgttcgtttggcgcccaaacatgatcatgcccggctaccgttctaatctcattcaggctcaaggcccagccagatccggtttgtgtgtctcttccgtttgtgcatcagagaaatgtatcgatctgttgggcatttgtttcttctacgaagaaagacaaattggatgtactggctcgaaagatctttcttttcattgttc

SEQ ID NO: 2715 - DNA, 481 bp, Xanthophyllomyces dendrorhous
cataggtcagcgaaagagctttggtggacttagcataggtcagtactctctgcagagctttccagtgtcttggtcctgggttggacgagaacgatgccagtctggacacggagtatgcgaggtccggcctggtgaccatggtgagccaaaggagtgagccgagaaggctgacatacggcttgtccttcatttcttcctcctcctcagcgttcttcggtgacatctcctttgagagatcgacagacaccatgccgggtgtccacacagggtatgtctccctgtcttcgaacttcttgaccatctcttcgatgtatggtagctgatcgatgctgaccgtgcgtttggttctgtccctggtgactctgagtcccaaacagaaggccatctcgcccatgtccttcatggtgaaccgggactcgagttccttctttacatttcccaacaatcggccacccttttcggcaaacaaaccgagatcatc

SEQ ID NO: 2716 - DNA, 572 bp, Xanthophyllomyces dendrorhous
gagcgcaaccgcatacatctggtgttccttcggcacggtgagtatgttccttccgtctcgtctgatggtgcatgcgccgttcccaaagtccgctctgtatccctcgtcgtccagctgggagaccgaaagcaggttgcctgcgatctcggggacatgcaggcagtccttgatgatgatcgttgcgcttgctgtcgtcagcttgacgtctccgcgtcccgtcgaccagagtgagtttccgtcgccgagcagaatctctttccgttccagtcgatatgtgtctggacaaaaccagtccttgctgctgaagatcgaccgggagcagccagaatcgatgtatgtttcgtagctttcttttgtacgatcgatgatccttgatgtcacttggaacgcactttctttctcttgctgcacataaacagaaggctcattcgatacagctacatgttcttgtgcttcttggccagggcgcccactctgagcaccgtcgttcgctcgatctctgtacgtctcgttccgccagggtccgccgttggtccttcggtttcggcagtcgatggcaaggtgtccatact

SEQ ID NO: 2717 - DNA, 8428 bp, Xanthophyllomyces dendrorhous
acaatatgcttactctatcacctgtctatagtcattcgttctgtattctctcttgacagaactcttaatccttttaaattctgctgctttccttgttcttgtccttgtcatcgttctagtgatgtcatcaatcctgtttctcagtcccaagagcctgaacttctcccctgaaacctaagagtcttgtgtggttactacctcgtaacccttccgctaccagcccagctcccgcccctaacaaggcccgccacatgagacgtaatctggatgcggtgtcgttacacctcgctgtgtaatttcaacaggcgagtacacgctgagcgaagtgccagtgtgttttgtttgagttgagacagtaccgagaaatcacaccgactgcgaaggctagatcgtacccagtgcacgtcacaatgtatgatctagccttcgcagtcggtgtgctttcttggtgccacgatcggatccgaaatgactggtataaggtgaattggcccaacatagactgttcttgacacaacgccagcatcgggatttgctgaccgtgtgctatcaacgccgatgcctttattctctctcttccttcatcttgctttctcatcctcttttgtctcccgttgtatttagtgtgtatcttcttatctctctctatccgatttatgttgctttgtctttctttgtctttctttgcgtctccttctttttccttagcttgttgtcgagaacgtgatgagagatgggatgaaggacagcagaatggcatatatacttggtagcttactagcattctttcctctgctctctcaagcttgaaacctcgtttaattctcaaagtttcctatcatcattaccatcctccttactctgtaatattgtatgatccccacctgcccaagagcctaagcgcgctgagcacactccccactcagcccccctgcctacgctcataatagaatacaaggcaaacttaaaggtataagctaaatcatctataggccacgaaacctgctgagggattgaattagttcggtgtgagaatttgcagacatgcgtgttagaataatattgctcagacatcaatcggaagattgctcttaggtgagaccaacactctgaaaacgcccgctgtaccattctattctgcacatgtcgaagcttattacaagaaatgttttctcatactcgttttagaacctctcatatagatagcggctgcgacctatagttcatattctacattgagtgcagaaggtatcatgctcaactgagttttgacatgactttcgatatggaaagggacaacgtttatacaagtaaatataaatgacaccactcgaagattgtggcaaagcagtacgcgcgactagatggtataatcaagaattcgcgaagaacagaccgaaagcatgatcaaggcctctattcattgaacagaaggaaaaagaaatgaagaagagaaagtggtcatgctgttatatacctaaggacacgccaccttgatacatccgaaccaagcaggtggcacacatgccaacaatgtaaaaggaagagaaatacataagaagaaaggaccagataatacacagagctcgatccgtcgaatcacgtcgcaaacagacctcgatgttcaagtgccattggacttgtcaatagaggatagttatcgataactatgcggataagacgattgttgctgcggtataggcgtttgagaactaaattggttgcggacaggttggttgaagacgatttgtggaggcaaaaattgcgatgagtgctggttcattagaggtcgatgatctggatgatgtgacagcactgctggcccctccgaactcgataggggattgtctaaaagaatggtcgctgaaacggagcagaatgaacatgtgagtaaacattaattatcctcagaggggtttgacatcttgaaatcagtagaatgacgatcatattcaaagaaaagtatgacctacgttggagttcaaaacttcaacagcgacgatcatatacagtgtgttgaaatttagatttattataaacattaccaatcgaatcaaaggtgcttacatcgtttgaggtgtatcgttcgcctgatttttttctccgtccatgactatgtgaaccttagactccatggtggcgctctcaacaccatatccttgaggtccaggagtagcctgactgagagaactacaccatgtacagatgaaccaaaaagaaatcagtctttgttcttttgataatttatcactgaatgtagatgaagaggacacgagtatgaacccacttgaccccgctgccatcccaaacacaacgaacatcttttccggtgatgatttgtgctaatcggcccgtttgaatatgtcgaatttcaatgtaattccaggaaaacagcaggaagtaaggagggtggaaggctacggttttaggcaaagtctcccaatcgatagttttaccacctcgggcaggttctccgtgcttttcaacatacagtccaaatgctgatcacaatgatgagttagtaaggacgacatatatctcaaactgacgaagactcttactgttatagcataagatgaattcagtctaatcataaaggggagcaaagttagttccggtctcgttctttacgaataagatcaaacatacgtctgtcgacttgaacatgcccaatgcagacgcgttttcacatctctttgacaaggcttgcattgtcgcattgtctttcactttctgcgcctgaaaaacaggaatagagcctgtctgtaagctgttcatgacaaacgatatgagtcagttggattacaagattgtcgaggttaatcaacagatggaaggaacttgcctctgcagatccataatctcgaacccttttgcacaaacaatcgcaagtttggccttcaagaaatgtataaactttgcatcggttggaataaagaaatcctgtttgcagtgttgttcgaaagatattcatctaacaagctcaagagatagatgaggtatatgagtcgactgaagcaacacgacataccttgtacacttcaaaactagtccctttattgcttccaaagaaaccgcgacggcccctaaagattaaagagttgatgagaatgatgaaaagcttaaccatgaatctctatttgagcacagctgaaagcaaatatatatgaatagtgctcacgtgtcgcctcttgcgccttttgatataggctctagcacacggaagacgctatcaagttgtttcttcttcatgtacaccaccaacgttcgtccagagagctggccaacactgaacgaaaggacatgagccgttccgcttaagcgttccggtcctctgctacttggagcgggacccgatggagagggtacgagatcttctaattgataagcaaagagagactatgaacaataacggagattagctgcttatcaaaggcaagcaagaaagaaaacacccatgcttacatggtctgcaagaacgaggaacatgccaaaacgttctagaacagctatgaccgtcacgtttttcactaagaagtgaacgtattgaagcttgattcagatcgattgagaaaagattctaaagaaagattttaaggatgtcttaccatgcagaaccttgctgaaagctgcgcatgttaagggaagttgcgaaatatcagatgttgttttcatcataagaccaaacctctgaacttacatcttagattccctctcatcccaatccaaaccccttcatcacaaccaatggcaactaattcacgcccatctcgagttcctttgacaaaaaaaagattatgacatgtctctgtgttggtgtcaatcgatgtgcagacacaaactgccaaacatacttacggaatgggactgagcagttgacttgaccagcgtaagggcttggatgtgtaggtcggcctaaggagctctgaggaggcgcacttcctgacttgaacagtgtcgagacgcaaagctcaccaagttcaaaggcctatttgaaacagtatgagggtcagcgctgggaacatacacttcaaaatgttatacaatagacattaccttatttgaatctgagacaacgtcactgagagtttttgcctcttgtagcttgtttttccattctgatcgtgattgttctgaatctgcccaaagctgatatgtcccacccatgactccacttgagcccacaacgtatgtgaaaggaaagacctgctttgactctgcttcggacgaattgataacttcagatcggtcttttccccgaccgatcaacccagttgatagagacgaagctcgagacattgcacctgaaaaatttcccagatcaagcaagctgagggggatgggctacagaaaagtttaaatgaatggagtgagcttgttcttatatatgatatatgattattcccaaaaaaaaacacttactcttttctgcagaacgtgcttctgttgtccttcatctttcttgccctcccgtactttcatgattcgggtcgttacgagatagttatctaaaagaatgatgaatacttgtaatccatcaggttgacgcagatatcccttatgaatcaattgtcgattggggtgcatcaattcgagctcagcaatcttcaagacacggaaaagagattttgaagcccgcacgacaagatgggaacgcgtcacccaaaagagcaaagcattggtcagtgcaaagacaccctctaaagaattatgagtagagactcacgacagaatcgtgaatcttagcatcactagggatagccaatgtgtcctttaattgccacatctcgatcttcaattgagcctcctcaacggctttatcaactaaagaggctgacgcttgaagctcttcgagcacttgcttgacctcatccgtcggtagaccttctttcccagtcagcttgagtatttccttcagaagaagatcgtagcgcaaaagtcgagggataggtcggttaatgaaatcgtacatgtcctttttgtaggcaagtttttgacgggtacaattctgatcatatacatttaacaagtttagaaacataatccagaacccaaggatcagaaaagcgtagcaaacatctacatgtaatttcattataaaattgacagatagcttgctaaaataactcacatcaaaaaaattggagaatgcggggttattctttctttctttgtcaatcatgtatttagcaatcggataattggccgcgtaagctctacaaagtgatatggtcgggagcagagagaagagaaaaggatcagtgaggaatcgacaaaataataataacgatacacaccgaggctactctactcacctgtaagaatcttcccactgcagcaatgaatcgtatataagatccgtcactgaaacgatttttggatgctgatctctctgcctttttttgagtcggttgagaaggtgtcggtgaatcgaaagaatatcttgatagttatggaaaacgtcgagaatgaaccggttgatacgggcggcatttattatcggagggacagcttcccgtaaaggaactatgaacaactacattttcgaaatttgaaatttggtaccttatgagaacgataatagctgaggagcattgtgatattggacgtacaggttctaaagcggttaagtctgaaacgtattgtatttcacctttgatgatctcgaatatcacgctgtgattttttggtttaaaaagacaggttctgattacctttccgtcaatacctttccaagttatcaagccatgcttactgctgccgagcctgaacttgtttaggtaaactctgcaaatcttcatctgagacgaaatcatgccactcgagatgatcatgtactcctctgccgttgcccgcctgaaatccaagaagtttcccctccattgcaaattttgaaatggccccatctgcctcagcaataaattcggcatcgaaataattggggtcggtctctttgagaatagcatcgagaagcttgtggtacctttggagttgagtcaacggccggctaaggaacttcttcaaatctcggcctcgggcctcaggcgtatgacttgcgcgctctgcaagcattcgaaactcaggaaatttttccatagtcgcatccaaacaaagctcggccgctgggaccttggatagatattcggcgtatatggggcgaaactcggccgccgcatgaaggaatacatcgccaatagtttcaatcgttggtcgctgttctcgctgacggaccgtgaagagttcaatcagtcgctcattggcgaggcgaatctccaaaagatttgaaaaaactgtctgtatgaaggattcaagaaccggttgaggatggatgatgggtgggtctgctgatcgaagaggaatgatgaataacttttaccattgcacagaatattaaatcatgtaggaggtctgtttagtcaagcgatcaagcttcgataatagtagcaatgacatactgtctcgatcgtcaacaggtcttccttgtactgttcctcctgaagaaccatagtatgaatagcttcttgtttccttatttccgattctgagagattccgaagaacaaatgggtccaccgtctcggcccatgtcctctttcgctgcctagtttctccagtcgttgacactgtgcttagattcctactaagcgagttaaactattacaacagaaacgataggaatgaacggattaagtttgtaaggcacaattcgatgcaaagaatacttgtagtcagttcgattctagatcctaatacgatcaaatgacaaagtaaagtttacctgtgttttatgaggacatgtatatgaataacaactctggtcccccggacaactcgcgctatagcacttggtcaagtacgtaaagacccctgtcggaagttctgccaccccacccgcacctatctctgactcatccatgaaagtgaatacatcgtccagagaatctgtcaaagggatatcgtcgaaatccacttcaatgatgaacagttgagatttgagagctcttgcgacctcgagagcagcgcggcgatcgttttcactttggcgaatgaaggatggcatgaacgattgtatggcagtctattgacgaagcgcaaagttcataagaataaggaaacaaacagatgaaagtcagctggcaggttacaatagagacggtttgggatatttataataacgtaccacaatatttttaccagtgaatgaattatggaatgagatgctgcctttgatatgttctcctctgacaactttatccttcaagtgaacagccacgttgctcaacaaggccacttggaagaacctcagctcgctgtcctcttctacgtctgatattccgcctcttagataaagatcaaaacctccctcatcaccaggttcgataagtgtgtccacaagctccccagattgcgtatcagtcctcaacactggtttggctctgaactttcgttctctatcgaagtcttctttgtgtcggaacgtggctctatccaacgtagcctgatgatcgcgctcctgatcctcatcagaaaacagtggtcggggatactgtccgtatcttgatggtcgcgggtttgcggagtggtacgctaaagaggggaaccttttgaaagtcgtagttgtctctttcaggatctcgtcggttatgagagaagaaccatacggctcgcgttctgagttctgatgtgacggttgattggtcgatgtgatctcaggagaaggaagagcttccggaataggcaaaaaagaccccattgaaagactcgatgtcgtccgatccagcattcgatctgttcgaaagggttgggacgagtgtacgcttacatcagtcaggggcgatagcattgacgattcacgagtgataacatgacgatgagaccctcgacgtgatattgattcagatgagctttcagacacatgcgatggcctggaaagaccactctgtccatccaaaaaaacactcgaggatcgcgacggggaagaataatcaagttgactatattcagtaaatgattgagttggctgagcactgtagtacgatgatatcgaaacatctgaggatgaaggctcgtggcccgttctgctttgacttccatcatcagagagtgcgtaatgagatatgtcagttgtgcagcttagctcacgcgaaggaggtatctctaaatctagaaataaaaaagatgtcgtacctgacactgtatcgagatgtaggagtggtttcgtacgttgctggtgggtgatatcgagaagttgagacagacgcaaagttgggcccgaggctgaccccagtattcgaaactggagtcgtgaaggaagaggaaggcacaacgaagggtgggtgatactgtggcgacgtattatgtagcaatgaattggaggctgagagtggctgaacagacgcttgagagagtggaggtggtggaggaggagg

SEQ ID NO: 2718 - DNA, 856 bp, Xanthophyllomyces dendrorhous
gtggtggtggtggtggtggagttacgacataagctggagagattgcatggctaaatgatgcgccgtctggtactccagcaaatattgcacgcttttcctcggcagctgttggagatatggttggagagcattcaaaagtagaagagccaaccacaacgtttgaaggtctttgctggaggttcggaatggccggtagtcttctccctccgcctcctgaaggctttctttcgcttttcgttgtcgacaggcttgctgaggctttctgtgagcctggatctggtaaagctctgacggcgaacgaatgaggttggccaggagcgtaagaatcagttgatggatcaagacccgatgttgtacgcatgcgttgaggcaattgagaagactgatcgtgcgacctgtatagtaactgcccagctacagggggctcggaagtagagctcggctgtctggtcagaggtatgtcggtagatgtttcgaatgcaagggacttttctatcggtctgtattgctcgatatcggggtacgcatcaaattgagcaaacgacttagatgagcattgtgcggtacgttgatctgcgtgttgatctgcgttatatcttggaacatgttgatagctatcaagagattgctgatatccaaattcggttggcggttgggttcctgacgagctttgggaatgatttgattgcctatgcagcgaggatcgttcgtgacgaggagaggtgtgatcgatagggataacactaccatctgtggcagtagtcgtagaagaactgaaactgaaattgtttgtattcggacaatagtttgagcagagcagagggagggttgaatcatctccacagttagccatgtc

SEQ ID NO: 2719 - DNA, 3525 bp, Xanthophyllomyces dendrorhous
gtcaaggcattgtctcttgatctaatcttgatatgaaaaggacgctccgatgctgcagtaacggagaaatgtagctgacttactgaggaagcgtcctgtattccactttaggtcttggtggatgagacatgttttgatcttttttttttcttttttaaggaagcctgatctaacttgaagttattgctactgtcgacgaccgcaagagtgagagtaagatatggagatgaaaaaggttatcaagagaaggacaatacagacagaatccatttacatcgcctctttgaacacagccttgaagttcacgtgtctatcattgagagatttgggctcatgctcatttctacctttctcctttctatcctacaacgaacctataatcgtcattctatcaatcttacctctgcacttgttcagcctcacttcatgttcattctatctgaagtcaaggcacgactatctctattcttgattggctgtgtaattcagcctgcgcttgatcaaactcgaactaacaccaccattgtgtctctttcttcctcctcacaggactctgtcccaatctttcctaccaactttgggctcccgacacacgaggctatcacatcgtatctcaataaaaagtatgctaataaaattcttcaacaggttggcttctgtttggctgtttgggatctggttgagtgtggcgacgggaaggtcagatggggagacggtgctgtctggtacaagggtatgttgaacttagcagctaatgggggaaggacaagacagaactgacgcgtctatttcgttcgccttctctcgttgtcattcatgccggaccatgttatggctcacgtatgtgactaatgacataatcagtcaagttcaacctcttagtcttccagccttttagcggtgaagtcttagttggcaaggttttgtcctcaacgccggaccgtataagaagtaagatccgagaactttccgtatatgcatgaggcatcaattcttctaatcaactttaggaaatacgacgagcaaaccgatacggtttgtgtactaatcctatccattctcatcgtttcccaaacagtatcgttgggatttttcgatgatatctacatccttatctcctcgttaccagccgatgaatttttcttgtgcgcatctttctcgagtctcagcccatccgttctcatcttgcactaaatccctagacacgactctcatcgatttttttgttcatgcagtgatcctgaggatccggatcagccgacaggagctcattactggcttgttccattagatgaagatgccccttcggattcagaaagaagtccgtacaattctcgaaaaatcctctcatcattcgctctccatcaagactgactatatcattcttttctgctttcatcaatggtgatgcttattcttttcaaaagcaaaactcccaatattaaacaacgatatgattcgcttccggatcactgcttccaaatttcaagaacacgaacctagaccgccgagtgagcgatccaagattgttgatggaatggccgtccctgtggacgacgacgaagacgaacaactacccagttggctattagaagtatgcttgcctcctctttctcttcttctcttgggatctctgctgccgggcatcatgttccttccgatattcgttgacagtgaaggaaaaagcgatcacagtaaactcgtaattgatcttcgttccgtgatcttttcccacaacaggcaactatagcagaacaaggactcggtgttacaggctggtggcctgcaggggacgacgaagaccaagaggaggcggacgaactggccatggatgaaagctagaatttcttatcctccgtcgaacaaatggctagatgatcatgaaaactcagatagtactttgcgatgtacacagaaactatttgaagaaaatcgatcggaatctcaagcaagaaagcgatagaagatagttgatgaacggttgtttaatataaattgtggcttggggacgggcttgtagattaaggaaatctatatattttttgagtcttgtcaatttcaggatgaacaagagtaaaggggaattaaagagaagggacgtgatggtatcgaagacagaacttcttttcagagatgatcgaacgactaacatcgaaacaggatgatgaaaatctagagaactttgtgaagtattacattaaaacccgagaaagccaaaggatgaagtgtcaagcaagaaacttcaagaaaccgatgtcaaatgaagaagacgagagcatgtgtcaagagcgaataatctgacagagagcagatgcagaagaatagaaaatttgcctcaagtgcctatcagacattcggcaaacaaggtgttgccctatcggcttggcatatacagcaaccagaaacccctcaattgaagaagtattcagacttgagcacacactgtatgtcgagcgaacccaacggcgggataggcgggatgacgtccttgaactggacaaaaggtccagaagggagggtcgagctcttcttgtcagactttaatgactcatcgctcgatggctcttttgttgattgtgctatcagttcttcggtcgtcatttgaggagctgtcattggtgtttgggcccaaagagtgaatgcgtccgttggctgatcaggtggcgtcaagggtgcagtctttgacatcttctttgcgagcgcaattctgagcttgtcagccgctgagaagggaacccagtagtctccatatcggaagaccatctgacattaaagaaaggcacattgagtaagaacacgttgaatgagagataacatgaagaacatacttgttcgtgcaactgttcgagtaaagcctgcgaagtcaggttgatgaagcaatgtcgaaggtaataattcatctcgtccacagttgcggcatgcgtccagaaagagtcgtgaacagaagccagggtgacatcggttgtctgaatagcagcgtcaagtacgtgaaggtttggaaacgaaattggcatcagaaataagtttgctactcgcacctatcaaaatggctaccaagaaacaaacaaaccttgcagttcatcgccgtcaagaacaagtgtgtagcatccaaactatgaatgaagttgggagcaaacgcgttcttttccttcttaccgacgaccttggtcaccttggagtcatccttgatctgaatatgaccgaatgctgagctgacctatatagccgagagtgggaaaggatatcccatgaaggttatgagatgacaatggaagcttaaagaaagaacggactgatagataaacgtacacgcttattcggcttgacccgataatcctgaacgatgggtaaatccaatggagtggtccaagtcatggttgttcccgtctcgtccatcacatcagctacagatttggttaccaaactaacacacacaccgagccagtcctgaatagccgtcgccacagggaaaagaccggtaatggacttttggatggtctgggcgaggtacacactgagcggata

SEQ ID NO: 2720 - DNA, 3509 bp, Xanthophyllomyces dendrorhous
acactgagcggataaccgtgactcttaaatttagtcttgtcaatcagatttgcctggtcgttaataccctcaatagcgttataaacctggttggccgctccagtgagggtcactccatagacagaagtcatgacctactcaaagataagcacccattagcggtcagtgtacattccagcttcctagtgcgactagacttaagaaacaaccgagactcacgggtgtctttaccacctttctcgagagcaactctgggtgtgcagccaactgtttggcataaccaacttcggcggcggtgacacctccgtttccgctagcgtccaacctaacccgctcaacaacttgtgtgagcacctccgtgtacacgtcttgaggcctagcgttaggaacgatgttgactgccttggctccttccgcgtctcggcctaaagcagcatagtactggagtccgttgcaagtcccgtcctggtatataggaagtactgaagggaactcctctgggttaggatatctaagggcattgacgtactcatgacaggccgccatgaactggagaggtttgtcggcctttctccaccacagatcatccacattctcattctccaagggctggatcggtaaagtaaagagagttcaggaaacatgttgtcagccaatgatgaattgaatgtctatattgcaggcgtaagataacgtacatcgaaagggtttctaagcgaagccaagatgttgtccaagttgtcttctgcccaagaaactctctcatcaaacgttcctttttcggagccgtacatattggtcacctgaatcttgatccaccgtagaccggtcttcccaagcggcttgggctcagcaaacgacatgattgatcgaatggcatcgtctccggcagggtggatataagacgagatagcatatacccggcctcgatagtccaaaaagtggggaagatagaaggtgtgtcccttaagctgcggagcacatagaacaacaattgaatggacgaaaaggacagcatttcagctcggtgaaaaaacaaggaaaatatcaatcaaacttacagcttccgcaatgttgaaaggcaaagcgtggtggctgtcaatcatcgacttggagatcatgggaggtaacgtcttcataaaatccaacatggtctcattgatcctccacccagtcgactgcaggtaattgattccttcagaaacgacagggacctgtctcttagctaaagcatcgttgatgataagtcgtcggacggaggacgtttttccggtcaccaacgaagctatagaaagcccgatgatcaaagtcgacagtttgttgagttcctaaatcttagcaagagcgatcggcgaaatcgactatggtgaatgaacgtcttaccttgttgatgccaatatcctcctctggagacatcgtgcgtccaagggtatggaggaaagagcatagggagttttcgagcggagctctgcaagttgggtcccttgctggcgagcctcaagatggtcgggttgatacgaatcacacgagggcgtcttgtggatttctcttcctgaactctgagaagttggaaagctggttcttccactccaagtctggttgaaagataagcccataagtcattgtttgcgatcatattcgtcatgcttgggggcttgcatgatggacaagcaataagatgcagaagagagacagatgagaaagagacctactttgacaagttgaaggcatccttggtgagagaaagcatgctagcaccaatcttgacttgcatctccatcacgtcccattgaggagtgaatggtcggccttcgtactcatatacgggcttgacactgagctcgccagatgtgacagcgtgccctcggaaaaacatcttcttaggaatctgatcgagaatgtttgagtctgcaaactttgatcgtttcccaagggagtctcccttcttctcctcagggggaatgattggaacatgctgggctctgaactcggtggcaagagcatcaccgatgttggaacacatgtctgccatgagaatatcttcggccatctgggcaggaaatctgggtgcgtaaggcgacctttctgattctggtaggctcaaccggttcgcagcttcaatgtcgacagtggcctgttcgaccggagtgagcttaaagtgacgaagcttgtttaaatctcccccgccttccaaatcttcggactcggtcatacctctcggtgggcccctctcagacttatggaaggcacgctctgcatcagtcatattgtcgtcttcctcaaaatcttcgtcctcctcacgacttccgacaggatgctcttcctccaaatgagcggcgaccggcccgtccgatgtttgggctatagccagagctgcctcggagttttcatgaataaagacgcttggattatcaagcatggactcaatctgtttgactcgggaacctgcccggcctcgcttggtgtatggcgaggacgcggcagagatgacctggaaaacggtcatggcgacggcatcggcaatatggctggtagctaggataggtcgctgagtaagttggtcttggataagtaagtgcgccttgactgagaagacgggattgatagaacaggaaggagaatatttcaatcagtcgactgaaaaactggaacaaaaaacttgcttctgtggacataccagaatgatcgagatgaccaaaagtcgcctccttcgcctctcgctcgagggcctgttccaagagacttttgaatttcctagaccagtcgttcatcaagtcctgaaagtcattcgtgttggctagacgacccagctcctgaatcttcgccgaagttgatctcgaatcgatcgcgtcttgacgactatgctggaagagatcgatcgcaagggattcaagcataagctggacctgaagaaaatcaacatcgccgttgggactttcgtatatctttttgattcggtcgatgtctgccctaaagttggaaagcgactttgcaggcgagtccggtttaacgggcacggtggttgacgtgtcgactggctgcagaggttttgtcggcttcgacatatctgcctgaatcttttcaatcataccaacggtgacgccagggaaaccaggtactgtagcggattcagccagagtaggatccaggtcgtttgccacctggctggtcgaaggaacatgaacatcaggaatggaggagtactaggagataaagagtggcgaagggacaaccagagaaaatcattagttggcaagcaaaaagaagaatggcaagtgatgtattcaaaagcagagttcaagaagagttttagctcacgaagacagctttggtaggtatgtctttatttgcagccagactgagggtcttgagcatccggcccaaaccagctacaggtgaggaggtgaaagaaccacagagacatcagcaccagattggtaagagtgattagaaagtcttgatgagaaaagaacgacgacttacccctcgagattctaactgagttcagc

SEQ ID NO: 2721 - DNA, 4870 bp, Xanthophyllomyces dendrorhous
ctcgtgacaagagaataagaggaaaacggaaattagaaacactaggaaacagagaggcgagaagcctgttttattcctttctctatgttttactttcgactgcaggaatcacctgagaggtgaggagaacaaggtgagtaaagaagacaagacgaacgaggaaaaaaaaacataagccaagcagacagagaccacgaacagactgcaagaaaaaacacgcacagaaggaagaagccaagggaacacagagagatgtaagacgacgagagggaggacagagaagagaaagaggaaaagaaggcacaagaaaatctcgcctactttttccgcccggcttggtttccttcgccttagaaaagattttcttacagtccgttcatgcggtcgtctgacggtgaaataaccctaataggacgagctgctgacgtaacacagtaacatgaaacacgtgtcaatgtttggctgcgagataacatgtcgtaaccactgcgtgtaaccaccaggcgatccgcttctctcacccccatgatggtcgccgctcgtctccatcgtctgtgttcttggttctttcctaaggactttttctccctccttccaacaccagacattcgaaagtctctttgctttcctcctcagtcctatcgaatcctccttcgttgaaaactacctgtctgaaacagaatgacaggttaatctagcttgatctctccccttttctatctctattccttgatcatcgtctatatccgttcaattatgtatcctttcggccgccctgcccatcaaccaccgggtaaccttcccaacaagccttcgcagctctatcaccaagcttcttacaagaactcacctccacctccacctcctcctccatctggactatctcccttaccagctcctctgctgccagcttctcttccagctgggccttcatctcaaacgattcccactactaataacatcaccggtacctcttccagtaaaggtcccgccggtccgacgaaacgcagaccgttcgtccttacacctgatacctccatcgagttcaacactttcgctctaccgcctcatgcagaaatcttctggagggtcttccgtccgatcgggtcctcttcgtccactactcttccagctatcacctcccagacagcttccttctcggagtcatcttctttagcagcgttggaagcggcgcgcaagtggaccacagcccgatacgctactccaatgcctacgcccacaaactcagatacccccacgggtggtctgaatgttctaaccaactcattgttaggccatctactatcctccttgcctgtttcaagaaagccaactcctcacggaacctcatccacctctaaccaaaccatgcatgttcaggaggatagcccccagtcatctgagggcggccgcaccggacagcaccatgaatcaaacgtcgatgctgagttctggttattcgcgattgatgcggagaaagatattaatatggaatcatccggactggcggcactcctgaaagaaatcacatttgaaggccttgaaggtaaatacttttgttcacgcaactccttcagagtgatatatacttgtgctgaccatgtgaatgctggtatgcccacgtgtctatcttttccgacagagcacgctttcggatcgtttcgtccctcaaaactctatccctcaggcacctctgctcctacgtcctctgacgtaccctccactactggtgcactggattgtctgatgccgaactcagagtttcaacgcgcgtactctgtctttctcctagccgctcgcgagcggattgttgaggagctgatatctccctcctccgagttaatcaaatctcaaggcgtcagggtagttagatgcgcacgaggcgtcgttcttcttccttgggaccgtcaagaacacatccgacacggctggaaacgcggaaacgactggggaagtggttggggcgtccgtccaggcgaacgaagaccttggaacgtagggtaagtctttctttcgtacatctcttcacaacacctgagtgaaacaatgttgacaggattagcgaatttggtttaaattgcccgttttcaacataacttcgcgtctctttctcccagctcaaccatatacatcacattttctctacatcttctgcccgctccacagaatcttgtactctttgttccccatccaactcgaatacctttcgttcctttcaaccctcctcttgttgacccaacgccagccgcatctcccgtgccggttagactacttccgacaggaacgctcgcctattttctccgaccgtccaatcagatggacactgaccgtagcaagcaagcggaacgcgccttctgggaaacactccatagcccgtccgtcgagtccacacccagaacaaccgagactggttgggctgtttgctgggttcccatcgggaaatcagccgaggacaacaccggagatggcgtggtctgctgttggcctgtcgagctgatactctcttccgcgtcgtccaatgtgcttcccacgtctaaatctatgaatcccttgtctgcgagaaaggtctcctcttttacagaccattcgattggatcaggcccaggttcgagatcgatctcttctagacaagatctgatagcacattcctcaccatctttcggctcctcctcagcaacggcactccccacatcaaatctggcttcgatatggaagaccctaacctcggcgtcctcccgacatcacgcatctttattcccggcttcacccccttcgtcgcctgctccttcaggcgcgaacccgacaggctccgttgtagcggctgaaggattggacgatcagtctagagttgtcgatccacaggatgtatattttgagattgcttcatcaggtgtccgttatctcgattcactcgttcgggaaagggagagagaacgggagagacaagacgaggaaaaagaaaatgagaagagaaggaaggatgcaactcatcccggatcggttacagcaggtatcgagtactttggactggaaccagaaggagacgatcctggttcggatgacctttggggctcagattccggaggtgacgtcggccaagctgtcgacatcgtgggtaagactgtgtcgactccttcattgcatttgcccaccatggcctcatcctcttcagctgcgctccatcaagccattcagcggaacgtcgtgacgtccacagtgcttcccccactctcctctagaaagtcagccgaacaagtaggatcttccggccagtccaccgggttcacccctctttctgttcaagaacagcaaatagccgccgctgaccttggacatctgatggactggtcatgggaagatccaacagccactacgtccacttctaccaatgccaacgctgcagtcggagttgtcccatctgatactttaggctccgcgaatactcccaccataggattaactcctcagtcttccagcgcattcaacctgagactctctagtcatcgaagacagaccgaggagccaagttgggctccggttgatgccgtcaccgaggatgactttgacttctttgatgccccaggtacgggtgccacacctggcgcatcgttcctctcaaacgagacaccggcagagctgcccctgatagggggtttggataggcagcagagtttgggactcagtccggctggcggtttggccgaaacatctttcgggctctctcctctaccgtcacatatgatcggtctaagtgggtccggctctggaggagcaggaaatgccggaacagtagcgaatggtcctttctcgccagtgttgatggacgtcgacttgatggctaatgggtccccgaacaaccatcatctcatccaaggatcactcaatcaggcttcgccttctggatccagtctctacgctgtgccttctcccggatcgtcagcttggacccatgggctctatcaacaggccaaaactccaaaaacgcccttttcaccttttgtggagatcgaggaggacgaaaacgaggacaatgacgtccaaaaaaaagcggacagagtgactgaggcagggccagttaagcaagaagagatggaacatccgctcgggctcatcgagcatgtttgcggagccgcgccaaaaatcagaaatctaggtcttattccgactggattcgaaccagtgccgttcggcaaaggtcataccttggcagacggaaagtatgaactcggcaagtttgcatttcccagtcctgtttcgctcgtttcttctgagggcgaaggttcagccggggcggtcttcaaagagattgcagagaggagggataccaagaagcgtagatcttcggaggtgtgtttccctagaaccaagaagagcggttcttggaaggaacatctgacttttgatcatcccgacaaggctccatccaatttgtctacacattcatcgcggagacctaggagaacgacggagccaaggaacccgtcctcactacccactcctaccctgctagcagacctaagacttcactacaaccagattgccgatccgagagtcggcgtcatccgccgacttcaattacagtctttctcccgtcgaaaccgctcaacagctcctcttcaagaagaaattgagactcaccttccaaacgattttcaacaacaactaagactctccacgcttaaccgtcggtttgagcgtccgacggtggaagatgaatcagaaaccgatgatgaatgggacatggaagatctcatggggttcaaaaattggactttcactagtccgtctctcagggatgatcgggatgcaatagaagatgaaactgacgcattgcaagcctcgatcgactttctgccctatctggcaaacg

SEQ ID NO: 2722 - DNA, 12170 bp, Xanthophyllomyces dendrorhous
atctggcaaacgggatatgtccttcttcgtcggccggcttctcattctctctctccacgtacaaccaatcgagtctttgtggcgaaaaattaccagttcatacgttaaatgacagctcttcagctcagacaccaattcctcaacagccaccgccagtggtgatcgcagcggcagcgacgacaccggcatgggcaccgactcctactagtccaccatttgggtcggtcgccaaagaaaccacggacgaagatatcgagattcttggagcctggttggctagagaggcagtggagaattcgttattgttcggagaactgaagcttaagttgacaagcttgacaaataccttgacccacagcagtatgtcaataacatgcatattcatctctgccaatcctttgtttcactttttgactctttttcttttctttttacgtagccttttcttgggatgcagaacctatctcctctgttctcaatgttttgcgtacaaagtcatccaaggctctttgcacccttcagagtctggccgagttgaatggtatattgacgtcatcctcttgtttctcatttgttaagacgccactctgtgtgcataacatgctaatcctctctttcccaacttcttttctctatagttaccccctcagctgtttctcctccttctctggaaacattgcaatctccaaagtttactatcggctgtcaaggcaatataattaaaacgtccccactggctcttcggttttggcccaagctaggtttagcacccgcggggggacataaggatgttgttgcctttgcgatatatgaatctacagggccaggcatgaactcgaaagtgagcgcctggctcgccaaggtaggggcgatttatgaggtacgtgtaactatctttctggtggacagaggtatattgtggatcctgagggagaatacctttgtgtctgattggatataatagtcgatgggtctaggaaagcatagcgcagggtcagctgctggatttcaacacggtctggttgccgtcgataatacgcatctcttagaatcaatctgtaagtttgttacttattttgccctctcttttattaaaaatcttttccaaagcgtccatatatcaacaacttactatttttgatactgtaccgttttagacccaattatgtcagaattgaatgcaattccacacgtcatattttacttgatcagtcctcgacatctctcatctacgtctttcagtcttcgagacgttcattcacaactttctatcgctctttcgaccttacaatcaccatcgtccatcaatcgattcctcactcatgtcataccaacttcacttgtgttggacgaacccaatcaagcccaagatcagctgtcattatctgctgtttgtctatctgtttatgatcggcttcaacgtaatgtagaccgacttgtgccgcgtcagctctttgaagttaggaatatcacgaaaagtttccgatttcctgctttctatatctctaaaccacgccctcccaacgtagagttcagcttatcctggccttcaccctcactcaatgtttcgaacaagcacatgttcttacaccttgcctacggattctcgcctaatcgggattggctcgtagcatgtgcagtagatgagcgaggtcaagcccatgaacttaaaatttggaagctcggcagagaacctttcagttttgattgggccatcctcatgctctggagcttcttcatcaaattcagtgaacaagcagatgttgcgtggaggatggtgatcagcaaactaggcctgatggaaccatcagagatcaacggtcagtgtatattctgctaaatttgaacgtgacacgacattttgattgactctgttccattctcttttcttttacgcaatatttgtagcctgggatcagcacctctccggtcaaatttcttcgttagcaggcttgatcagagtttacatcacatgcgcagatccgtcttctcctccattcctgtctagtatctcctcatcaaacgaccacacctctttcgaggagtcactggctcattctctgtctcgatttgatggatcggactctttcgtcgacacgtctaacacgacgtttggcgtatatccatcttatcgaataccctacacactctcttcgtccgataacatcctctcctctaacacaactcctttttcgaccacaacatcggcaactgcctcttcgaaacttgacgttgcggattttcaagaatcaattctacctctttcaaatttttcaatcatcagggtatcctccctgtcttccgtcaataccctgtcttcctcatcatcgtctcatacaatatcaaacttgacgttccatcatctcttgaccttggcatcctcctcttcttcagctcttcccttctctcacctggatcatacgtcggatttccgacgagaccttgcggaaaatatgcattctttatcagtacttgctcgagaacgctggggagaatggaatcctccattgggggaccatttgccgcttcatctattggcggtggctcggatgtgtgctgttgtggatctagtaagacggggggagtatggtctttaatgtatgcaacatgaggagtctgcttgacctccgttgttactcctgcttttccaccgtatttgcaaaggttcatgtcgaagaggatttgttcttctcatataatctagaatctctgaaccgtctctctatatgtcatctgacatttttagttctctcgttgtaaccaccataatatatgacctcaattttttgcctagttcatcagcaaacagaaagtcgacaagtttagaatctttcgtatatttctggtcgtacaaagtgttctctgcgttcactgggctgtttccagacgcactcaaaatccatatcgagcagcagccctattagcaatcactattcacatactgaatcatgcacagtgtttacaagacgataacaacaagacgaagacggacaggaacaactctagaccagaatcctgaccatcatgatgtactcgtcgagttagccagcacgtgatcggaaattctcaaaggttgagcaagcaacatgattgacatagaacacatgatcgaaggagtaaaagaaaagggtacatcgtgacgaaggagacggtataacgaagcaaggcaatattcgagaatatgagagtttagtttatataaaagaatcagactgcaagtcccaactacttcctgtgcccaccctcatacgattattgaacgtctcattcagtaagtcatcggctgctgcctcgtaaggagcttgcattcgaatactgttcatagaaggtgatgaaacaggagcgccgaattcgttggttcctggtcgaagactgttggacgaagcagagtgggccaactggctttctcgagcgatttgggcgagttgatcgtgaatatctcgcaatttcttgtgggcctaagtaagtaaggccgaccggaagaacataagagtaagaaacagttaagagtagaatgaaaggatatctcgaataggttcagagtctttgggtacttactgtcatctctttctccagctttctctgtagttcgtcgccaaatcgtattgcctcttcttctcttctcttcaattcatctaatttaggttgatactctcttgcgacgtcctcggccacctttcgaagtggtgcgcccagattagcttcgtatccttcgttgatgactttgtaaagattcacttgagattggagctggcagatgagtttatccttttctgattcaggagcatccgaagagataggtggtcgaagcttgagctcctcctatgataaacagtattcgaacaataatgatcaaaggtcaacacgaatctacagaatactagatcttgtacagcttcagcgatgagaatggctgacctctaatctctcaatctcgaccgcctgctcgtcgatcttcatcttagctgagaataattcgcgttgaagctttaaacacagccaaaaaactcattcaacgtcggtaatttatccagatactgatagactaagagaatagaaatatcaccaacctcgggtccggtagcttcaaaatcgattttcgttggcgaaacaggacgagccggagcatcttcttcttcttccacactttgagaggtaagaatgagcgaagaaaggtctcgaattcggtctctgtattgagtaaggttttgctacaacattgataccgcaaagatacgagtgttggtgagcatgtctctgcttgaatggctatcgagaacgatgacaatttacgaacctcctcccttctcgaaagtcttctggaactgtctttgggaacttccttctcttgaagctgagctcggagctgagctatttctacttgatactgctggatgagcgcatgtggatctcctatcacttccttcttcgtcgcgttcagtttgacagattttagtcccgtagcaaacaggagagttgaattggtttcaggtaagctgtcgttttgagaagtagagattgagggccgatgtcaacattacgcgccttatcaacgagagtagtatcaaaagatgttacgaacgcttgagccgaaggattcattgtacagatgacagacactttggagtctccagacaaggatggctgaagcatcctggtcagcttactattcctgtatgatacatgggaacttcaaatgcgcaagattcagaagggaccccaattcattcccgtcagatgatgctcgtaaaaacctggttatgtacagaaatcggggatatgcatacctttctttcttggtctcgtttttagcaatcgtagcaataacttgcttgagggctagcaaagacgtgttgatgtatttgccctcggccgacctcagtttatcagacgtagctttctccgaaccagccaaatcgatcagtgactgcacaaatcaataatcgttagtgagaaagtcgagaggttaccaaccagtttcttcttccaaaggataaaataagagttatgtccgatgtgcttaccaaggtactcgtccgggtcgctttggctgtcttcttcccacgcgttcgatcatccacactccaagaggcaacatctcctccggaagtgactctctctcgactttcgataaccagtctatctcaacagattgatatcaggaatatgtcagaaggtctattttcggaagctcgaatgcttcggattctctatggaaaagtagtggaggtaattctgacggctgacctgaatacggaatgacttcgggaactccgcctatcatgatacacagtcgagtttcccaagtcgtaggtggtcaattccatatatcaatacgatgacaaaatgactgttttactgactcattccagtctgtctgtcccacacttctgcttgactctcctctgctcaagatctctcggacatgcagaggattagttacgacttcttctcgaacaggatgaagtgttacatcacttgaggaagaacctctgatttcaacagatgttgtttccggacacaacaaatcctctgcgaggaagatacaatcacaaccgctcatcaacgatcttttcctttactgcacagatctttttctgatggaaagcagggtgaacatactgataacctcgttgtagatctccagataacttgctcttagcaggaattctcgcttattgtttcgtttgatgtaagaaaagacatcctaaatatatcaaacgcaaagtttgcagatatacaaatgtgttatcctctgatatctgccgatacaatagacgaccacagttatgtttacttacctcgatagcgcgtgggataacaccaggttcgctcttgtttcctgtcaaggtaaatgtcttccccgatctgatgtcaagcgataagaagtgagaagatcggtattcacctcagactaaaacacagatactagtgagtgaagggaagaactaacgcggtttgaccataagcaaataccaccgcgttatacccctccatggcagctctgtaggtcaagatttagaacgataagcacgcgtgatctaagcttatatatggcaatcgagaaataaatatcttaccgaacatgatcccgggcagcacactcgtagatctctcggttgtcagatccggaaacaacgttgtctgttgagataaatttcgatggataacgttcttgtcagtccttcacgcatcaacgcaaggttgatgaccttgtcgattgaagccagagtggaagagagcacgaaccaaacacccattcttctttagctcctcgcttcgcgactccttcaagcgtcttgagcgagtttgatgaatgctcccagacagcatggtctgagttggaaagagggtttaaaggtcttactcttcatagttttgggaataaatagaagatatcatctttagcatcaggtcggcttgttttgtttgtaggaggttatctacttaccgaacggagaccttaatattttccttctctctcgcacttccattctcccagaagagatcatcctgccaattttcccactcagccctcccttccagctcatcggacatatcttcaccaatcatctcactagataggaatccttcctccgcgacgttcgctcttacgtatgaaccaagtttggcgggcgtgacgatgtgtggagtgccgatcatgaatttctttttgggccggtatgcatcctccgagacctttgctttgaccttggggaagcctgagctggtttgttggtggggttcggtcacatcagacgcactttccgaagagatgctgatggttggaagggcagatgtgagcggaggcgcgtaagaagaagatcgactgcctgatctgggaagagcagaaggggtggacaccggtctaattcgagaagcagaagaagactgatttgccccgaaacgagtggatgtaaggggaaggcttgatgtgttgtgaatgtccgagtcgaatttaccggagcgctgactgtttgatgaaggtacgacccttctaattgtgcttccaccattgagctcagccaagacgtccacaccagcatctcctgtttggcgcattctagatgtcgaacgaacactttgagcacctggttgagcttgagaatgttgaagttgagttagtttcgtcgatggttgaggaacaaatcctcctttgactgccgaagtattttttctaggggtatgatggtcgagaggttgagatagagagtgggaagcgttgctagaggatgaggaagacgacgaatgtcgagccgtatcgtatgcagacatggcaagttattcgggcgagccagataggaaagttttcgattacagaacagagatgaagttgactctacaaatgaaagattaaaggtgaaggtgaactccaaacgggatgtagaaagtcaattatcatgagaaatcagtcgcgtcaagtcgcgttgagagtgtgaaattgggcgatacaatggttacgatcacgtgtgtattacgtattgaccactatctgttgaggtggctctcttgtagcaacagccatatgactatagcccgtcatcatgaacataacaagagtgctcgactcgctaaaaccacttggaaagcctatctcgagtctgttatttcatccctcgtcggaagattacatcgttgttgcttctggtgtgttaacttatcgtcgctatgccttgaaaagataggtcgttgatcttccgcggttaggaacacttgtgtattgacttgctcgccttgttatcgctcgtctttagaggactcctctcttaggttattggaccttaagacacagagaccgctatgcgctgtcgtagggtttccttttgagatctctggcatggtatttgaaaaggattcaccagagaagttcaacgagaaggattggggaaacgtctgggttgcatgtggttcagatgcaagtactcctcagaatttttaatttctcgcttgtagccttgtcaagttctctaaaagatgaaaacctcattgatctgtcgaaacaataggtccacttattaaagttatcggcggctccaaaatttctcagaagatttgaaccggcgtccgttctgcggtccttgccaaatctttccaaagacgaaatcaatagtctatgcctgaccgaagaagcgaatgcgctaggttggtgtggagatgacggaaaacttggaataagttagtataacccacctgagtgcactcaatattgtttgcatctctgacaaatcatcctgttcaactctcgatattcaagttgatctcgagacgttcaacaagaaatatatgaagggcaaacactccaatgtatgtatcttcgttctctcgactgtgtctcatgctgaacttctatttttacatatgatacgatccctcctggtttatctgatgactgtgtaatcagatagcgggtgcggtgtctttcgtgcctggtagacctaccacgcttctctcgataggctatgactctaccgctcgaagctgggatacctcctcttctgtcatgctggattttctctctctcagtgagttcctgaacttgggctttgttcttcctctttatctcgggccgacatctgtcagttcgtttctttttcagtatggttgattaagccttcggattctatctgaaccacagatccgcctcctggttcgcaatcaaacaatttggctccgtccttccccctgtgccttagtacctacttgcttccaccagcgagctctgtggaagccgaatcggaacaagatggagaagaaccgttgattgcgataggtactgcagatggatctatctggataacactcccgtcgcgcctgatagcttctgaccgttcgaccgagacggcagagaacgatacgggattcagcaaaaaagatttgaagaaaaagaagaacaagaagagtggaaaaaatacactctggaagggtatcaaagagggatcactcgaacgggtagagattgcacttgggcctatcatcaaagtgtcagttgtctcatatgtctcactccttcccaattgcctttatctttccaattcgctcacacattcgtcgtcgaacacagagcatatattccatgtcctccatccgagcataagttcagcgaaggtctaccgtatcttgttacgctttcccatcttggagtccttaccattcatcgatttggtcgttccaacaagtacagaatggacgtctcaaccgttctcacgtggaatacggatagcatagtaaagtgtaatacccttgctgtgtcggctggttgtccaagagagaacccaggttctaaagtcaggatcgctgttggtggagttgggagcaaaggggaaggatttatggaatgctgggacgttgagttcgattaatgaaccctgacttctgcgctcatccctatcacgggtacacctcttattaccccctgtagcctgcacagcttggggttcttacaaaacttagctcatgactttgatggtcttgagtctgaggacacccagatctagaagggccgcgtatggaccaccatcgtttgagattactctcaccaagtctaaagcctgcaattatataggaacgagtgattcgtgaaaaatcatgagattgagatattaagatagcgatagaagagaagaagcccagagattatcacaaggaaagtaacacagctatgggcgcatcgccgacggcgtttcgggagaagtagatactgatggaagcgccagtcatcgtgtgtgagaagaaacatgaaggtgaaccgtatatgtcggtaaagaaagaagagaaggaacagatggaataggtatacctcagctgattatcgctggggaaattgatactagaacctcttgttcaatactgaacagctcagaatcattcaagagatacatcgtcagtaagagatacaacattgaagattctcgaagaagagagggatgactgacaggagaattgacgatcccggacctcgacttaagtttgcttatcggcgtactgagactctgtctcgtgggcttggcaagctgcttcttgctgaccatgaaactgtaggcatagggaagtatttcggcggctatgagaaaaacgattcttgaagattaccttaagacgaacttaggttgaattgcttacacatcatctggtaaagcaacaacaatgttcttatcggctccgtgtcggaagttatcggcgacaacggtatcctggtatcgcttgatttgataatcatccattctgccctgtttgacccgcctgaagttccctgtatagttggaaagccgagcggaaggtttgtcagacggagagagaaagtatcagttcaacgaaaagcgttcgggttgaatcagacaagatacattcaagtcaaaaaaagtcgtacaggtgatgacatattctccagacgaagtcacgatactcctttcatcttcacccagcccggtgttgaacctggcaggagtgaagctaaccttgttacccatgtaggccacgtgttcaggtttgagctgcagtcgacggggaattggcttcgagtcggctgggaaggatttatcgaatccagaggcacccttatttctgtaatcgagatgaacaggagagcagagaaaatcatcgattaacgaaatatccttgaacacattcagacgataaacaaagaaatcgcttactttccatcgccgatcagggtatcaatcaagagaaggtaggttttacaagtggcgatgagccatcggccgtccgcggttacatcaataccaaggatagcatctccaagagcgggaagagcggtctgtcattcacaacagaaccagaagcgaaggagaggttcagcgatgaatctcgtttcagaaaacaggacaagaaagacgagtaaaccgtttaccttagcattctttccaagctggtcgaacaaccggatgtctcctttgttcgacgcaacagcgatctttcctgattcggtcgtcgtggcagcgctgaagtcattcttagttgcatactgtttgaattgggagtcgaccattttgttcccagctagtcgaggatcaatcctgaagatcccgttatgagctgttcgtggatggattgcaatcacacaagttatgtgcctcgttctttgagcatatgtgcatacaggatgtatatcaaagaagagaaaggaaaagctcacaatgtccaatcaaagtctgctgcccagtggtctgagcatacttgctgtctggaatgaaattatccacctgaacatagtcggacactttccactcgtccactactttaccggtttcaagatccatccggaacaaggagttcggatcctctagatttttcagaatcatcgatcgatcttgatcatgaagcatgatctattggcacaaagaagaagaaaaagggacaaagaagaaccatactgttaaacacagatgatccacgcgtgaagaacacacaaagcaagcgggacagcttactttggaaggagcaaacctcttgcccttggtggtcgagaccttggatatcgtggtgttgtacttgagcttatcgtcgtcagtatggcggaagacaccaatattgtctcctcgaacaataaatgatctgtcgtgattgaacccaacagcaagcagcttattctttcctttaaatcctcctgtttcggtcgagggtttgtgttcgtcttcggactcggactcggaatctgagttgtacaatggagcgcgtgctgataggagttgcaaacgttaaagagaaatcagaaaaactaattgaccaagaaaagatgcaacgaaagcggatacaaagacaaaaacacgaaccctcttcttcactttcctcttcttcctcttcctccagctcttgggaggctcgctcggtttcttgactctcctcatcctcctcttctactccctccataggcacatcctcaaatgccgagtacacatactttttctcatccgcctgggttagatgaaaatattttttttgttaagatcagatcaaacagttaccgtcatctcgagcagattatgggaagaagagtacgagagacatgccgaaccttggccttgccccacgacattccgttcgacttttcccagaggcatcggttgaagttatgattgaactctaggtatgcacccggtgtgttgaaccgtagggaccatgtcgttggatgagtgttctcatcagatggaact

SEQ ID NO: 2723 - DNA, 2344 bp, Xanthophyllomyces dendrorhous
catcagatggaactaatgacgatacggatagaaatgagagagataggaaagaagtgtaaggaattctatctttcgtgaacggtttgtgaagatgagaagggcgcactaaagttccaaatgaaagcaagattcgactgtgggaccgaaaatcgacaaaaacatccataacaatcaacattatcaacaggttttctgagacacaaaaacgtgggtctatcctgagggtctggacatacctgagaccatcgagtgttcatgtcagaattgattggttgactgatgatgtactgatccttttccaaaagataacacgccatccagtctgataggacgcacgagaggcgagcacaaagtcaatcaataagatcattatttgcctcttctaggaaaaaacagtacacacgctactttgaggaaaacaaagtacttacaatcaaaggcgctatctcccttctcgacaacaagcaccctgactactccctgtacgacgaagcactcggtctcctcgtcaaacaaatagatttctgccggtccactctcgacgtccatctcctcgctcgagaagatgacgggtagctcggcagtctcctcatcatcgacttctttactggtcgtcacaacagacatctggggggcaagaatctcgctatcaatctcggtttcctcgtcgtacgactcttgcacctcgggagcaagtccaacaggagcggctgctgctgccggagcaggcacagatgaggctttgacatgagtagtagtaggaggctcagaggatgtagtggtagctggatgtgcaacggagagtgctttgagcgtatttgccagctcatcttcgacctcggtcgaggtagtaggaagcttggtagacgtggggggtgggagccgagccggggtggaagggtaaatggaagacgcagcgggagagttaagttgagatcgcgaaggtctggatgcgtgtatatgttcatcattcggtcaacaaacaggtcggatagggtcgctcgagtgcgaagatatgagatgacacgacgactaacctatatcgaagagcatccaagtcattaggagtcgccaaatcgtggctttgttggaatttctacagaaaatacgtggatgattggatcaagctgaattaatcttccggggtgcaagaaccgacaacgattattgcaacaaagacagaacaacacgcaccctctcaaacatgcattgtaacagagtaacttcgaacacatcgattattctcttggacaccacatcagaatcaatgatgaattcgaagagctctccggccccttcggcttcatcatcgtcgtcttcagaatctgtaaagtccgaagagtgggaccttggggaggaaagcgagtcggactctggaagagatcgccagacgaatgagggttggccttcaaacgaggactgtctgatctgaagggaggggtccagcaggaaggatcgttcgtcttcggctgattagagagaagcataggaacggatggatagttataagaacgagagcacacgacccggtccacgtcatcaatgacgatattcgagggataaaagataacagcaagacgtactctcggcatcaccgtctaagagctcagcctctccttcttcatacgctctagtaatcacgagctgaaattgccactcgagagtggttctcctgacggtggcgacggcatccttgaagctgaaagaagagagatcaggcaagtagataaataagtaatccaaatcttatgtatagatagcggagtgaaagaagcccaacgaacatgcactctctggatctcttgatagaatccggccgaacgagaaaaagctgtccagctttgagttgaacaatttccggattttggggatcgcctggaaagatatatgcggatgaaaaacgatttagtccaaccgtatcagaaacagtgctatcttgaccctcggcgattgcttctgtgttgtgaatgaaagaccagaaagacattcatagaagagaagcagagaaagaacgtaccccacatcttcccgaggactgaaccaggacatagcaagaagagaccaaagggcggaaagagaagatgaaagcgtaatcagtctcaaagatagaggtccatgcggttttgtgcagttaggggtttcgtcctgtcaagaggaacggctatcaaggcgatcggatgggctggacgtacgggatttgatctgattgaaagaaaagattcaagaccagagatatgagtaagtcagcttggagggtaccaatattataacgagaaagcaatgtgagcattcaccataaacatgtcttctaattctaatggtcaaggatagtcactgttgggtg

SEQ ID NO: 2724 - DNA, 21698 bp, Xanthophyllomyces dendrorhous
acacacacacacgctcacacatcatttggttctctggttctgtctagccaacattgtgttcttcttcttgcatggtccttcgataaacgatcagtccttcacgtctaagtgcttatattcttgctacttgcggtgtaggtccctgcttgtttcacaccaacgctcggttgaaaaagagtatttatccatatcccgatcccaggctcaattcactgctttatacagaactcgatagaatgtccaaaccgaattgtctccttcaaacgttcccaaggcagatatcttctgcctcgatctcctcatacactccggtccttctgtttctctaccctccgtcggcccaattgagctttcggaaacattcaatccgtcgagtgtctcattcactctaccgtccgactcaatcgcgttccaagtcagggagagatcaatcgagccctctaactcagtcatcaacagacgatctatcatcatcttcttcttcatcgtcaatacaatcaccctcctctagtggaactactgattctacaaaccagtctacacctgtttactcaagttcaaccaggcgaatactcgccttgcttcaatctggggatatcgatctagcagaagcaatcttcaagcttgagaccgccgctcggaacaaaatccaaacagaactttcacccgagaaggaagatgaggagctcaaactcctcggtgaatctctcgtgttttccattctcaaccgtcgaaccttccagactccctcggcctcaacgttttctttcccctccgtcgacgatcgagatgctactctcttctacgcctctcctctcaccaggcgagtcatccacctcctacatttctttagaattcatagagttccccggacagaacacatgtacaaactcttacttggtcagctactagatgatggtgacatcgacatcgcggcgcgagtctatactgagcttgtcgaagaatgggcgtgggaagctcggctgggtcgaactcagcctggatcagaccaaactctagctacgaacgagctgactgcagaggtcaactggcttcgccgaccttcgacggcgccgtccagcccttcatctgactcgagcatggctggaccaaagctttcgggaggcatagattcggatcaggcaaggcggcagaaggaagagattgaggaaaaagacttgcttggcttttggggacttggtttacggtggaatcatcgggcggaagcacagaggcgtgccatgtgctgggctcccgaacccactcgagtcaatctttatcttcaacggtttccttctcccccacccagtcagaccgctcctggtgtggaaccccttcttccagagctcacccctttcccatctcaagaactccttgacttgatcctcgccaagctgtccttctcagaagtcgctcacccagaggtattccagaagtcagccgcagcgctagccatcctgagtaacactgtgttggctcggactctccctctgtttcgtattacttcactcatcaaggcgctctcatcccttcctaaacacccgaccgtctacccaccaatcccctctccagacaaggttgacaacacttcggcttacgctcacgtccaaggcgcgctttcttcgctcatttggggcctccccggaggaagcatggacgtcaatgctaccaggtacggcctccactttgtgtctgagacctcggcacgtactctgctctggttctccctcagcgacttaaaatcgcccctcggcggacagcgcgtgctgagatatatgcagggccagggctgggccgacaagagtgagactggacttgttctaatggaaggaggcttggccaccaaagtgtggaacctctttctcgatggactcaagggcgctgtcgggtcattgacggctggtatactagaattgtttcacaccaaaccggatatggagaggccggagatccaacatctagtgggttctagtcagtttggtcttccggttcgaagaataggagaactgccaaaatggaagtttgatgtcgaaccgagcgatggtcagtttcgaattttatctcctgatagtatggccaagagtgcattggctcattccgcttcaaaatttcgacctccttcttttcgtgatagaacacccatcggccttgatacactcgcgaccatttcaagtacaagaatatgacgaggaaaccaacgcatatatatcttccgtcccgaccaagccgttcgagctgttggaccctcatctcgttcaacactttgacaccttgatctcatcctcagcctacacagccgatcatctctccagacttacagttatcctcatccggtacggagtgtccaccagacgatttgatattgttactcagatcacaaattacttgctccgacagtcctggcgaccaattcagatgaacagatatatctatcacgcccttttcaacgcactggtcagcggcggactttttcgaacggccgaacagatcttctgtctcgctagagaggaagcctcttcacatggaaccaagttgtcatttggtttccatagagatctactcgagctgtatgctgccgagcgcaaattgttctttggcggaaaagcttatcccggagaaactgtcagagggaaccgggcgttaacatcaggctgggctctttatcgagggatcatgcgaggggattgggcagactgggaggaggtgcagactcgaatactgagcaacactcgattcaagagaatcgcttccgttcccagttccaaccggtcatccaaggttttaagccagacatctctgattgatcaagcttcccgatcaacggagaggtcgatcgtatctgacgatcccatctatttcttaggaacaaacagcccagagatcgttcggccgctccgactgcaaaactttttcaacgcggcgctttcgcttttctatgtgtgtcggtcggaagatacagttccagacaaatttttactcaatccaaagacgttcgaatctctacttcacgaacgccagcaagtcgctcagtcgttcgactcagcggacgaacccgattacgcggtggaagacgagatgcttactatggttgctcaggatgttgtgcgagcccgattaccgcttcctcccgggatcgaataccacctatctcgatacccctcgttcctggagaagctagcaaccctcagagagaccgttgtctcttctccgtccttcccagcccaaacggatgagttgaacgttcatcataaatacaacccttataggcttgttcccgctcgatcgtacttcaagggctcacttcaggtgtatgaacaagaggtgatggacaaccttgcgtcctctcccgaattcttcagcccgaccgatccgtctggcgagccgtatgcgattcatccgtcagactggcctttactcgtttgggctgcactaaaaggtcgaactgaggctgaatacggaaacctgccgcccggtctatgggcagaagctcaactattttctcagtcgttcgaggtttccaaatccgaccgataccttcttctcgtcggtcgggtgggtaagccagttccgttcattcctaagaggcatcgggaggaattcttacagggacattggccgagtcttcgaaaaacctactcggttgcagctgcgttggagcgattaggggaccttgggtggtggcctggttgtcagaaggattttatcgggttgaaatggaaggaatccggtaggggtcgatccgttcagaaacggacagagctcaaacaggcggtcgaggcgatcgagttgggatcgttggattcattgaaggaaatcgcgcaaaatctgaaagtatcgatagattagaaacaaggttagatccaaaagaggttgcttgatgtctcccccctttcctcggtcaggattcaactggcgtaatcttattcggatgtaaacatgattaatgcacatatttctttacagacaaacatcattcagtcatgttcagatgttattcttgtttcttctcatatctttctgtccactcatcaagagaatcgtcgcaaatcaaagacatatatgatacgccaaaggggagatcactccgacgccaattttgaagccagcctttggtgctcgttccaatcggctagggcctcgtcaatcttttcaacaacctgctcggccgtatggtctttgccgaaagcatcgacaaatgcgccgtccggatccatcagatagaagtaaatactgttcggacataaaagtaaaagcaggtcgatttgtcagaaaggaggaactcaagaaagaacagagaaagcattggagggagttcttcacctgtggtcaacgaggtaatcatcgtccggtccagctgtgggaggagtcgagaagtaaactcggaaggctttgcacatggccttgacggcgtcgaaaggtccagtgagaccaaccgttcggggatggaagtcttttatatagcatcccggtcataaatcagcgccagacatagggaaaccccaaccatatatgacaaactgagaaggcaaaaggaggcttaaggggacttaccagcaacatatgctttcacggtcggcacatcatctcgggcaggatcgcaagagatgaatacaggtcgcgaaatctttccgtgctttttgtctgaaagagatgaaggcgaggtaaggataaaggtcattgtcagatcaataagaagtggtacccttcagtttcctttctagagaaaccccacagccaacagaagagcaaagagacgcaccgacaatatccaccacttcactcatcttatcaagctcctccggacagatatcaggacagttggtgaacccaaagtacatcaaactccattgtccgagcaagtttttctcggtaaaaacattgccattatgatcgagcaatgagaatggtcctccgatcaggggttttccggtcttgaccgacttggcatgctgttggcctttgatatggaaagagagagataacccgagaggcgttgatttgttagcttcgatctctatgttaaatggacgaaactatatcactgcgggaaacatacgcttgagttcttgaatacgttccttctctccagtaaagtatacgtacaacccaactccagccgccacgaagagacctgctgccttccagttgaaaacctagatgtatcattccatccaaatcagaagcaaacgtaacgattctataagtttcgttgtcacgcgagataaaaacacaaccatttacgaagataatgtaggcagaaggagagaaagaagaaaatgacaggaggtaggaaaaaatccctccgatgaagaggaaacgaagaaactcaaacatcgactgaccccaatgagttcagaggaactagccggtcgtccagcatacggcttctccagaggagccttgaagttcgattcttctccattctgaggtgatacatgcgctgaggtcttcggaggaggggtcgacccggaaggggaagcagaacctggagaaacataagaccttcggaccaagggttgaagaggagaaaggcaaggtcggaaggatccggcggccgttcggtgagtggcccgaacggtgagctgtgataatcgagatgcagatggggtgaacatgaatatagtggaggaagagaagagaggatgggtgtggtggtacgaagaaatagtcaagatcggttgagtgtagttcaagaagccggcgggaaatatcgacaacggtcgtccgcggtcatccggtttatatcggccgcgatagcttctcaacacaacatctttgatcgcattgccttttcatcattaaagtcttcacaaagatgtttgatacatgtgatgatatataaggaatggtacaaagaccagcatacagaaaagaaacagcatacgttgcaactcatggcttatgagttgtgaagaaagacatcagagcaaatcgaaaaaagaaacagacaaagcgaaaagaaagacaaaaaagattcttggagaaatttggtagaaaggagcaaaggcaaagcatttctttcatctcggatgagcatagaccaagggcattttactcatccgccgctgtcttggcctttttctgctcgccatcttcagcaacgtcatcggtagcagcagcagcagcaggggaagccttacgcttgtccccagtctgcgcttcatcatccttgtggacttcattctagatttcccgatgagttgaccacgacgagaaagatacaagaaagaagaatgtatcattaacagtgttgtatgcagggttatgaatatcttaccgcaaatagaagatagacgaaccttcttcttcacttcgtcttcctttttggccgtatttctggtagactttcgagttccctctgcaggaggcgctgtcttcttttcagacttaggagtttttggctttgtcggcgaggatttgtcggacttgctctggggcttattcgcaggtcgaccccgcttagcctatttagcagatggcagagcagaacgaacgtgacaacatgaatgattggctggagattgtgttgaatgagtgtatagtggcaagactcacaggactctttttctctccctcctctgacttggattcttcgtcatctttccccttcttgtcttccttttgttctttctcatcgcccttcttctcttccttgttctccccatcaatcttcttgtctgcctctcctgatgcaggctccacgttatttaactcgtgagctaatttaaggactttgttgtcgccctaatgatacagttgatggacatcagcttcaggtaagacgaacacatgtatcagcaaaaacgactacgcaccttctccggttggctaatctcgacagccggatcttctttatctgtatgacgataaaaacccaatcagcatccagccaaacgggtaagtatataaatccgtgacgcggtcgctcgcgacattggctcagatctccatctacctccgtctcgattcttctaagtgtttacataaaacgtgaacagagcgaacaaacctccgtgtcgactaacggtatttccgttttttgtctcgatctcggcgtctccttcgacgactttgtcgactttcccttttggattagatgatccatatttccaactatatgattagagtcgagaaagaaagatccaaaagcacgttaaaccaagttctctatattgaaagaatccattctggtgagttgaaccagaggaaaccgaacgcacctgacgtcatctcctttttcaagctcggctggtccaggcatatggtctaattcgttctgagggacggatggatggatatatatatcaagggaacagagaacccctcggagggaggctagatggatgaagatagagattgtgatagctctaagtttgggtatggaatcaactggagatggaagttgatctggcccgatgacgcagtttgtaactatccgctgtgtagccatccgcctgatcgactcgtgaccttgcgagcaagtaagcacaagagagacttaacaacgtaaaaaagccttcaaccttgatcctggaatcagcgaggggctgcctttaaccacgtttagtccgagatatggcctcagaggtatgttttgctttggtggaggctggcacttctcatcactataatagtcaaatgatagattgtttcgcggatcgctttggaaggatatactacaggaagcagtgcagatagcgcagattgcttctgtcaacacgaacctattcatgaacaggggacttgatgaacgtttcttatcgatcgtcagatacgacgcatcgggatatcataaacagattctgtcacagtcatagtatgtcagcgagtggtcgaggcatcaaggatttttccaaacattctccctttttttttctttcttttttctttcttttttctttcacaagacgaacagcgcatagagaatagcagtgtcttgagaagatatctctcagttggccagagagagcgacttggaaacaacacatctcatgtgaagaggtcatgtaaagacatgacgctcgtacatacattcagattccgacaccaaatgattaaaagcaatccatgttgtggacatggattgtgaactagtccataaaacaaatagaccggatgactgatgcagactgacatgggcagaatagatattctggagagcttctccttgatctttccggcaagccaaagtcaatgacgatgcttgaaacgtttgctagttgatctgtaaacccgggtgcagacccacaactagagcgtgcacattcacatgggtatctatcgttcaaattctcatctgaaggaataccagctgaagttgcttcatgcttattgatttccgcccctagtctctgttctgtgctctctaccctctgctctctgcatgagaaaacgtttgttggctctgactgcacaggaaacaatctagggagttgactcaaacggtccctcaaactggaccgttcaatctccttgttaaagcttcgcaccagagttgaaggtaagtttgatcgcttgttccacatgcgcagctcagtctcgacgcgtacacgcgcagcatcagcgcgtacagaatacactgacacctctcggctctgggcgcgtgtttttactgatgtctcagttttcagccttttggtcattttgcttcttcttcctgtcgtttttctcgcttttcctcctttgattgtaatctattgtggctggatagattgttcttctctcgttagcttggattctagaagagccatcacccaatattcagaggcgaatttgttttaattaacaaagttttctacttttttactctcttcaacagaccatcctgctcttgattttgttctatcctcctcctcattctttcatactctagccatgttcagctcgccattcactccgacaggcagtgtcagccggagtcacagaacgtacaaacggaaaggatctgaacctctgatctcgcctctgcaatctcctctgcatccgagtttcggtcaatcatcgcagatgggaagaagggctagtaacccagtggtctacgtacaacgaaactcgcgttgggccgtctgcggtcttgtctccctccttgtctttggtcttttcatagtctcgtccagaacgcaagcaactccctggctctcgatatacaacaggaccgatgcccttgatgatagagctgatggtatgcctgccaatcactcttcctctgcactccatctgccaagtgaaccggctagctaacctgactctctttctcttcttccaagtctatcaaactattcatacaaaaatgcagagttctgatctcgcagcgatcaacaacgttccgccattaacgccgtcccaagagctctttgcccttgtgctacatctaacatcatccgacatgaacggtcttccgcctctcgatccgagtttacctcttaacccagacttcgtgcttgataccgctttgcctacagagcatgatgaccggcaggccgctctgagacggttggagaaagaatgttgggatgcatggccggtcgtcgtgcttggccggcagaacgacgtatttactgaggaggccgttagcctgcttcagcgagaagactatcttggaacgaacggacgggatctaggaatcgtctatctcgatggccgacgtacgtctctctttcttccccaaagtttcagttctctcgatcaatttatactaaaaatggatattcaactgtctatttcattctctcgtatgctcgccttccttccaacgcagccgacactgtcatcctgacatctctcctcaaccggctaacacgtcaaccgacactgcctaccatcctcatcggcggccatcctatcggaacattcggcgagctcaagtttctccacgatcagggtcggctggctattgttctgtcccatgcggggatacccattggggacgatcttcgatcaagaaaagcacgagaaagaagcgcagccattgtcgaaaagaacaacgctcgtcagtagaaccgatgacatcggttctgtcttgcttggctgtcgttccattcattttagacgtcgttcctctttcgttgcatccgcttatgtttccctcagcttccctcacatacacacattctctcttcttcgcatacacatatacttactcatacacacacatgtaccatcgagataactacctcatattctacctgcatcagaataatccggtctcgtttggccaactccttcatcctctgtccagttctacattgacggcagccattcttcgatttttcatttctttctttccacatgccttgcctaagataacgacgcttaacatatgtctagatttggactctttcactcagttgtcttgctttgcacatgccctttcatcttatgacagagatcccgacagagatctctgattttacaatcctaaccatgctctttgacattttggtgctattattcgcctgtctcttctgctgcatacctcgctcacaaacactctcttttcttcttgagcttcttcgatcggccactaacagaccctatcttgaccaacgatatgaatcatccgcgcgtacgttcctgagaacgttcctacgctctgtaccaggaacaggaactggcgaaagatcgattggggagaccgttcagtcaaccgaattgtgttgttgttgtgttgttttgggtgttctttgcgcgttctcgatcttcacagctagcctggcgctcgcttctctctctcttttcgtcccttaccaaatcctcaaaaggcatcaacgctgttcgaaatgttggctaccgaacatcgaccatcgcttcttccctcacttgatcttcattttctcttctttctttcgttcgtctctctttcttccttcgttactgctgcgatacccctcctttaattcttcagtgagtgatctccttcgttcattggtctacttgtccttgttcagtgatatgtcagatcggtcgatggctcacgccccgtacttcctctcattcgttccttcaagtcaacccttcctgatatagataccaacaggcacgatcccttccaattcaccctcaatcgttctaccttcaccaacctctactctttcaaagcattacctgtccttagtcacccatgacttccgtcatcatcactccagttactcctgtgaagcaaaagatgggccgcccagggacagccgccctcgctatcgacctgactgatatcccttcgccttctcctccccggagacaggcagtcaacggaccagcttccgcccggcccacatcatctctaggaagacgacctcctgcgactcggtttgagaaagaaatggcgagagatggaggactcgatccggagggtgacaagaaccccaaggtatgggtttatgatgataacatcagtcgataaagtctgaaagtcactgacggatacatgcgtatgtgtgttgatttcgttgcagttcatggggccatggcgctttggaaagatcattggtagaggcgctgcaggtctgtcgttctttcagtagtgaatgttgtgttcctaagagaacacgttgctgattgtttatgtctatacgatcaatctaacaggccgggtccggtttgcccggcatgcgcagactcaacgtcctgccgccatcaagattcttcccaagcagcttctccgagatgcctcggtctcgaggatgtccgctatggataggaccgatgagaagttgaagaagtacatccagggaatcgagcgcgagatcaccatcctgaaacttgtcgaccacccaaacatcatgcggctgttggatgtctttgaggacgacaaatacctgtatgatccatctatcaatcacccttactctcaggcccctagagtgaactctgatcgtgttgtctgtcatcttggttagatatctcgtcttggagtttgttcaaggtggagagctgttcgattacctcgtccagcgaagatatcttcaacctccagaggctttgcgatacttccaacagatcatccggggtgttgactattgtcatcactttaacatctgtcaccgagatctcaagtcagtctcttgttttcagcctaatggcatctgcccttagttcgagtcattgattcctttcctatgcacacatgtgacaggccagaaaatcttctgctcgatcagaacatgaacatcaagattgctgactttggcatggcagtccttcagccagttggagaatggctcgacacctcgtgcggatcgccccactatgccagtcccgagattgtagctgtaagtctattctcctatatcacttctttcctcacaccagctcggtctgggagataatggttggtttacgtcgtgttgttcctgctttgctatataaatactcagggaaagaaataccatggaggagctagcgacatctggtcttgtggagtcattctctttgctttgttgacaggacgactccccttcgacgatgccaacattgggattctccttcaaaaagtcaaggccggacgattcgaaattccctcgggagtacctcgatcagcgagggatctgatcgagaagatgctagtagtcgatcccaaaaagagaatcaaggtttgtacctctccatcaacagtcttgttctttatatccgccaagttgtattccaaattaacgacatgtatctttgatggcggcttcagatgtctgagatctttgcccaccccttcttcaactctaaggtggattactctattggaaaacggatccggattgttgagccgccttcgtttgatgagatctctaagcctgtctcatccaagcaggatatcgatcctgaaatcctcaaaaacctcaaagttctatggcacagtggacacgatgacttcttgaccaatgcactattgtctgacgagtaagtgaacagaaacatgggtgtatacaggttggtccaaccttattgattaaatctgggatctgggttttgatcataggaaaaacattgagaaggtctgtcgatttcctgtacgtttaggatgatgttttgatatcaagatctgacagttcttctgtcgcttcgtcccaatgaaggctttctacacgttactcgtccgatacaagaacaagcggctggagaatctagggtcaagtgatggcgaagacgatcttgaggaaccagtgcaggtcgttaggaacagatctacctcaagtgagtgtctggctctatcatggcatataaccaaatatacttatctcctttgttgatccattatcaaggcaggaagaaggagcggtcttctcgagaccgcaaagcctcaggccaaagacctgttcttgggtcctctaacgccgccaatgtgcctatcgttactgcgaaggattcaacatcacctaaaaatgtcaaatctatagctgctgaggcctttgctgaacctgctaagcctcacgttcgcgatagaagcttgacggtctctgtcgctccttcagctcctccggtgccttccaagtcagcttgtgatgatcgcatcgacttgagaatagaagagctggattctactgagagccacgactccacgtttgactacgacgcttcgactccgatactcactgcgaaacctcccacagatcagaaacgagcccgaactattattcctggtcctcgtcctctgtcggttgccagtcctagcatagagaagaatccgttcaaactgaacagcgtgtttaatgataactccgagtcggattgcgctaccagtgagtcggctgttggctcaacggtggacgtcgatcaaactatgagcaagatggcgcatgttatgcatggacttggactcggactacccaacggtactggactcgccacaccttccgtggaagtacctcctgacacgccagcatcgttcgatggctcggactcaggtcagatgcttcctccccatctagttcaatggatgcagaccgtcaatcgcagactcggtctcatccagtggacgccggattccaacgagaattctccaaacatcccgactgtcgaaatgcttgcctctgccacggatgcttcgcctcttctggaagctactcctcgtcctgccatcatgtctcgtcctaagtcagactatggctatcacagatctccttctgtcaagaagcaggtcagaatctcggtctcgggagatcactctcctactaagcccaactgtatgtctgcgctatgcacgtcctttgcctggcttgaacttatcagatcgattgactaattcgatgacttatgcccgtgtcagtctcgccgggcagcaagaattcggctggtcttctctctcctgcgtctacgttttcgaaagagccgtctccattgatcatccccactgcatctcgtcgtcagcaagggtggttttcgaacttgtttcactggaagggagccgtgagtaactcttgcctctgtctcttcttggcttcatttgtattctcaactagcgttgttgaccgtcttctttgtgattcaatcgacatcttttttgaaatagactgcgatgcttatttgtccccaggatgagatgttcacccgagcggattgtgacaaagcttttaaggctatgggcgtatctgtagctacccaggctatagatgggctttatgttctcagagtatttgtcaacgagatcgagggtatgtaccaaggtggttctttttctacagacacatgcttatcatgctttgttcgcacgatcctacaacagatatcgatggccagctccttcgcaagcccgtcaagctccgagtcgaatttagaccgcatgctttattccaatcgcccaacccggaatctgccggtacacttacctcaataacgcttgtgcaagaaaagggagctctttcgtcttttgaggtggtctgtggtcgccttcggaatgagtggccgtatgtgtctctcattttgtggctgcatatctgcctgcatataactaacctatttatctacacccatgtgctcgtccatatagcggccctggaattcgcactccgggtaatctggctccctcgaagtttcctagtcctcaggcttcgcccgcacctgagttcactgggcttgtggcctccccattctttgtctaaacgtcttgttatggttctctgtgtcttttgtttgtcgttctgtcctcgtgtgtgtgcatgtattctagataccagcggcctttgcggtctgcccacctgctttctcttcatgttgtttttttctcattcttggcgaattgttctgtccgcttgtatcactctcagacactccttttcgttctgaatctacgttatttcgcttagaatgtcttcctcttttgaatgttttcttatacattcggtattgtcgcatgttttttccttcctgttgattggattgatgcatggtttgtcttaggtcgattagtgccttgaacgaaggggcgtgacacaacgataaacatatataggtcacagcaagcttccatctgatcatgccagttctaggtatcaattttatatatcttgtattccggtcttgtcgtctatacacagatatcttgaggtaatgtcaacagctctttttcgccctccccaagctcgatcttgtcggcccagtagaccttgaactggtgattgagcgacttgttaccatggatgccgattggggtgctgaatccacctgaggaatttgggatgacatagataacctctcgtactctggaatgaacgagcgccatcgaacagagcacacagggttcatgggtaatgaacaaagtgagcgaagtaaggagataatccgctccatttctcgtcggtgcttcttccggtcctaaagggaggtttcgaatagaggcaatctgtgagatacaggacagagtggcgtgtcgaagtgggtgagaaagaagacgacggttgtcgagcgaggaagcttggatgaagggagtaggtggaatttcggattcgtcttgaggaaagatacttggtggaggagcggcaacatgagccgctatcggcagctacgtttgaattgagtaatgagaacgatgttggttcttctgttggacaatcaatcattccaattggttgagaacatttcgtcagaacttacctctccacgttggccagcattgattccagccttgacgactcgctcgataccagcctgaatccatgctgctttgccctttgaccagcctttctcttcttgaatagccctgaaaggtagatgaggaacgggccagagcgcagacttgatctttgtttgggacggcgttcggccgggttgcgcaggaacttgaacctcatatggtgccagggtagctagcaccaggctatagtccatgagttcagcttgaagatcagatgcgctgattatgttggtagcgcataaagctactgagctcttcatcctgtaatatacagacctccagacccagatcggtcgatgagggtgagcactaagaattagacattcgggaagaaacaaataaagacctacatacacaccggtttcactaccctggaattttcgaaccctctttaaatgctttgttgtctctcctttaggacccatctgcttagcaaactccataagaaccttcatgacagcgttcccagcgacaccctctggaagctcaaccgcccacattgaaatctcctcccaaccatggtctgctccagctaatttttgaagaacataatcatcgtttggcgttcggatcggcttgaaaggaagatcagcccaaaggatggtcttagaaagttcttttgactctaagtaatccgctggatctttcaggtaaggcacttgctcgacacatggtgtcgcctcaggaagaggctcaatgatttccatgttgatgttcttgacgaatggcatgaattatatgctgcaacgttagaaagcaaatatgaagtaaccaggacgtgaccggccaaagctgtgcatcgtgtaactacgctcggcgacctccgatgtgtattgacccggatttggtcgttcctctaaagacgaaccatcccgtcgtcctcggcctcttcctcttccttgttgtcattgtcgaagctagattcacgctgtttcttcttacacactgggtatataggtccttttgaactggttgcaccgggaagcaaacgcttacctgatatacatcgctcatgatataatggccaccgagccgccttctgtttcaacggaccccaaacaagggaagaccatcaacggttacttcaaaacatactccagactcgcgcccgccttaccttccgatcctacttgctcctacagatgcacatcaacatccaggacctctcggatacacgtctcaccaggtttggaatatatcatatctcaaggtgcatcaagtcaaactccaaacaaggctagacagagccgtgtggaaaggagggttcaacctagtccatgcaaagacgattggagtcaggaaaacaaagacaaggaaactcagagtttgagtctcaatatgcttggaaatactgagactctctgtagaagtaaagtcaaacgcgaacctccccttctgagcaggtcttctcttgagcgacctcatcagcctgcctcagcgtccctcacacagacccaaaccggccgttgctcactatccgagtcaactagcccacctcccttctaccctctcgctcgcaagatcgatacaacaagctttcgaaatttcgccctatacataccgcaaattcctccgtatcacatatcattatcgactctatcgggtgcgctccatactggtggccaggtgacctcaacaccgtcgaatgatgtcaatatatacgatacggacgtgatagtagactcgatgagtggctgtatattacacgacccttcctcaatatctttgttaacatgcgatagcgctcagacgaatggggactgcctatcatcttcgacagattcggtagcccatctggaggacctgagaggtggtactgagaagggctcgtcaaattggcatgaatcaggctcaactgtacgcaagcaaaccttgcccccggtagatacccgatcaccctctctttctaagaggagtcactatcacctaccgacttctggacgctcgaatctcaggtcaagtatatcttatggacaagaggctaccagctccacttctgcgtttcctggacgcgaacatacaccgcctattgagaaatcatcgttttctggtcactccacgccaccttctcagacttccagtttcactactgcttcggagctttctactcaagactatgcactccttctccgtcttccacgtttcaatcgagtgctgacactccaaagagctccatacgaagctcatcaagtctcgttctccgatataggcgcgacaactggtcatcctgtctttgtctttcttggcttgggaggcatacgctatctgaccgtactgtttgaagatttggccagcatgatgaacctacggttgatttgcgttgatagatggggactaggcaagacagatgaggtctcggctgagcgtagagggttcatcgagtgggcaaaggtgatcgaggaggtcactgatgagttgggcattgataaatttgggatcttagctcattcggcaggctcgccatacgcgatggctgtggcggcaacgtttccggacaggctggtaggcagtgttaatctactagcaccttgggtgggattagatatcgaaggaggtgagcggttatattcctaaccgttttcttctggcatgtcttcgatacacccttggaatcatgaacttacttgatggtttccatattgattgaaacagggtacaaatggttgaagtatgttccaactacaatcatcaaagcgacccaagctgcagagtggaagatgcaaggctggatgttagggaaagcatccaactctagccctactacttccagtccgcgctctgccacagaaagccctgtttctattcattcaaagatcatagaaggatgtgttcggaactctcaggaaagttacatatcaaccgaaagctctcggctttcccaatcacaacccattgcgtccctgagtcggtcgtcctccccatccaatgaagaacagcagccgtcatcgggagacactagccttggtacggctttgctgagagcatgtcatgctgagaatggaggacggacggaggatttgttggctattatgaggaaaccagcattgtgggggttcagttatatggatgttcagtcacaggtgaacgtctggtatggagatcgggatgatcggatcagtgagaagagtgagcgtttccctcttttctcttctttcttttggccgcgtaacctgtcctgattcgaatattgtacgtgataggtatactctggatggagagatcgcttccaaattgccaactttttctccgacctggagaaagccatgacttgctgtctagcacacatattgtgctggaggttctggaacgtttggcagaggatgccatagtcccatgaggttggtttgatcgtggactttcaggtcatgttagctgtgttctcaagagaaagattaaatacatatgtgtgtatatgtgcatctatatgaagtactgtgctgtgtgatcatccatcgcctcttgagatacggatagcgtcctcattgataaccgatagatacttggtatatctcggtcagacatactcacttccacttttgaacggcacgccgtttctgcttcttggcttctaaagtctaagcatcatctcgaaggacgattccaggtaggccaaaatctcttcgaagtctacttttgatgtattcgaagttttcctccgattcagccgtcaacagctcaaaacggatcaagaaatcgatcatgactttatgtaaattcgaaatcccaggatcatacatagtcagatgtttgaaagatctcaagaaataagcagcgatgactggatgaaagactcaccgagcgcgcagtttggcttgaactctcgtctgtgtagtaattcaataattcgcggaacggccatcaactatcaagataccggcacataaatacagaggagtacgatgagtagtcagtaagatcgatgtctgaacgatgatagtttacgagaagaaccccaacggaaagacttgcctcgaaggattctacttctccatcacaaggcgtcggtgtgaaaacgtcgggtgacggaagcttgaggtcaaagatgtattgaaattctgtgatttatgtcgtcctatgtcagttgcattcagctctttgacaacgggagaaggagagaaattgacataggttgaagataatgtattacctggttggatccatccggttccgtcgtcggtcctgatcaagtatttgacctctccttcaggctttagcctgcccttctccaggacgagtgactctggaatggatgcttcctcttgacattctttgacggcgcaaaccagaggatctaggccgtgtgtcaaccctcctgcgactgtctggtctaacatcaacggatacctatatgaagcgtaatcaaagccaagtgagaagaggacaccttataacgtgtcagcatgatgaagcgtcaggatgcgtcaaagaaggatagaaaggacaagatagaaacggacgtttgcttggtagcagctcgtcgagggatccataaagagatttgcccatcatcgcctacgacgtatccattgatatgaatcccaaatgtgacgacaccaaacagaccacaagctgctctttcgagggcctggaagtgaaagcaaaagaagggtatgttcagagcgcggtgaactgtctttatgctagccgttgattgtgtgtagcttatgaagagtggagacttacgaaagcggcgttctttccgaacgtaccgggcgtagagtcggagagttctttggtagagtcacattcttctaacgggccgtagatcgtgtatagttccttcgaaacatcaagcaaaacagaacagagacgtacacaaacatgttccaataccaggacgagatgtcagaacgcacggatgaaagaaaaaaaagaaagagacaaaacaatagatcgtagacagacatttcgccaaccatctagcggatttttaaactgcccgtccgccttccacctttcgaccaattctttcaatgccctgcttctcctttcgaaccctacgcattcacttccgaagtacacctttcccaagtcctctccatctttcgatctttcccataccagacttgtttggttggtgttgttaggcaggtactcaatcagtttgtcaaccacagatgtcaggagatgtccaataggtttagtggaagtagatgtgaggtagaacggggtttgaacaggaggtcgattggtagctggatcgaacgagataggaagatcggtgttgtcacatgtctgaacgattggaagaagggagggcatagtgtacgacgatagatggtagatggtagtgatagatggagagcggacggagggagtgtcaacgtgtcggcgctattcttcgtgtccgctgctcattgtttttccttctagacataacttggatttgctattaccttaatttttttcctcgcaggtcgtgtgctcttagcatgaagattgaagatacgtatacctcaaagagtgtttgttggaatcataaacatgcgaatcgtaaaaagatggtgatacaactaggggggatggactatagaatgcaaataaagattgaccggaaggtggagccttttttttttttttt

SEQ ID NO: 2725 - DNA, 29964 bp, Xanthophyllomyces dendrorhous
tttttttttttttttttaacaagaaggatgagcgcaagcacaatggcgagactcttccattttgttcttcttctttttttatctactctttttgctcgaccttaccaatcagtcttcttgggcaaagccttcttgggagacgaagcgaccgggatcttttggccgatcttgacgtaaccgagtccgtccaaccaagggtagttggtcgatcgggagacctcgaacgactcaatagcagaagccttcttcaaagtcaatccaatatcgtccaaaccgtcgagcaagcatgaccgacggaagggatcaacatcgaacggcacagtctctccgttgggccttcgaatgagctgagcctggagatcgacctcgagctcctgcttagaagcggcgtcctggtagagcagctcgcaggtctcctctggaagaacaatgacgagcataccgttcttgaaacagttgttgaagaagatgtcaccggcagaaggggcgataatgcacctgattccaaaatcgttcaacgcccaaggcgcgtgctctctggaacttccacacccgaagttgggtccagtcgagaccaagatggaggagtttcggaagggatcctggttaaggacaaactcggggttctcggagccgtccgggaggtaccttctggaccagaacaaagcagaacccaacccggttcgcttcagggtcttgaggaactgcttaggaattaacagatcggtatcaacgttcggaattgagaacggagcggcgattcccttcagctgggtgaacgggggcattccagatggcgcagccgtctgggccggggtggggatcgacttgatcgacgtcacgtcctccgcggcggcctcagagagaggctggggctttggtggggcggtcacggcatcggtcaagtagtcaattccctgggtgatcttgacaccctcggttcgagggatggcagaaccagtgacctgtcggacgtccgacaagacacctgtcatggcagcggcggccaccatggcaggactcatcagatgggttcgaccaccagcaccctgtctgccttcgaagtttcggttcgaggtggatgcgcatcgctcctggggcttgagctgatcggggttcattccaaggcacatcgaacaaccagcctctcgccaatcccaaccagctgctttgaaaacgatgtcgagaccctcttcctctgcttgctgcttgatcaaaccagatccgggaacgaccatggcgtaaacgttggatgggatctttgaaccaacaggaagagagagaataaccgaggcagccgatcgaagatcctcaattcgagagtttgtgcacgatccgaggaaggctttgtcgatctttacggcgttgatcggctcgttcgcagtaaggcccatgtattggagggatcgctccataccagctcgcttgataggatccgactctttggaagggtcagggacggttccgttgatggggacaacatcctgaggagaagttccccaagtaacagttggaatgatgtcctctgctttaaggtgaacctcgatgtcgtactttgcgccctcgtccgccttgagacctttccagtactcaacggcctggttccactcggctcctgccttgggggccaagggtcgtccagtaaggtactcgaaagtaatctcatccggagcaatcataccagctcgggcaccggcctcgatcgacatgttgcaaacactcatcctggcctccatggagagagctcggatagctgaaccggagaattcgatgactgttccagttcctccagcagtaccaatgacaccgatgatgtgaaggacaacatccttggaggtcacgccggcaggaagctcaccctcgacagagacaagcatgttttgagatttcttttgaatgagggtctgggtagcgaggacgtgctcgacctccgaagttccgattccgaaagcgagagctccaaacgctccgtgagtagaggtgtgggagtctttagattgggaaaggagaaggggaagggcaaaggcaaaagtaaaagcataagctgagcactggggagaacacccaaaaaattaaatgagcagacttacctccgcaaacgacggtagtaccaggaagggtgaatccctgttccggtccaatgacgtggacaatacctgtccaatcagaagtaaagttttaaataagaaaaatattaagtacctaagccatagaaaactctttaaaaggcaagcataacgtgtagactgaaaacactaaccctgcctacgatctccaaaaccaaagtaggtcaatccaaactccttgacgttatcagatagggcctcacactgagccctagaatcttcttcgacaatttgagccgacatggacttcttggggtctcgaatcgatgtactaaagagtgaatgattatgaggatagcatctttggttgagcattgcactgctgtgtatcagaaatagacagactgccgaggcttacggaatgttgtggtccaaagtgacgagggtgcaatctggtcgtcgaaccggtcgctttgcatttcggctgatttgtgcgaaaagacaaatgaacaacgatatttgatttagttttctttggaaattagaatagacgagaagaacacgaaagaaggcaaaagaacgtacagtccttcgaaagcctgcggactggtcacctcgtgaacaagatgtctctagaaaagtgcgaagaggaggatggaagagaaaaagaagttaagttggggaagaaaaaatctcaaagaaaagtcttatggacgaacgtcaatgtagataagagtctctccgtttccctcgaaaacgacatggtcgtcccagacctaataccaaaggtaaggaatgagaacgcgtgagtacaagaattagcgattgaacgtaagaagaaagtcagagttaaaagaaaagaaacttggggaaaaaagcatagttgtggagccttgccacaaggatggggaaaagggtagggaacagaagataagcacccagagaaagaacaacgaaccttgtcatatagagtcctgggaccagacgaagtggcgataggcatgatatatttgtatgaatgtgtatgtgtatgagcgagtgtgtgctgatgaaagaagagaacctcaaacgaaggacaagatgttaatggtatggaagaacttggaggataagtgtaagaagaaatatataactgcaagattattggcccgatttcgctgcctcgtgcctgatatcttggttcctgacatactttttgtcggacatgccgaccgaagacttctgactcaattgactgactgacctctgaaatcgcatatcagctcatcggccgatagatagatgaccgcctgatgcatagagtgtgttccattagccattctacagcttcatggtgtttatgacgacctgttgagcgtccagagtctcatcatgtcgttgatgtgtatagcagaacgttcgatgcatatgagctttccaagactgtcagtatcagcctgtagtcttcttctcttacttgtagacatcgttcacttcagtgtttgatctcgttgagatttcaacgattgtatatctgtgtatatatatacatgcacacacatacacatatattctttttcatcttcatcatcgatcatggtgatgatgggaattcgtccgaagctcaaactcggaggggtctaggagaaaatgctgggttgtctttctgccgggatgcacggagtaacatcggaaccgtatctggttatgcatgaggttacactttgtgtgttagggttacactcaaccaaagccatcattcttgctcactcgctcacatttagaaagcaacaagacatctaatcgattgtcgtccatcgctttgacgactaaggatccacctactttgcaagtcatgtcacccgtagccaaacgagctcgactggaggagccagagactaatctggacaaaccacaaccgtcggaagttccatcggccactaccgtcgtcattccggtaacgaccgagacccacaaggccgatcaagaaataggcaaagtcgtcgaggagaagagccttgacgacaatatcaatggtgatattagtagcgaggacgaagcagaagaagtatatagagaagatgcgtccgatcagaaagctagaacagatttatacttagacacggtccgtgctcattcttgcaagcatgctcctttcacgtcatgctgaactcggacgtgattgatcttacccgtctcacagataaacagagagatgctcgactttgatttcgagaaactatgctcagtctcactctcaaacaacaatgtgtactgttgcctcgtcgacgggaaatatttccaaggccgagggaagaacagttgggcctacaagcatagcgtgaacgagggcaaacacgtctttctcaagctagacaccgaggaggtgagaaggttcttgtcggctctggtgttaaccttatagagaactttactctgacctctgtattctgcttcacttctagttcttcatccttccggatggctataaagtttctgatccgtcgttagaggatatcatcaaagtcctcgccccccggtacacccaccctcagatctctagactgtcctacctgccaagctcgccgtcgtacgatctatcggccaggccatacctgcccggctatatcggtctgaacaacatcaaagcgaatgattacgaaaacgtcatcatccactcactcctccatgtgcccccgcttagagacttcttccttgcgccagacaacaaactgctccagccagagtcaaagccgacagagcttgtcaaaaagtttgcagaactcgccagaaaggtttggaacccggatctgttcaaagcacaagtcagtccgcacgagttactccaggaggtctcagttgctagcgaaggaaagttcaaagtcacaaagcaaggcgacccgattgaattcctcggctggctccttaatcggcttcacaaagacctcggtggttctcgaaaaaagaactctagtaggtttttagtccttgatctgttcctttgcctcgtctggcatgttgtctcaaactgatgtgtcaaaaaatgaaatcacgaaaaaaggtataatatacaaaacgtttcagggagacctcaagatcgagacacagcagtatatggtcaaggcagattctggtggaagcaaacggccccagttcgatattggcagaggtcggtccacttcctcacactttgttttcatttttctttctaaagatggtgttgctgattggaaccaatctgtccggcatgcgcctcggataactccttctctttgtcacgtcctagaaacaaccacggctacccctccgttcctcttcctcgctttagacctccctcgaccaccattgttccaagattctgtagagaaaaacattatcccgcaagtctctttggcaagcattcttgccaaatatgatggaaacaccactcaggtatgtagttttctcattgttggttgtttgaatggaaggcgcgtcgagaaacctctgcctcttgtcttcttcggttctttggttcacccgctttgtttgcttcacataggaatttggtgatcaactcaagagacacaaattgactaggctcccgccttacttgatccttcacacaaagcggttcaccaagaacaactttgtagaggacaagaacccgacgatcgtcaacttcccgctgagaggggttgacatgcatgactgtacgtcttcttctgttctcattttttcttcttcgtctcgggagcaaatctctctaaaccctttgtcactatcacctcgtcatactatcgatgcccaagaagacgtcgagccacttccagcagctcctcattcgacggtttacgacttgttaatcaacattccgtacgagtcatcctccgcaagtaccactaccaaagtcggttccgctacggcgacgaacccgaagaagaaacaacaactggcggatggattggacaaccctaggtggaaagttcaccttagagcaggtggcggtggaggtgatggtgaaaagtggttcagtattgaaggtatcgaccccgctcttcttcttcttcatgatgaccggtacagctcaagggatctgatatatgtcttgtttcggggttgcatcacgtagatctcagggtggacgaggtccagagggagatggtcttcctaggagaaaccgttctccaggtcagtcaaatctcatatttgtcttccttcctaatctccttccttcaatcaaacctcggtcactcacgcttttgttctttggtttgagacagatctggcaacgtcgagatctaggacccaatggtgccggtctggtatgatttgacgaataattttccactgaaacatactgccttgtagaagccataaaaatgaacaaatcacgctttggatcctgacaagcgagcaaacatggaagtgtgtatgtgaatgaggagacaaacggatgccttcgacgaaaaagaacagaaagagacgcgtccaaaggatggagcaacgagacaacaggctaggcggtttgttgatctcgcgattttcccgtgccccatctgcaatttcctttccttccctgtaccctaattccgcctctttcgttcttcgttcttttctcttttcccttctttcctttgctcaaggcaaactacgacggccgatctgtttgataaggagacatacatatataggggattgtatggacagagataccgtcccacctacaccatcccttctggcatttgaacaagacgtccacgaaacttcgttggcttacgatcatccaaacatgcggtccggtggttccgaccttgacgccgaaggtgaagaagatgatgagagtgaggaagaagtcaaacatgccgatggctctgatgggctctatcagaacgacacagcagaaggagaggatgaagaagatgagggagaggaagcgatggattataaggatgtagacgatgacgatgatgacgacgatgatgaaggttcgttctttgtacattctttcaatgcctctcccttcagacaggaacggatgccagcttctttgcttggtcaacgattttggttcttctgttctgctctctttcttcttttgccactcgacgtacacgtttggtgcttattcataccgcgttgtattttcctttcttcctcttcctccctctgttcttgcaaaaacagatgaacaccctgtcggtcgcactcgatacccaagacgtcaacggcagcctgtagaacggtacaatccattagatccgacaccttccatagcgtctactaagccatcacgacaacttcgaaaccggtcagacagcctcggccaaacctcttcagccaccaacaatccaattccaaagatcagactcactcgtaactccctccgagcttcacagggtacagagcctgccacagacaatcaatcaccatcccatcagcttgacagtcaagcgtcaaaggtcacctaccgatcggacgacgaagatgagtatgacgaagatgaggcatcgattcggaaagcgccgatgcgtatcaaacttcggtcggtcactcgaccgtcccatggtcggacgacaaggagtacgaaaaagtacgaggaagaagacacaaacagacattcaggcgatgatgactatgaagaaggtgatcctgagccaactcaacaacgtcagcttagagagagaaaaaagatcaactacgcgatccttgcgccggaatacgatcaaccaagaaagtcatccatgaaggatggcctaggaaacgggatgggtagcaaaaaatcaagacttccttggagcgtctcgggaaaacatctggatagaatgtttggaggagctcctgcccaaggggatgattcagttcgtgtctcccctcttcttcctctctcttcactcctccctctcctcgtgatcgaagagcacatagcctccgaaaactccatttttcaggcctaatacgcgttcaaatgattctccttaggacgatgactttggtcccaaacgaaacacgtcgaatacctttgggcctacaggtgcgggtggaggtatgctaggtaattctatgccactcgatatgggaaccggaccgagtaatatgggcaaagttggggatgcaggtaaggttttcgccatcctcggcttcttccttatatcactgggaagttcacaccgctcacttgccaaacatgtctatccttctacactccggaatggacatagctttgtccgatgcggatccactagggacaaacactaatatcacattcgatgctgtagggggactagaccatcgtaagtcgcttccatcggtctttgtgtattccaccacatacttcactcgcgcaaattcttgacacttgcctttttccttcttattgaccgatttacacagatattcaacgactaaaagagatggtctcgttacctctattgtatcccgaattattccaacgcttcaatgtgactccgccgagaggcgtcctctttcacggacctcccggaacgggaaagacgctcgtcgcgagagctttggcagctagttgtagtacatctggtaccaagatatgttagtatatctagaagcttatctgcattactagaatgaagatgttcaccatcctaactcccatgtttcattcttttgaactctcagcattcttcatgcgaaagggagcagactgcctgagtaaatgggtaggagaagcagagaggcagctgagactgttattcgaggaggccaagacctgtcaacctagtatcatttttttcgacgagattgatggtgagtcttacaaatcgaactctgctgatatccgttcggtactgacaattcaagtctttatctcgactcactgtttcggttccaatgtggacaggattggcccccgttcgtagtagtaaacaagaccagattcatgcctcgattgtgtcaacacttctagcgctcatggatggaatggatggccgaggtacgttataccacataacatttacatttcttcaataagataacttttagattatctacgttcttctaatcggaactacatgcacacaaacaaactccatttaggtcaagtcatcatcattggtgcaacaaacagaccggacgcggtcgatcctgctctacgtcgtcctggacgatttgaccgagaattttacttccctcttccaaacaaggaggcaagacgaaagattctcgatataaacactgcgacttgggagccaaagctagaagatgccttgctagataatctggctgggttgacgaaaggatacggtggtgctgatcttagggttcgtctacctcgatttcttttcatgatgaaatctttcatatctggcgctaattgccaagtataacacgatggccctattctaaccaacatggttgttgataggcgctttgcactgaagcatcgctgaatgcaattcaaaggcgatatcctcagatatacaaatccaaagatcgattactccttcagcctgaaaccatccgagtccaagccaaggactttatgatttcaattaaaagtaaggggtttcagcctgaagaaaagacgtgtgacattgggtcttgctgacgtagtttgtttctcctcgaacagatctcattccctcctcggctcgttcagcttcatcggcagccgttatccttccgcaacatcttcaaccgctgttggctaaacctctagctcgaacaattgccgccatcgacaaggccttacctcccactaagaagacgagcgtactggaggatgcagaatgggagtctgatgaccctaaagacggctcgtttgaaagccatctgatgatgcagagtacgcgtttctccgattcttttttaaaaatgttaatgatactgatgacgtgtgcctatctctccgcatctgattatctttcacaatataggctttgaatcctctagagtctatcgcccacggatattgatccatggagaatctgggctaggtcaaacccatattgcggcagctgtgttacatcatcttgaaggatttcatgtccaaagtttagatctcgccacgttgatgtctgattctactcgagtaagtgtcctgagttgtttttatccaatggaagcagtcaatttgggctgatgtgaccgagagtttctgttttgcttgatggttgactatcctacttactcaatagacggtagaggccgctctggtccagctattcattgaggctaaaagacataaaccgtcggcgatattcattccgtcgttatctcaatgggcaagagtcgtctctgatatggcgcgatcgactgtcaagtctttgcttgacagtatctcttcctctgacccggttctcttgcttgctgtcgtggacggagagctggattctttaccgagagatgttaaatcttggttcgggtattccaaagacaatcgaatcgcgctgagtttaccgatcgatgtaagctatttatttccatttgaccatctcttattttgtatcaaatgtgtatggctgacatgtagccggtctgggcacttaaagtccgagcgacaagagtttttttcaaaggtggtagagaacgtacgaattcgccctgatgaattcccaggagggatgcctcgaaaagagagaattcttgaggagcttccaatcgctcctgcattgcctcctcgtcagccgagcgcggccgagattgcggcattgcaggagaatgacgcaaagttaattgagctcgttaagtggaagcttggcccggtgctgacggatctgaagcgaaagttcaagagtttttccaaacctgtccatgtacgttgaatgttctgacggagcgtgaataccttgacatagcgttgggagaaaccagatcgagactgacactacttgtgcgttcttgtatatacaccgcaaactaaaggacgagtaccgagtatactttgactatctggaggacattgaaaataagaatcgagcggtactcgaggcgaatgacgcgattggcttatcccctgagaaagcggcgctccattcatcccacaacacaaacgacgggttgaatccagagattatcgcgcagttgattgatgttcctcctcggctggtggacatcaatctggaaaagatgcactacgcgctttactataatcgatatctctccccggatgagtttctccatgatatcacccgaatagcggataacgcggagatcgcgacggacgatatggaacgaacaatcaaggcaaaacggatgatgaaccatgctttcctgttagttgatcagtcctgtgatcctcaatttagattggattgcagacggatggcagttcgggaaaagaacagggaggaggagaggttgaaggactcgacgtctggtcgaagggcgtcgatgagagcgagaggcaacagggagacgaacggggggtacagcccaaaggggacgagacattcgacccgaggtcaaggaaaagccccagagtttgacctgacggatcctgtggcgctagagcggacgctcaaaagacgacgggaaggatcgcaatcccgaggggtagattcttcagcgtccactccccaacgaggagattcgagtctgaagaagcctcgtccaacagaggacgaagagagtaacgagcgctctttgtctggcgtcgagccgttagacggagtccagggtgacgagatccatcctgagagtcattttaagatccatcctgagagtcattttaagattcatcttgagaatcatcctctaagccatgaagctgagtctgaaaagctctcttcgtttgatgtcgagagaacaacagatgtgtctgttgagatgaacggtgagggagcgatccggccagagtctccaatacctatcccgattccaattccagtgcctaccgcaaaatccgtgcctataccattccctgtacaccggccaactcgacagctctcgctctctgatctaatgcatccctcagctaccggtcgatcgacctctttggaagtcgtgtcacaagggcatggagatatgccaccgtcgtcgtcgtcgtccgctcgagtctcccggctgatacaccttccaacgatgtcgccgacatcatcattgtccgctacgggcactctgtcatcaaccgtgggccctctgtccgtgcccgctgtggctgtttctgtcgctcaaccgttgacaggttactctcaggagttgccagttttacagaacgggcatgtgccgtcgttgacaacgatgccgacaacaacggcggctcctgagcgcgtggtcgagatcgaggtcgagtctgtgtctttgcctactgttcctttaccatcatcaccgccgtcgctaccgcttccacctccttcgccacttcctccaccgccggtatttatctgctcgacatctagtctagaatccatcgaggctcagctcgttcgagactcagtctcattcaatgtggatgagctagaacagatccgggcgatcctgctagactgcatctggcgacaccggaccgaatgggaccgatctttgatgatggatgagatgagtcggctggccgaggagttcaaacatgaggtggacgggaatggaggagatgatggatgggatatcatgggataaataggagggaagtggaggagagacagaatcgatttgtaagacgagtgtgtactgtatagatctataaagattacaaaagtattagtgatgacaagaatgacaatgatgaaagactggctcgatacacgtgtgcaattctgtctgtacttggtttccctctcggagcaacacgatcatctttaaatctctcctttcttgactatatccctctccatccgactgacgacctgacagagatgacgttgacaaagcaagaagagtgagaggacacatcctgctctgcgtatacgacggatgccgtttcaacccatccctcatctccgatgaaacggatggaggattcagaagagtgagatccttcgcgtcgcttcgctttcgttcgttcatcctcgagcaaatcctatatgtacgtggggaggaaggaagaatggtggggatgcgcagccgagagatctcaaagtgccgccggcagatgcccaagcgcgccgcgcagcattatctatcaaagagggaccccttctcgttgtgcctggcttggcctgtgcctgtgtttctttcactcttcttcccgactgctctcgcgacgaatcgaacgaatcttctttgtaattttttttttctacgcccggccatttattttgttttattcgttttatattttttcgcttcaactctttctctcttccctctcacttctaacgttcacccagaaacatagacacacaatctccttctcttctttctcatagatcatgaccactcagcgagtaagtatcagtctacgtgatctctccttttcgttctcttccttctctttgagatcatctccatctcctctgatggagatcttctgatcgcagggaggaaagaaaggcacagaaagagaaacgagccttatctgtgcctgaatccccaacgagttttttttttttaattcgctcctgctcccacgttgtcatctctggactgggacgttgactgtctcttcctttcccatctcttctctagtcccacactcagtccaccctcgagtggctctcctccctcaacaccaggtacggcgtgtatttcttcttactcttcatagtgaccgatttgttctcgcgatctatagatactcacgtctacatcttccataccctttcctctagctttaacgctttccgagatgaggacaagtacatgcgaaaggtatgttcgccattattcttttcttgagcttctcttgcacgaacgttcatacagctggtctgacttgttttccaaccttgtttttactttgcttcaccatagacctccatcatcgccaccatcggtcctaagaccaacaacgttgagaagcttcaggagcttcgagaggccggtatgaacgttggtaagtagagattgaggacatcctgtctataaagctccgaatgcctggtaaagagatttgtagctgatgcgctcatgactattttcttctttcaaaagttcgaatgaacttctctcacggatcctacgagtaccaccagagcgtcatcgacaacgcccgagctgccgtcgctggtaggtcgaatctatagccagatgtgtattgagtatgtacaatcagtttatctaaccctcccgttttcgaatttttattttcatagccaacccgggaggtcgaccccttgccattgctttggataccgtacgtacattcatgtctagttctatcttcatagtaaacccaagctgacagcgttccctttctctacgcgcttccagaaaggacctgagatccgaaccggtcttatggccaacgacaccgatgtcaagatttctgccggtcacgagttctgggtcaccaccgacgaggctcacgccgagagcggatccgccgagatgatctacatggactacgtgagtattttgttggctttgacttctcctctttccaaactaaagctgaccaactgcccgcttgtatcattctattgcgccgaaatcctctcagaaaaacatcaccaaggtcacttctcctggcaagttgatctacgtcgacgacggagtgctctcccttaaggtgctctccatcgagggtgacaagctccgagtcaaggccgtcaacaacggatcgctctgctcccgaaagggtgttaacctccccaagaccgctgtcgaccttccccctctatccgagaaggataagcgagatctcgccttcggagtcaagaacggagttgacatgatcttcgcttccttcatccgaaccgccgatgatgtgctcaccatccgagaggtccttggacccgagggtgccaacatcaagatcatcgtcaagatcgagaacgagcagggtgtcaccaacttcgacgagatcctcgccgtcaccgatggtgtcatggtcgctcgaggagatcttggaattgagattccttcttcccaggtcttcatggctcagaagatgatgatcgccaagtgcaacgtcgctggaaagcccgtcatcgttgccacccagatgcttgagtctatgacctacaacccccgacctacccgagccgaggtttccgatgttgcaaacgccgtgttggacggagctgactgtgtcatgctttctggagagaccgctaagggttcctacccgatcgaggccgtcaagatgatggccgagacctgtttccttgccgagtcttccatctgctacccccctctcttcaacgatctccgaaacttgaccccccggccgaccgagaccgccgagactttggctattgccgccgtcgctgccgctgccgagcagggagccggtgccatccttgttatgtctaccagtggaaacaccgcccgattggtctccaagtaccgacctgaggcccctatcttggtcgtctcccgaaacgagcagacctctagacagatccacctccaccgaggatgctacccgtgctactaccctgagccccgaggagtcgaggcttctcagtggcagactgatgtggacaaccgaatccgattcggtctcaagtccgctctcgagctcggcatcatcaagcccggacagaccatcgtcgccgttcagggttggaagggaggactcggacacaccaacactcttcgtatactttctgttcctatggacttcaacgacctcgagctcgccccccttccccaagtccgaaagtagatgtgcgaaaatacttcgccttttcccctcctccgctaaaaagttgtctttaatccccccaggttgtttctttgttgatctaatatgataaattcatcatgtacactttagtaatggtagaacgtgatcttgttctctcttctatccgtcatatatctttcagcttgagaccattcggtagataagagacaatgatgctgttatcacaacagagagcaaaaatttgaaattgtgccgaggaaaagagtatgcaaagttcaaaaagaatgttagggttaaagaagtaactagtaactagttagatcatcaggcacgtttaacatctcctatctctccgcacacgtgaggtttcacgttctgctttgtttctttactacaacagaccaggaattaccagcatagaagagagacttgaaggaaaaaaaaaatgaacattctgaagaggttgagctttctttaacaatatctacactcggaccgattgagtccatccaccagtttgtgtttttctcgaacgttgaaagcagttgaaccttagtatagactgggagatttcttgatgggaagtaacaatgtagaaatgatcgccggtttcgttttatatgtttagaacagaggagggtgtgatacgtgatgatggcatagacaacgctgttcagagatgaatgtttcgactaagcactcggtctcatctctcagctttcctccaacttccaatcagccaggtcagctagtccttctgcttttctgaatcaccggactgatagaaccgtcgacagtcaacaggtactgacttgcgttccagaatgatctcaaacatagtgggaaggcttacccagaatcattatgaatctaatctaacaaatctccccgcttttacaaacgcaatcgtccacatggtagacatcctcgtggctgcatgtatacaagctcactaatcaaccgcaatcagtcatgctcacatacatttcccaaaacttgacatacaatatctccatgtccatcagatgaccaaacatgaccaagctcataggatgacgatgtggttgtatcctaatctggtcatcttaccgttgtctatgtgttcaattatatagagagactacacatgtgttaacaccatacataactcatctcgtcttccgtctaacaagcatcccaatctctcactctctaaacttctcattatctgagccaatttaacaatgtctaacaacaccgtatacctcagtcagtctttagtcactctgcatgcatctaggttactgctccgctggatatggactcataccatctctgacatctcttgcctccagtcactggtgccaaccgaggaatcggctttagcatcgtcaaagctctcgccagtgatcctggcaacattatctttgccggggctcgagttcctgccaaagcgattgctcttcacgatctcgcaaagactagccaggccaagatcaacgtcgttgagtttgtgtccgccgacacggagggtaacaagaaggcggccgaagagatcaagaaggctgctggcagagtcgatgtcattattgccaacgcaggtcagtccatatcatctctttttatttttatttttaaaactgttcattcgttcaaagcagcctctttgattgacatgcgacgttatgtaaacacccctaacatcactaggtatctctgagcccgacgcctttggacttgtgcatgaatcagaccccgcacagtggaccactcattacaacgtcaatgtaattggagttgtcgtgctttacaaagaattttattcccttctccatgcctctatcgtcgcacccaaattcatcgtcgtctcctcaggtgcgggatccgctgagctggcctttcaattcaagatgcctctcgcggtctacggcgcgtccaaagcggcggtcaactatacgaccgtcaagatgcatctggagagcgaagaatctggactgatcgtgttccctttgagcccaggttggtcccttaacattcatgcgcgtgttcttctaatctcagtgaatgagaaacatgcgactgacttaaacggagggcttgctctcacctttggtatcaggagtggtctcatccgacatgggcaatgcctccgctaagaagcttttcccagatggttcagagaacgcacttgctgcgatgatcatcactccggatgagagcgctcaacacattgtcaagcttgtcaaggaggctactagggaaacacacggaggaaagcattggaactatgacggcactgtcttaccttggtagatatatctatgtagccagtcctataacggttctgtgtacgtgttcaactattccatgatgtaaagtttcgatataaagcgaaagcatagtcattttactcaagaatagccaccggaagatggccctcactcgagtcagtcagagaggatgaaaagtttagatgcgactagataagataagatggtagatagttagggttattcggcgttgctacaacctcggttgcacgcgactaaaagatcaagagttctatgcgccctctaaatcagcacggccatcaatcttatctaccaaagcttcataactacctcctcttttatgtgctctttagtgccactgcatattcaccatctccaagtctctcatgcttcgcatcctgggttgccctcctggctgtcgatttgagcctggtcggacgtttgtacaacaacactgcttacgtaacaagcgtatctgaaaacgggcccttgctaatgctggctagcacaggcagattttctgggcgaggaatttcctttttctctttccttcgaacaaatccgtcggctcaagtcttctttctggtacgtgtgaacatatgttgatataaatgccagagtgaatgaaaggaacagagatgtccaaaaatctttttttgttcgtggtagccttgtttgctaaattttctctatctttttttctctttcgggtgtcgatcgaatttggttttttttctccttgctcttttttaatagccaaaatgcctttcgtcaagcttgtcaagaacgacgcctacttctcccggtaccaggttaagtaccgaagacgtcgtgagggaaagactgactgtaagtgttctgtctcgaaacgttaaactcaagactttcaatagaaatccttactggctttttttttcacttgctcctgcttttagactacgcccgaaagagactcgtggctcaggccaagaacaagtacaacgctcctaagtacagacttgtggtccgattcaccaacaaggaggtcatcgtccaggtcgtttacgccaagctccagggagatttcgtcttcgcccacgcccgatcccacgagctcctcgctttcggaatcaagcacggattgaccaactggactgctggtgagattttcttttctttcttcttgcttgcttgctttctttcttttcctttgctcactttgaatccctttccagcctacgccaccggtctcctttgcgctcgacgagctcttaacaagctcggtcttgccgacaagtacgagggtgttcccgagcctgatggttcgctcgttcttaccgagaagctcgacgaggaggatgcccccaggcccttcaagtgcttcttggatgtcggtcttcgacgaacttccactggtaaccgagtgttcggtgccatgaagggagcctctgacggaggaatcttcattccccactctgagaaccgattccccggattcgaccccgagtccaaggagctcgatgccgaggtcctccacaagtacatctacggtggacacgtcgccgagtacatggagtccctcgaggaagaggatgacgagcgattcaagaagcagttcgccacctaccttgccgacgacattggatccgaggacatggaggagatctacgccaacgcctacgccgccatccgagaggaccccactttcaagcccaccgagaagtccaaggactggaaggccgagtccaagaagtacgccgtcgcccgattgacttacgacgagcgaaaggagaagatcgaccaaaagatcaagttctggaacgaggcccgagccaacggtgcccaggacgaggagtctgtcgagggatccgacgaggagtaaacttactcggtcgtcgtttttcactactgcttttcatcttgatcatgtctttcatgacttttttgtgtccccccgcattacgtctttccctacgtctcacgcacacgagcaaacttgaacttgaatgacacatcgtatacgttcagactacatgcaagaaagagagaaagaaagaaagaaagaattaagagtggggacgacagaaactctgtcgaggacgaaacaagaaaacgtttttctgagtcttggtcggtcaacccgtagatgtcgggttgtgcacaaacatgttctagtctgctcataataagtagcgactttcaaagcaagcagtgggagaggccaaggatcagcgattcaggtcgccagtccgatagagctgcctagagtttcgtatctgggtgaacgaacatgcggttttctgttcttccttacactctgtcggaacatcgctctcgtgtgcgaaaagagacgagacagctgatctagatacaggtacatgtacttagacaagggatgaatacacccctcttatcaagatcgtcaagtactcttcatgaagaaaagaagaacagacagctgttacaccaagcctagaaaataggatctcataaagacacgtttccttcgcgaaaaagaaggaaaaggaggagtagtccagaatatcccagtcagtcggtcagtcagtcaacacaacgagaaaccatccgtccgtcttgaaaccgtttcaagtagaggcgtctggctgaagtgtctctcatcaaggccatgtccgttcccacgtcgtcccgtgctgggctggttacgtatgggtgtggtcacttgcttgctttggaagaactgcttgtatcggacagtcatctaattgaagaaacccaatgaagaatccctaaacgaaggaaagtatcagaaggtcaaaccttgtcagtctaattaataaatctccacgtcatgtaagcagtccggctaggttatctgatctttcattatgtccctagagacaagaagactctaatttctttgtggttagtggtggcagagcagagagtccgagactatcacggtctatctgtccgattagcgactctcccttgtgcctgaagacgagcaagatcaaggtttcgggtgacgtttcttcttttccagctagttttccatcctactttatctctctctattgtcacttcttcttccctgttctcactcgacctccttcacgcctttttctcttgttgtccggaacgaattttgaatgaattctgggtttgttttgaaaagccatgcatgtgcacttcagcatcaactgcaatcccagccccaaccccatcaggatttatcgaagtcgtctgttgaacgcgaagagagatagtgagagagagagagatgacgagacaagaaccgataggatggttttcggatcaaaggaggagccaggggttgtagggtgattttcaggaagcggaaaaaaaacgagcgaatgtttggtgaattgcggattcaggcgagaggggtacatgtcgagagaaagttgaggggaaaaaaggagggaaacaaagaaaccagagcctggtcagtttctctgtatccgaccgagcacaaactcaaacacaagaaacgaaagatttcgagataagtactgaccgggcctctcgctcagactcaaggagagcaaggatatcgtgctctcggacgggtcccttgacgtttcggatgatggatcgcgaagtatcgtcgaggaactcaactcggacctgggtgactcctcctcgggatccggttcggccaaggaccttgatgactcgggcgagcttgacgggctgcttggaagattgagtatcctgttttgcgtgaaccaaggattggtgtgtttgcaggcacgcagaaaaaaaaaacgaggaaaaatcgggcgtcgagaaagaatgaagagacaacggattatcgaccaaacgataaaaacaagaaaaaatcaccaggtttccaaaccaaacgaaatgaaaaagatgactagatcagcatgtgtatcatcaacagaaagaccatagttatccgaccacgagacaacgagagaaaggacatgtctacacgcaccatgttggcgaagttagctgatggggagaaagtaaaacttgggggcgggatcagcaaagggcagaacaagtttgagagggccactcgattttctccgggggagagtagtaactaacctctaggtgaaaagctgtagtgcggactaggaaacgttcgtagttttcgtagtgaatactacaaaacccagaacattctctccacacggccaagtcccgagctgacttttcccaaaggtcaggcgggtagcgatagatgaatgatatccacttaacacagctcctagcttaagtattccgccctggccctgccccctggcggccctagcgcccgtgcgcgtttggccctgtctggccgcccaagttaggaaaaacccgtcgttctttttcctcttcccttcaagaccatcctcaagacagtcaaagtgaatagaaccctttcttctaagttcagccttcgcttcaccaaacacacatcccaaggaatcatcccgacaacgacaaatcgtatatatcccatctttacattttgggtcatgtctcagtagagaacgaggggtgaaaaaggaaggaggaaaaaatgatcacttcgcccttggtcgattggtcgtatggagaaaatttaaatgcaatcggacgacccttcactcgatcgatggagctcataccatcgagagggtcaggtcgtcagcgttgagggaggatgagaggaaaggaggaagaaaaaaaaaccccaaagtcttgctctctcttttacctcgtccgttccacgaacgaaacagagtggcaatagagagggcagttttggtctctttctgtgcatgattggaacggagctgttcaaacatgatggcaacgaaacccacatcggtatcacacattaacgcccctcgcaacgacctcacggacactcatacacacacacccaatacaaacatttttgtcagcttgatttattcccagagcttcctactgacatgcttgcctttgtctattcttcagatggccaagctctccgatcttcgcatccagaagcgactcgctgcctccgtggccggcgtcggtaagaggaagagtaagttcccgatcttcggtgtccagttaactatgctcgtaacgaatggtgttctcagacattgttgtcttttctctcctctcttgttctcagtctggcttgatccccaggaggccgccgagatctccaccgctaactcccgaaagggagttgcgaagctcatcaaggatggacacatgtaagaatcaagattacaaacactgtacaagaaactctgggaaaggtcattttttttctgaaggcactttcgctctctcttttcttttgcagcattgtcaagcccaccgtcatccactcccgagctcgaactcgtgacctcctcgcttccaagcgaaagggacgacacaccggaaccggtaagagaaagggtacggctgatgcccgattccccaccaaggttcagtggatgaggcgaatgcgagtcctccgacgacttctcaagaagtacagagacgccggaaagatcgacaagcacctctaccactctctctacctcaagtccaagggtaacgtcttcaagaacaagcgagttcttatggagttcatccacaaggccaaggccgagaagctccgaaccaagacgtgggtgtttcccttcaaagacctcgttaaccattctctttccatccaactcacccttgtactcttcaatttttttccagtcttggagaccagatggaggcccgacgagcccgaaacaaggctcttcgagagaggaagctccagcgacttaccgagaagcgatccggtatccacgccgtcgaggtcgaggccgcccaggagtaaacttctttttgaagcttgcgttctgtcttacggtctttgtttctctggagtggttatgttatggctttcgtgtaatgcgtaatgtgtctgtgacgtaagcaagaaaagtgacaaccggataggatgtgtgctaactagaaaccagacgtgtggctgactgaacgatacggatgcatgcttgctgaaaccgtagtgggtgtgtgtatctgtgtgctaatgttatgctctctttccttcctatccgtgtctgctgcctttttcactcacataccctgttatatactcatttggaaggggccgattgtgtcatgttactccggcacctgggaagatcatcaacgcagaatctaaaaccccttacggtatcaaacgtgaagagatacaattacagtcttgtcgatcgtcccatgaacgtaatcttgtccgaaagagcatattgcattcacttcccttttgtgttcgcgctcgacaacacaaccgctggttctgatgctgatgctgatgccgtaggcgtagatgtggctctctccaagacatccgttgcttgatgattgctgtcaccgtcactgcctatcggaatgaatggattgttggcagcaggaaagaaggtgaggctgacgctgtaccgatcggcaggtggatatccttgcgcgcagtttattaataattaaattattctgattgttctctctaacctcttttgttctctccatcaatccttttgtctgacgataggattgaggagatactttcatgagtgatcgaggctcgagagcgtcgtttgatatcggatactccttcgtttgtccagatgatgatgctttcatttaagttcttctagtatcggtgattttgaaatcagcatggcgggttcaggatgaagcctctctcttcctcattgatgttctcgcttcccaacgtttgtttctcttcctctttcattttctcttcttttcttctctttcttctcttttctctcggcgttggtctttttaaagcaagacgtcaggtcggcaggccacctctctctctcttcttcaactctcgtctcttttccttccacccccacatatgtctcctttgcctatatcagtcgtcctcccacacagtctgtttgcgaaacggcaagaagcttgcgctctgtcttgcttgacgaccgtgtcagccggttcatgtaccgcccaagacgcaagctgtctctgcccgagttcttcatggggaaccgaaattcttgtatgtccatcgcgttatgtccaaaaaaaaaaagaaaaagaaagatgtaccccagataccagaaaccgggattttgaaatagacttcgaattcaatttctaaagaaaacaccttttacttgttggtctttaacaaatctgatgatcggatagagctgtgtgcaagccacttgcgagactgaagatgtgttacatctggcgtacgaagaactcctcgcctactgtctcctctcggtaagctttctttctctcttctccagcttgcatcggccttcgcgcagacatgtactgatacagtataacctcaggacgtcacattcactcttcccgagccgtcctttacccgatcgtcagccggtttggctaccgcctctgcgtccatcactgcttctgcttccgtcgccgtgtctgctactgtcgctgcctctagctccgcggtcgtcgttcctacggcaattacctcaagtacatcgaccgcggacggtaatgtcgtcgccgcctctggtagttccatcattcatcccgaaccagtgaatgtcagcggcattgtgagtaccacttccgcttaatcttgattcgtgttgcaagaacaacatgcaacacagcaatgcgctatcgatctccgcttatgctttcttcttcttcttcgatctttgtgcgcgacagatggcaggggtgtgctccttgttctttgcaatcgccctcgtctttggatactttggcgttcgcgagaaactccgacatgacaaacagcacggcggatctaggtcgagagacaactggcctcgaggtccagtctcgacagataaggaagaaagaagatcgcccggtagctcagggaatcgaactgcttcctcagacgatcaatctcaacgatccgaacagccagagatgagctctaccggtggagtctcgacctctgctttcagtcttgaaccagaggagagctgttccgatttggatctcgagatagaggagcgccgagccaaacgtttgttcatttcatccattcatccattcattcattcattctttctttctttctttcgtcaccttggtctcctcggttcctacatagactttacttcctcgtcttagaaacttcctttttctaacgttcctcctttttcctccctctcctcagtccgacgagttcgactggaaagagcggaagcagcggacttgatccgtcgagaaaacctgcttcacatctttacgtccgctccctcgttagataatgcctctccgacatcaacgacctcttccgcttcggtcgcttctccggatgcgtaccggttctctgtcgaccaaagcgttgacgacaagaaattctctctggggttcaccgcacttgacgagaaagaggaagacgaggaggaagatcaataccgacttcagctccaagggcgcggcgaagacgatgcggaagcgcaatacgtggatatgccctcagcgagggattcgaccgtcttggatccgttcacaccgacgagcgttcagtcgaccgaagccgaggatggtatagaagatggtccgagaacctcaggagaaagtccatggttggtggacagaccgttgccaacgttgaaccgacagcggtagtagtagtagcagccgtagccgccgccgtcgaccaagtctctgaccgggttcaagtcaaggatcgtctagacaagggatgggcgcaaataatgttaatagatcacctccttctctcttttttttttttttctcctttcatttccctctgccacatattcgttcgtctttggttcctcttcctttcggatttgtttgtctatttgaattcatccaccaatccttgtccatcgtttgatgtacataccatcatcgtcaatatatacgtgttctcagagcgggcttcactcgagtgatgagttttcttacttccgtcttgtcgttgtttaccataagttgttgtgtatatatcctgtatctgtcttgttacgatcttgggtcctttcattattttttttgtatgtatttactttggggcttcatgttagctttcacttctggttctacctttgcttccacctttgctttagcctctactttcgctttcgcttctgcttctgctcctaatttcgattctgtttctgcttgtcctcgatatggatctggccatctatagcgagatcttgaagatgaaacactaaatactaaacgaggggctcacagagaagaaaaaaactccaccctgaagacgaaagtagggtaaaattcagtggctctgagctagtctagacggacgataggaatttctgcctcgtcttattcaaaagctgagatgtcggtttcattacgtacaacaaaagccaaagatagagacaacgcgaaacgagtggtttccttgtcgctcgatatgctcggccttcacagaaggttcatcaaaccatctttttgcttaatctaggtttaaggaagatccctataagatgagtatgtgtctgggaaacgtcaagacataaaaagatggagagctcattaaagaaagacctttcttcaacgagaatgtatttaaaccaaccggttctccaagctcgtctctcgagaacagagagttgagaaggggtaaacaggttttttatccaaaggagggagccgttagacgacaaaagattatacaatttgtagaaaaagatgaaaaggcggaggaagagcgagggaggggagatgttgatagagaattgaaaagaaaagatgacgacgggagggatattgaaaacgtagaagagcgaaagagaccggaaaagacacagaagatacaggccatacatgacaacacgtttacgaggtcatataagtggtagggtcgatgttctcagggagctcctcgaccttgacctcgaatcgagactggatagccttcaagatctcctggtcctcgtcactcgtgataaaggtgatggccaatcctcgggtaccgaatcgtccagcacgtccgactcggtggaggtaagagtccgcatctccagtcatgtcgtagttgataacgacgtttactcgctcaatatctgaaatcgacattcagaacaggaagaaagatatcttaataatacgcccttaaacaccgtgctttattaagaaaacctatactaaccgatacctcgaccgaaaatgtcggtggcaaccaagattcgcttctcgaaagccttgaactgtcggtatcgttcgattctaagagatgaacaagccagataaggatgtgtttagatatacaaatgatttaaatcctgacacaaaagacgctcaaccagggtgagcgtagacatccacttaccgctggtcctggctcattccggagtggatacagatggaagggaaactgcagtcctgcaagagcttgtccaactgatttgctcgggcaacagacttgacaaagatgcagacctgatagtatatggatccaacggagatatcagaattggaagagagtaggtcgaagaagacatgtgagacgcgtttatggacgaacctggttgaactcaagcgagtcgagcaagtcattgagctttcggttcttctccttctcctcaagcttgacgtagtactgctggagaccgtggagcgtaagcttggtctcatcatcgacgtagatctccagtggctatgcgatcagaagcaaggagagaaggattcatattgatcaactgtttttctcaaagaagagaagcgacagcactaaccgactgcatgaatcgcttgcaggtagctcggatctccttgctgagagtagcggagaacatcatgacctattaaagaagcaggtgagcggtgatcaagactcagacatcacgatctttgacagaagcgtacctgcttgtggtgaggggtcattcggaagatctcctggacgtcacgtcgcatatctacaccatcgatcgaaaaagcatcagtactggagcacatgcattttgcttgaatagagtataaagacaaacataccaagagactcgagaagcttgtcacactcgtccaagacaaagtgcttaacggtggctccgttaagagccttgtctcggacgagggcgttcaatcgaccaggggttccgacgacaatgtgggggcacttgtccttggacttgagcaagtcgacatcgttcttctgttgggttccgccgtagaagacagaggttcgaagttcaggcatgaactttgtgaatcgggcgtactcattcttgatctggtaggccaactctcgggtgtggcaaagaacgatgacagagacctctccatctacgggctcgatctgctggagagtcgcaaggacaaagacggcggtctttcccataccagacttggcctggcagagaacatccattccaaggatggactgaggaacacactcctgttggactaggtgaataaaacaagcgagatgcaaaagaggatagacacaaaagaggaaaaaggggcaggcaacgacgcgtccggaaacggaatggttagtttgacaaaagtttcccggcctggtaggtcctgattatgattagcaagggaagggaaaggaaagttaccctcagaggggtgctcgaatccaagatcagagatagctcgtagcaattcgggcttcaacaagaaatccctgtagacaagcagaggagagaaaaaaaaaacaagattagttgctgattcgtttcttcaaacggctctttgctagacacaacctggacaggcatatccaacggcgaaccaacgataagaaggccaacgtacctgaagccagtagagtggattccaacataggatcccttcttgtccttgtcaccatcggcagtcaactcgctggtaggctcagccttgacctcagggacgatgacctcgtcctcctcgtaatcgacaagctcttcgttatcggccatttttggatatatatatatatatg

SEQ ID NO: 2726 - DNA, 8038 bp, Xanthophyllomyces dendrorhous
atatatatatgtgtacggttgaaggtttctaaataggatgcccgttcgagaacaacatgtttttttttcgagaccagaccgaaaacgagcgggtgtgtgtgagaaaaccgaacaacaatttatttatttcattttaaaaggggaagggccgccgaagagatgggacggattcaagggtctctgatagatgggatccttccgagcagttgacaccggacccattcgagaaagaggtcgaaggatccacaaccatcgtctggagagacagacgtgttctttgatgggaaaacttgggagatgagatgggacggaaggcgattcttacaagacttgggttgttgctgggttctttgatttcctttttgggtggcgacaggaaaaaaaggaagaaagaaaaaggcgagaggcaccaggggcagatgtgcctgggagatcacgtggaggtttggtggttacgcgtgggagttacgaacgcgtgggagttcgcgtaagagttgacctgattgtcgcgtcgcgtcgcgttgcctgatcgcgtgcatgtcattcaacatgaggagaccgacgcgtcattcggttcctatcctcccttcatacccgttctcaccgtctgtttcgtcagttccgtcttgaaacccttacccgtccaggcggactcgtcgtccactaacatacatacatacagacccgggcacatacgttgtcgcatcatcagcatcacgctaccaccccatcgataccctcagtaaacccgatccgaatcactcaccacaatgtctcgtccagccaaaaggaagcccagagctacactgttcgcagtttcctatctcttgtgtcccttgtctcttgtcctggccatcggattcactgacatttttcactgtctgttccgctcttaggctcttgttcgatcctctgaactctccagtcaaacccgtggctccccggaagtctccgctttctttgtctgtattcgccgaggaggaggaaggagaaggagaagaagaagaagaggaagaggaagaggaggaagtaacaagagagctcgcatcccaagatcgcgaaggccagccaggtctattcgcccaggtcgacaactcgctatactcgatctactctgatccatcttccagctcgtcccttgcttcccattcttttccttcttcccactctggatttctcgtcgatgtcggctctccggagaaacaagggtcgctcgtaggagatctcattggagactttgacgaccatgggatctcgcgtaccagatacatcgacgaaaacgaggttgactcactcctgatgagcttggattctcccgtccagtctaaaacgaccgacaagcccggtcccgatcgaacctcgtcgatggagacacccgtccggacgaaatacgcttcgcaaccctcctttgattctccctcgacaccttccactgtcatccgtccttcgcactcgaccgagcggccttttgctgaatcagtgcgcgccgagattccagacttcgtgatggctacacctgtggttcttagaactaccaggacgtcgtcacctcctcacaaatcaaaccttgagcttccagaaccgggcccctcagttcaatctgctgacgcatgttcagtttcacaagatgcgaacgagtctacctttgctcattcatcaaccgagaattcttctctcccatcagtacacaccatttctcaccaaacaattaatccttgggaggtcccccttccgtccagtccaccttccgaactgttcttcttcttgactgcccctgataaacaaagagacgagggttctctccttctggaccctcctcaactcccacccgcttcacgtgctcccaccccatcattcttctttgacgtcacagacacgtcctttgacctcctggccgacgcaaccctacccgaaggcctctctatgtctacactcagagcaccatcgccaatgctccacgcctctcaagatctcactgaagaaacttcgttcatcatgaaatcccctgcgacatctagaagtccggctcctaaacgaccagacggacgcgctccgtccccttttgcggactcctcgttcgacttactagacgaatctttgccggatattccaccagaaacgtcgtttgctcttcctccacctactccccgatcaggggcggctactagatttacgcacacccatgcggctctgctgagtactccttcccaagctactccgacagcgccttcaaagatccaacgcaatccacccccttcttcatctccattgtcgttcactcctcggggtccgtccatcaccctgtcggtcccgtctcctaatcagaaattcactcaaagggacgctctggcagacgaaggggacaccactctcaatctggacgaccacttcaaaaatgaagatatgagcttctgtcatttgcctggaatgagccttgaattggatggagaagacgatcggtgggacgtctcgtttgcaggctttgcagctcaaacacagaagaaaaaatcttccgtctcaaacgatctagaagctaggtacgctcttgttcttttacctacataccttcccctttttgatataactatactcaccttgtttctttccctattggattgaccgtgccattctcttcttccgacgcgtatagtcttgctccctctcgtctagctctagctaccgctcagcctgatctcttgactgcttctctgcctcctccagaagaaacagtatctcatgatccgtgggatgtcgtgttcgtccatgataaggcacgagtcaaaggagagagctcaaagccttccctctccagtaagtgacaacgaagcgtctgtctgattaagatggcaaagactagcttgactgactgtagacacatatgatcacaccgttcacagcgtcgacttcttcgaactcctcaaccctctcggcttcttcgtctcgaactgcaaccttagcttatccgtcctctcaacgttcgatcttggctccgaccaatcgagaggcgccagtcccacacaaacgaactccctctttgcctcgagagaattctcgacctccatcctcctctacaaaaattctcgcacccagtgcgcaagcaactcctcgacctattcgaaaatcgccctccatctcttcgacccttgactttcaacaaacccctcgatcgagcgttcaaagctcccacggccgatccaaatctcttgcgagccatcctcaccttgattcaccttctttgaccgagacacccattcactcgaaaccgctccctttcagcaggctaaacgtccgactaagcgcggcctcctcccccaggactactcgagatgcatcatgcgagaaacccgtttctagagaagaacccgagagaatccaatcaaggataaaaccttcggcttcgataggatctcttgctcgagaagcccccggcttgccgtcgagtagatctagctcgatatcgcgatctgcgtccggttcatctacgctcaaccacacgcagcccatcaaaccatctatatcgacgccttctgctcctagacgaacgtctcgtcctgtctcgacgcctaaattctctctcacttcatccatccagccagctccatccaaccctcctcctctcaccctacgcccttcggcctcggtgtctctggtcccttctcgatcgattcccaagccttcaatcaaggctgccatcggcgcccagccgggcacaactgcagctggtgccccaactaaggtgcataccatagaaagtatcagagcagctttggctaatttagaagcgagacggggaaagcattgagccaggcttgtggtatgttatatatgtttattcctagagaaagaaagagagtatgtgtaggcttgtgtgacaaccgttgctagggttatgagtgctggcaaacaatgaccaaaagaaataagaagtcatctctcatcttatttcttgccttacgaccatccatctctgcctttaccttccttccttctttcacttcctcttgtttgtccaaaaatgaagctttatatgcttcttctaggcctggccctctgtctgacgtctgtctgggcgtgagtttcttgtggataccgtgtttgaacgattgcccgtcttgaaaacgacgcgactgacctcaagctccatttctttatcgtctggctttcgacagttgggacaaggagtaagtatcaagctatcccttacttctgaatgtacttctcgtgaatgtctgttgccagcaagactgatccttatcgcacttcttgggcttccctacttcgatcagtgaccatgagatctttgacatcgttgccgctcttgagaaggctgagggttcgtccttcatctgtgcttgtgttctatatcagcttgaccttctgtgtttgacttcctatatgcttcgaactgtctccgcatgtaggcaaaggaaccacgttctactccttcctcgatgtccctccctctgcttctaagaaggagatcggaaaggcttatcgaactaaatcggtagctatgcagtcagcattcttcatttgctttgctggatggctgtgaacgaagaaagcaaactgaacttgacgatcttgctctgatcttagcccggataagaaccctggagacaagaccatccaggatagatttgccaggcttggtgtgatttccaccatcttgagagatgatgccggccgaaagcgatacgacgtaagctcctcttttcttcctctattccatcccatcttcaccaaacgggacacattggaaaaaatcgggtttgcgtcgatggtcagagcgctgatgactcaatcgcttggggtttcttcagttcttttacaaaaatggagttcccaaatggaaaggttagttgcatctgattttaaacggagagagatcattcactaattgtgggtttgctcttgttgggtctgtcgtcctttctcaggtaccggatacttttgtgagtcgattgcttttccttccttcattctgttgatgcaaacatttttgctcatgacttaccgttcacttctttttgtctccaaccttttctccagacgctagatggcgacctggattcttcttcactgtcttcttcctcgcgctcgtctcttctggcttccaatatatcttccagaggatgaaccacagccaggacctcggccggatcaacgatctgatctctaaagctcaactggccgcttggggtccgaacgaaaagttcagagattcgttcgcgaggaaaaaagtcacggtccctgttggaacggcgggtcgacaggcagatctactcgtcatgcaagatggggatgtgctcatggtacgtttcctcatctttgtccgccttatctactctgtctgtttgtcctctcgattaataatgaaggaacattaacatgaatctattctccttgcttctcttcttcttgtccttcttcagctcgaccctcctaatgaacccacgttgctttccgcttcgatgctcgttcgaccgacatacgccggcacttggcccgtcgccctcggtcgatctcttggagaaaagtttggactgatcaagcctgatcctaatgcgaccgtctcggagtctgactctgaggtcgagctatccggggcgtcggcgtcagacggagaggttgttgccgagtcgagcgcagtgtccactgggaagaaggccaagaagggaaagccaaccaagagacggtaatgaaccaggaaagagtcggtcggtgcattcaaacaggaatatgtcggtggaaagacagaagaatggagaggaagaagaaggagaaagaacatggcgtgaattgcatcctctatttttactcgagttgatagatatgaagattcggcttcctttttctagcgtctccggcgctcgcgtctggtgagcccgactgggctttaccgactgtatgttccgtatgatcatacacgtcggctacgaacaaggactgatgaacggagaggggcactagttgtcgagacattcattcttgaggcgacatagattcaaatctcccctctttacacctgctctgtgatgaatgaggagcatgataaagatcaagtcggtctcatcgcggtcgaccggctggacgattggagaatcgtcttcaaccatccaaagcgttgcgcacgtcttttagccgagcttgaagctctcgatggcctgccggaccgatgaaccgtcccccgccctgaccaccaaagaggatttggagaccagagtgaatgtctgcccattgacctttgctaggcggtttccctgtagtctgtatatccgtccagaaagatacttgggtaggcaggatcttcgtacggacgtacgatgccgagggtggagtatacgtttgcgagccagacggatccttctcagccaaacattgcgttgaaagggacgaagcctttcgaggagcgtggacgctttgagttgtggaggatgtctgccaggccgaagcggcgtcgtttgagaaggaaggatgaggaggtgaaagtgaagactctgaggattgtaggatccgacctagatcagaccctcgccagccaccatgttcgtttccccatatccgcctgagagcctcgaaacaggattcaaccggccaatcagtcgtatcggttgacgatagccctgcgttcaagatgatggccgggttgatcatcgaaatttgacagagatgtcgttcgagactggaaggcaggaattgacataaggtttcaaagagcatgaagaacgggtttgacgaatcagatgggatgtctatctccatcgacttcatcatggctggctcgtcagaagaggaagatgtatagaccgggtgaccaggaggtgatgttacgggtgatgagcgagcaggcgcttgaacgcgagccggaagagtcaagccggaagacgtgaaaatgtctgccaagaatgtggtcgggtctcgagataggctagaagtgttggtagtttctaggccgttcatctctgccttgagcgctaaattgatatcttgtgtccagaggatcagccgaagggtaccatcgagagaccttaacgccgactggaggatccgatcatcattcgttacagactgagagaagcgcagacaggtaggcatgcaggcgggcagacgagcgggcgaataacaggcaagttgagcgagagaacatgacttaggttagcaagtttggatctcctttactgactggatcaattgttctgtcaagctctaaatcgcctctgattagtcctataccgattgattctgttcgttcggcccgtttcacatccaaaagccaacggttagctctctgggcaagatatcctacggtgatggcatgggtcgatctatctgtgccgggttgtccgggtatacgagactgctgaaccagcttggtcgaagacttgagaccgtccagctcgcgcaagactgcgaacgggatgaggaacgagatgggcgagggctcggccggatacatggtgagcacgagatgatggacggaccggaggagcggtagctgagaaaggatcactgcatatcgaaggatgaaagagagcccagatcaagctgagtgtcagagcatcgaaggattgaagagaacagcgaagatagcatgctcaaaagagccggacggaccgttggtgtccagacataacacgatgtaaggtttctagaagggtgaccaaacgttcatacatgctcagtgcgccggaatctcggagatgaaacaaagaaatggagaacagaatggcatgctacctgatgatggtcgtgggattttataccccagtcgtcctgataccaaccatgagacaatgcagtccgctgctcgcattccttatggagtgatgatggagaccaagcatcctctgtgacggtccattcgatgtccattccgaggtcgagctcgaggaactcttcatctttgccgtctacggagattatgactgggacatcgtgtgtagctgagaaaggagaggtgacagggtgtgtgaatgcgtatgccatgtgtgtgtgtgtgtgtgtgtgtgtgtgtgtgtgtgtgtgtgtgtgtgtg

SEQ ID NO: 2727 - DNA, 6410 bp, Xanthophyllomyces dendrorhous
tgtgtgtgtgtgtgtttgttgtgctctatcttcttgtcgtcgtcgtctgatggtgataacgtcaaaggtcaaaagaattctgacgtaaacgcgcgaacgtcatcaatctctttttttgtttcttcccttgccgactcttccttctcttgtcttgttgccaccaccatcgttaatcgataaacagctatagagaacataatgtcagagacagtcatcagatccatcactcccgccattagtatcttttccgttcccttcaagcggttcggtttgatgaagatgtaggcgttttttcttttcttttttttcgcctttccattctccgtctctctttccgataactaaatggatctcgtttcctttcttctcacgatcgatcggaccaaaaaaccacttccgacagtggtggaaggagcacagcggtcaagcttgcgaacaatgacattttcatcatcccatcctctcctcttggagaagatgtcaaggccgagatcgctcggctcggaggacaggtcaagtaagtcccaatgaaattcgatcgtgtgggtcggacatgggtactgacctcttagtctggttcgattttcttcctggtcttcaaaagatatctggtagctcctgactttgagttagtgatccgtcgtgtctcgtgttttctgctttgttctttcttgcgcgggtcaacggatgaatccatatgctgacaccgggattggctttcccgtttgtctatagacacaccatgttcaccaaggtttactccaaggagtacccgtccgcgctctgcattggaccagagggtgtagacacaaagattccagaggtcaaatgggccgggacgtacaagacgaacggactggctggggccgatgagaaattcggatacgaagacgagatcgagacctgctactgttagtttccgctctctgatctctttttcctgaaaatgagaagaaaggtctgctttgaggtcgacctgtctgacgatctctcatctttgcactgtcgatcccttccgtcttcatccacaccttacagtcaagagccacgccaacaaggatatcgcgttcctccacaaaccgtccaagacgctgatcgaagccgatctgctgttcaacctgccttgtcccgagcagggtattcctgcgggtggcctgtttggtttcatgaacatctcgcccggaggtgcagcccatcgaggggtggtctcgatggtctcttctgccgacaaaaagctttacggtcagtctgcagccatcgttgccggctgggatttcgacaggatcatcccttgtcacggagccgtcatcgagaccggaggaaaggaggcctgggtttctaccaacaagaacgtcatcgatgccgcttccgcttgagaggcgaaccgttttttgcttctttttttttgtttcttttccttttccctttgtccttgtacagggtaagagtttcatcgcgtcaagggttgaagaggtgagagctaggagggtgggagttacgattttttttcttctttttgtttggttccctcttctttcttgtgcgtgttgtgtatactctagttcttatgcgatgtatcgtttgttgcatctgtctctatcgacctcgatatgttcttcccgtggacgcagtgaaagggtcccgtgaagggtcgttccttgctcttttgctcttatgctccatatccagctcgagatgaaagaaaaagaaatccaaacgaacgatatgccgtttttaaggggaaaaacagggtagtttcttttgtataagaacggttcgtgatgaaccgattcggcggtagcgaggggaaaaaaaagaacaacaaagggggagaagaaagtgagaaggaagaaaaagaaacatgacaagagggttggaagtaagacgaggaaagaggataaacggtcgtagccgagtgaaagaagagtgagggaggaaagcgccctgcgcctagcgtgatgtcaaacgaaggaacaggaggaggagcaagggccaacgatggggaggaaaacaagttttagtttaaagattttacttgattcgggagaggatggcctcggtgaactcggtggtcgaagcctttcctccgagatcaccggtgatggtctttccctcggcgatcgtgctgagcacggcgttctcaatgttctgagcgaccgagtcaagcgacatgtgtcgaagcatcatcaacgacgagaggagcaaagccgaagggttcgccttgttctgcccctcgatatcaggagccgatccgtggacggcctcgaagatggaggcatcccgaccgatgtttccggaaggagtcaaaccaagacctccgataagaccggcggccatgtcggaaagaatgtctccgtacaagttgggggaaacgagcacggtgttggagaagggagcagggtcctggaccatctgtgatagaccaaaagtcaagcgcgacagggcgatgggatcagacggtctgttcttggatgtgcggtagacgagagcagaaaagaagaagaaacgcgtccgtcgataagaacacaggcacacgtactcggaggcagactcggtcgaggagatcctcatcgtaagcgacatcggggtagtccttggcaacctctcggcaggcctggaggaacataccatcggacatcttcctgtagatggtccagatcagaaacaatagagagcgtcagaccgtgtatcccttgggtcacggtggtagagaagaacagtcaaagacacgcacataacggtggccttgtggacggcggtgactcggtttcgaccgcagaccttggcgtagtggaaggcgtatcgagcgactcgctcagaggcctcgtgggtgataagcttgatggactggacgacaccggggacgagctcgtgctcgattccagagtactctccctcggtgttctctcggatgaggacggagttgacgttgtcgtacgcggtcttgtaaccctcgatggacacacagggtcggacgttggcgaaaaggttgaaagtccgtcggagggtcaagttgagggagacgtgtccctttccgactaggtgaagtgagatgtagcagagagagagagaaaaggaaagaggttcgaattccggacttgtcagcaacacctcaaagccgtgtacatgtatgcatcagagacgaaccaggagtggcgagaggtcctgggtatcacaaagaaacatatacaacattcaggttagggacgtgatccgatccgatccgatccaatccaatcgaaaagaggcagaggcaaagaaactcacccttcaaggcaacggtgttcttcttgatggacttgatggccttctcggggatgacggactttccgttgacgatgatcgggttaacctcgacctcctcccactcgatgggagcctgagaggatgagagagcgagagcgagcgatgatcagcaagagaaacgtaagggaaagaaagtagcaagggagagcaccgaccttggcagccttgaagatctgcttaacagactcggcgatctcgggtccgatacctgaaaagaggaacgatgtgagtttctagtgacctaagaacggttcagacaaagaacgacacctaccatctccaggaatcaaggtgacggtgtagtttccctagaagagaaggaatcgcaagagaaaagaaagagaaaaaacccgtgtcagttggattgtgaatcccaattgatgtagttcatgaacacagttgcttaccctgtcgttcttcttggcagcgaacacactggtgggagctccctgaacggtggccgagttgaaggcggtagcgtatcctcgggcagggatctagaggatgtaggtgaatgtgacaaaagcagaagcgttcagtcattgtctcatcatgctggtcagatggagaggctgcagagaaaaaaggcgaggaaaagatcctgattcaaacaatttttgtcaaaaaaaatattcctgaaaaccccaaccaacactcacagcagagaacctggcggcggtgttgaagatagatcgggaaagcatgacagagagagtgggtgagagagagagtgggatgaagagggtggtagtcgaacggggagatggatggatgggaggaaaaaaaaggcgcgcccaaggcggagaaaaataaaaacgaaaaataaaataaaataaaaattaaaacggcttaaacaccagcacagatgagatctctccgatgagacccgatgcgattttagatctggtctgtggaacgacagagggcgcatatatccatctgaattacacagaaatcttcggttgaatctcctctttcgactggtggtagttgaacctgctgaaacggtctgtgaaggatacgggagcgcatatagtcagtccggtttctggatcccacacacggaggacgacagaaatgtgcggtcaatttcgcgccggattttttcctcctttttttctttttttctttttttcttttcttttcatcctcatcacttccatcctccatcccatccctcatcccatccttcatcctcactccatcctcactcgccatgttcagagcctccctccgacagaccacctcggtcgcatctgccttccagaaggctaccttggtgggtgctgatttttaagagatttttctcggtcgatagagtgatttctcttctactcatcaagctgatgagatggtcttgatgggtctttttttttttcttttcttttttcccttcctctttcctctgttctttcctgctcttctctgctccttcctgttctctctcgtcgttctctctagccctcggtcactcgatcgtacgccacccttccctcggtcacctcccgagtatgtcatttgttcttatcctctttggaccgcgtatgcctcttagtttcgagaaatacagactgatcggtacacgactccttcttctttctctcctcgtccattaaagggacccgccaagtacggaggagtctacactgtgagtgtagcgacgctcgtccaactttgtctgattttgagtacatacagcttacctcgatctcgcttcgcccacacaggtcaccctcatccccggagacggtgtcggacccgagatcaccgactctgtgaaggagatcttctcgcacatcaacgctcccgtcgagttcgaccagtacaacgtgtctggagagaccggtggtgatgagactcttttcaagcaggccatggagtccctcaagaggaacaaggtcggactcaagggaactttgaccaccaacgttggacccggagagcacaactcgtggaacattgccatgcgacaaaagctcgacatctacgcctccgtcgttgtctgcaagtcccttcccggtctcaagaccagacatgacaatgtcgactttgccatcatccgagagaacactgagggagagtacgccggactcgagcaccagtcctacccgggtgtcgtcgagagcttgaaggtctcgacaaagtacaagatcgagcgaatcgcccgattcgcctttgactttgccgtcaagaacggccgaaagaaggtcacctgtgtccacaaggcaaacatcatgaagcttggagacggtctcttcctccgaacttgccaggaggtcgccaaggagtacgagtctgccggtatcaagtttgagcagatgatcgtcgacaacacgtccatgcagcttgtcgccaagcccggacagttcgacaccgtgctccttcccaacttgtacggtaacatcgtgtccaacatcggtgccgccctcgtcggtggaccgggtgtcgtccctggatgcaacatcggtcgagagtttgccttgttcgagcccggttgccgacacgtcgccaaggacatcatgggcaagaacgtcgccaacccgacggccatgattctctccgcctcgttgatgctccgacaccttggtctcggagatcaggccaacagcgtcgccaccgccgtctacgacgtcatcaaggacggaaagatccgaactggtgacatgggtggaaacgcctccaccaaggagttcacccaggccatcatctccaagatcgactccaaccgagcttaaatctaatctgatttcgttcaagggttctttctctctctatctctccttccttctcttctttcatttcccgtaatcccttcgatcaactcatcattttatgtagacgggatctttttcttttcattattattgttgttgtttcctctcttatatccttcctttccttttccttccgatgggttcatgttccgcccttctgccttctacctaccatctttcctctccctcaccaatcctcccccatttccttcccttttttttccacgctcgaccttttacctcgatctggagacccaaaactcattcggaaggctcgcttctccttcgcttatgagatgatgaataacaaaaaaaaaacaaaaaaaaaaa

SEQ ID NO: 2728 - DNA, 620 bp, Xanthophyllomyces dendrorhous
aaaaaaaacaaaaaaaaaaaacggcaaagaaagaaacaaagcgcaaaacaaagagtagaaaaggatgtgtggccaaactctgatgtttcatcttgaatctttttttaaaaagcataacatatttcatctctaatccctgatggccgttccaactcactcgggtaccttctcccctcccttttttttcttttctttctccccctcttgtcctggtgaactagaacgatgatgatgacgacgactgaatctgcatctgatgaggctgacctcctggccactcgaccacatcactcacatccatctctctcacctggttatcgtcatcgtcaaacgtcaccagatatttagccaaaccggtaggtttcgccttgaccgatccccggacgacagctttgtagaaggaagtcgtatcgggaaagatggccatgacgaacgagccgaccggatggggcgcgtacgcgttcggatgggatggatggttggcaggcaccgtcgggtcgggtagagggatcaacgtcttgaacgtcgtgttcgtcagactttgaggagggagcgtttgggcagacgacctcggttaggatcctgagagatgcaaaagaaaccccccccccccaaaatat

SEQ ID NO: 2729 - DNA, 19986 bp, Xanthophyllomyces dendrorhous
tatatatatataacgagaagaggaactcacgaggcgtcgtctacatcttggacttcatatctgtttgaaaaagagacatgatggcacaggaagaacaagaacaagaaaagaaaaggaagagaccgaaaaaacagacccgttagaatgctaactgagaggtgatgaaaggacaagcagagccagcgagctctaccgaccagccagtcaaggaaaaaaaaagacaagcagagacaaagaaaacaagggtctacccaccgattggtatcctgatgtaagcacctcttgacgacggccagaatccaaccctcgccttcatcgggttcatccgtcctgtcggcagccgacacacccgccggtttttgatgcatcttgaaagcaaccctcctaccgggtgtcagcggtaattgtgccgcatatgtctgtttgcgctctcgagaatcacgtttcgaaaatggaacaggatgactggccggaatccgaggatgtgtcgacgtagaaccggtcgaatcaacagaagaagaggatgaagaaagatgatagtttgagccggcggtagatgtactcgggttaccgccggtcaaatcggcgttggcggcagcagcagtagatgtattggagagatttggaggttgaggagattgatgggttgatttcgtctttaactttgaggaaaagtgggacactccggtcgacggtggggattctgttcgaagggcaagcaggatggacaatgattctgcggccgattcataaattctagattgatttcccccaacccaaagcaacacatgcacagaatcatcagtccagttcacaaaggtttcttcctcgtccttccttgacaatagaagaaaagaagggaaggaaagggggaagaagaaagagaaagagaggagcatctcggacgtactgaagctcatgtctcgctatcctttcttcctcctccaactttctcaatgctagatccctcgatgctctcggaatttctgaatctgttcctccttcgtccatgatggcctgaaaccttttgtgcgccgagaagtcctgttgagctggtagagcccggagagtgctcacaatttgactccataggctcgcgactaggtttgtaaaaacgcatgtacatcatcaagttagaattttgtgaaagtcttgaaagatcaaatccgacgggctcacgttgttggttatctgacggacgactatttcgatttgatctgctcatagggcgaaacagtgaaaggagagaggacctgtatagcactaacaagaacgacggctgttgatcaagaaggcaaagaatagacaagaggacgactaaaatattggatgataatgatggtgatgatgatgatagttcggatggaggtgatgaccgttatcagttcggtgtgccatcagattacgcggcagcttgtagatcactcattgacccatccttttatttggcctgacaaacctatacatatgatcgactataccataatcaaccactcaataaggagcaggatgagcagagatatgggaggatacgaaagaaatgtaaagcagagagaacagagaatatatcataaatggatggaggaaaaattgttcaaatatcgcacgcgcttcccaacaaaataactaaagcctaagaaaagcaagatgctatcaacatggtagagaagaggcaagccgtcgcgaaagagagatttctggaaagaaaagagggagtgtacagaacagcgaacgatatttgtacatgtggcatgcggatcaagacgttgagagccagagggtaagacatggaatcatatgaaaatacaaaaaggaactggaagaagtcgaagacagaagggtatatagaatgagagtgatcgaaagcgagaacaagaagtatagcccacggcgggcaaaggatacattaatggttgatgtcagcaatagagagagctgccataccagagcatccacacaaaacgcatccacacacatgcacgataaccaaaaacaagtagatgttagcaaagcgaacatcatcctaaataaaagtagataacatgtccttacagcttctccttcgtctcacaacccgggtcttttctgcaagcctcgacagtacaccggttttcgtgctggatgtcacattcagacctgttgacgctcctgcagatggtccggcgaacgagcgtttcgttccgagcgaaaacgttggaagcttagaattaggagaactaccgaccgtagcggcagaagctttcgacagtgatccactccgtggagtaggagacccagggagcttccgttctatcactacgcttcgggttactctcgactctgtagcaggcacgaccttcggtctcgatcttgacactggtactgcgatcctcgagctcgacgccgcggcaactcgtcggcgcgcacgctcttccaccgatgccgggttggactttttgctgggactcgaaggaggtagcgtaattgggattgaaccgttcgttcggttgatgggttgtcgagtgggtgaaccaacaagtggccccactgatgctggcttcatccgttgagatctgtacggatcaggtggaagtcgacccagcggatcgtcatccatatcttcctccagagcggtcgctgtacgtttagcaagaggcgtctgcagagagaacaatcgagacgtcaaacacaaatgaagaggcatagttaacatcgagggaaaaaagctgttggagtttattgctatacaagaggaggctgtacctttcgaggttgaagaggcgggctaatgttatctgctgttcttgcatgtcgacaaggggtcacgttcggtaaattgtgcaaaggccttcgatcaccatcagaagagtttggctcattcggcggtgtcagtgtcctggaaacattggcgagcgcggatgaggcacgttcggaagcctggtaggcagctaccgctgcgtccgcggcagcccatttgacccaggtaaggtgatttaggaggatgtattgttgttggggctaaaagataattacacgatggatgaatggggttagatcctctcggtcttggatgaactctttatgatatggaaaatcttctaagaataagatagaacttactcccacgaccatgccaggctgcaagaatggaaacgttagattcaggtcagtttgcccacagttgaacgagagaatcttgacacaaccaatggacttactcggcagattctcatgaacccaattgcttctgtagccgtaaagtcgtgtcgatagaccaaccaagctgcgatcaagcatcctgtacgaccaagccctgccttgcagtggatcttttagtaatgacaaagagaatcagagatccgcgcaagagagtatattcaaacgaatataagaaagctggttcttcacttactgcaatgacacccccagcagatatctaaacaagtaacgacaacactcatgatcaactcgtgctgtctgacacaagagcagcgaggagataggaactaaatatgggatttagaaaagcagaactaaccactctgtcggcgtctttcagaaattcccgaaccatctgttcaggcgggttcgttccgtcgtcaaaatctacagaacataatgattcacaaaactcagtcgaacgccgacagtttggatgaccaaacaacttatgcatgcacaaagctgaacatacacatatccttgaattccattcctctcgactcgaaatcttgcttatcataaagagggttgttcaatcgaaccactagctttacattgtggtcggcgaagtagttcaacacgttggtgtaagcgcgggccagcttcttggtaggaaaggaggaaactgatttcggatcagtcaaagaccgaacgtagttgttgtctgtctccaacaaaaaagaaagggtcagcgaagactcgtttcaaagaacgaatgattgacaccgaccttggggagaagcgaatgctatgaaatctttggaaacatgattgaagtctccattttggacttgctcatagtatagatactcttcttcattgaagtcgtctatttgatgatacaatcaagtaagtctaagcgaagtttgttgagcaagctcttgtcgaagtactagtcctcacctagtctaagcagcccggcgttgagagctttccaaacgccataaaggcagtcctgaaatacatggtacagtcagtaaggttccatgagcatagccgagtgataagatcgcctacttgaatgctgagattaaaatctcctggtcctcggccagcgtctcgaaaaggcatgaactctagatgagctattgggtgaaaggcctcccacgggttcttccgattcaccatcatctgttgaaaatgaaggtgatcaagagtaagtttatacatatcgaaggatttgattgcatcgcgatcaaggagaaaaaaggaccgacgacatagagagccattaataaagccgcgttggccttctttgtaggctctgtggacgtgtagagaacgacgctgaattctccaaaggcgggatcctaccagatagtaacaataattggtcatccttccatcgaccattgcgttgccgccttgtcgtaatattcaatagcggctgaagaattccgacatgttaatgatacgtacttgcatgatctcgtgaatgtcttgaatcgagaagaggattggttgaagcatcatcagatcgtcgacacgctatatctattaatgatacgcaagataatgatcgattcaatactcacgaacgcagaaccggaaaaccattgccaggttgagactagaatatcccgtaatcaacccaaggagaatatgaaggaagacaagagacagccattgtacgggtccacattgagaaggtcagcgagacgacgacgactgacccatgacccaatgcacacacttgataggcaactcagactcacggcccaaaatcctttccagaaaagctctgatagataaactcttcatccacacataaccaatgcatcttcgatctatccttcttattcttcacacccgagtctcttgcagtgtttcctatgctctcggtagcttcagcctctttttcatcctcactactgctaggtggaggagatgatgtctgggcgccttcggcaattgaaccggcggcaaacttggttgattgtctagttctgtgataagtcgatgatgacgccgacgtttgattcaaagacaactgggatggaacaggagaagggaacgtagtgaaaaacagcctaaaagacgaggatatgcaagaaccgtctggtcagaatatacttctctcaatcggttctgatcaaggtccggtccgagagatataaaatgatgaaggaaagagacgagaccaactgacctatcgtcgaaccggatgagtttcgaggcagccatgattgtccacacaggaacgaagacgagcaagagacaacttgggaggccaaatgttgtctttagaaagatgacagactgattgtcagactagctatctagttggccagttggtatgaacgatgaggcggatacagacgacggtgctgggaaagagttgttgggtggatctttcagcgaacacgccgcgcagtagatccaaacgactgcctattcctctcaagcatgcacgcgcacgcacacacagcccattctggagaaacacacggtagtcaacacgcagatcaaacatgacacatacatacattcctcatagatagatagatccaaaaccgaaataaagagcgacagtatatatagagagagcgcatccatcaaggacgacgatgagagagaaaacatacaaaagaatattagaagagaattgtagagtaaagacggaagagagcgttcagatagagagagaaagaaggaatagtcatcgagcaagctctacatcctgaagaggaaggagagatcctcctgcgtcctgtattacccaaacaagtatcgtcagtctctcggtgacatctagactcgtacagacaacaatgcgaacactgacagtttacccatggcagacgcatcagggttcaaagtagcttctgtcatggcgagctggataacacaatgcgaagaaagatcagctgagcgcccctcgtcttcttctaccacggatacagaaatggcaaggctaacttttttctcctgcaattggctgaaaagcggggttaaaattaaatacggatgatcatcagtctacttcaactttaggacactgaaaaaggcattatgagatcgaaactcacatgattttggactcgatcgaatcttctacggcgaacttggtacatattacaggccgatgctgacccaatcgatggattcgatccatggcttgatatctaccagcaacgcgtcaaagagcccataagcgttttgcacagaacgttgagcgaaatattcttttgccgaatgataaggaaattctcaacactcactcaactattggccggaaagataaacgaaatgaattaaaatcgatatcagtggttacgttatattgtcgtaaagagccagtgcaaaacatatcacgcactagcagggttccaccaactggaccgataaagagcggaacagcctcccatatcagtaactgtttttaatgaagcacatgaatgacaaacacttacctgtccatcatgaaaaccctagatgctgcggtgaggttcaaagcaactgaaggtggcatttggcagtcagcaatcttcatattgcgatcatgtcggatacaagacggatgcacttacctcctccagccttgagggagatcaggaagatggtgacgtcaggagattcaatgaaccggtcaattgttgcagctcgtgcctccatcgacataccacctgttcattcgccagaagatcagcatcggttcagaacgtcgctctctcaaaaaatgatatttatcaagatcaaagacataccttccaaccgacagactttgaatcctgcacgcttcagacggaaggcgataatgtccaagaacgacacaaactgtgaaaagaccagactcttggtcgtcacgtcgtcggcccgaagtttcgataactcttcaataagcgcctcgacctttgtactagagcgccatttctatcagataccaggatgtgtcttgttagtttatcgaaccaagcaaccaatgaccagcaaaaagaaggaaatctgaaccaacctccacatctagacgacctaggattccctgacgagcacgtcgaaccttttcttcgtcctgctccagaggctcggcctccagatctatcgtcaatgtggcattgcacacaggacaaggtgcctaaaccatgaaccccaacgaatataatgtcagttgggttatgcaccgaggttgtgcaaaaaagtaaatacgaaccttgctttctccatagcctaaaaggaaatttctaatacacgctcggtcgaaacagtgggaacatttagacataatcacgtcctcgccgacctcgttgcagagtcgacagagcgtagctgcaaaggatgaggagagagacaatgaagttgagtaaaccaggcaaataagaaaattctcaagaggtgctgtaaaccttactttctcctagatcctctatgtacgtagcagtttttgatcttaatacaagatctgggtggcaagccaattgtcgcattctcgtgataagcgagaaaatattggaatctagaagtgatacagaaaaacaaaatattaagatgctatccatctaggtacaatgagcaagacgaagcgacatacagttgttcagaacagttccagaatcaacataagtcgtgaactgcctctttgcatctgagaagagcgagagatacagctccctttcctctggggagaagaagtctcgacgaacgagcaatgttcgaggagggagcccgagatcatcggctcgctccaactgttttaatttgaatggcatggtgaacaaagagggttaaattatgacgataaaggttcaagtaacacaccttggttcgacgaagcatcattcgatctagtaataactgatgattgaatgacacaaaaattaagtcacgagttcgacgatacaacaaaaggacacaaagcctgccaaccttaagcttcttccatgcgtgctttccttcgccgattgtggtaccatatttgacaataggattcaagatttcgttctaaacgtgagaaacgcatatgcgatgtcaacagagggacccacaaaatactaaggtatgtatgtatgactcacattccatagacactatgtgaaagacatcacacaaaaaaagggcatatgagctagtttcaaacatacagatggtctgtttggagacttacaacgtgctgcatagggttatgtccgcattcgtcgcagtgccgtctgtcttggaaactccagtgcagcgactgtgacacccggatgaaatcaggatctaaagccgaacaggacgactgatactctcaggttgtaggtttttttatttaactcaccttgcacgggcactttttacagaagtagaaagagtatgctacgcaagagagagttatttagcctcaggtcttggtctgctataagatcatcggacataactcacgatcacccccaaggaacctgattaatgagtaaagctctcccacacggttctgtcagttatagatgagaaagagatcacactatcaacactattcacgaattgacaatgcagaaagaagccatagaaacaaacctgaagaggagtccccgagagacaccatttgtatgaagcacttgatttatagtaaatcaaagagtaagttgagaattaatcaatcagcagagagcctttgaccgtttgtagagttttaatggggttctcactcgagggcgaaacaagctttggctacgttggtcgttcgatccttgatgttgtgcgcttcgtccagctgcaaaggtaaatttggtcagattctggccgcctttggatatgacgatacagcgcttgcactcacgatgatcctccaccatttgaccatgtgcaacaaacttttgcatatcgaaaaacaaagttagaggcataaaaataaggtgttagcaaatctatggcattgtgccaccacctactagatcagatattcactaacctcttctctttgacaatttgtgagtttcttttgaagcctttctcctgcttagtataaccagactgcagcgtcccaaaactgaaacaaacaaaaacagcgaatattagattcctacagcccaatccacatcctcgggttgtatagatgcgaacgccaagcgaggggcaaactgacctggtaagaatgacatcatatttcttgagctctgcgactcctttgtcgctggactttgctcgggtcgttccatggtagatcatcactttaagaccctgagagaaagcaagaaaaaatgcaagcaaaataagagtttatcaaccatctctttagaagatcgaccgggacttacatccgtgtgcgtctcaatttcactcttccattgcttcagcgcaacgacgggtctatgtacaaacgcacgaaaacatcagtcgactatagattggtctactagggggatataaacgtacgccactaccatgcaaggcatgtctctctctttgtggtcgctgagaagcaacgcgatggtttggatggtctggagaattaatcatatttgtaacagttgtggacctgatgttcagctcccgaaagatctttaaccgaatcgaggtggagagtacttactttacccatacccatttcatcggccagcattccccctctccagattcccttttcctgttccttcatccaatatagactttctttctggaacggaagcaactggagacgcaagccaggagggggaggaatctggatgggttttatgatcggaatttctgattcgagatcgccccacaaggttcgcagctcaggatgatactcccatagcgcgatctgattcttttccccctgagtgagttttctccccacccgcttcttcatcgcagcctgctgcttgataacgctagcttgctcaatctgcccaattttcttgacgagcgatccgagcttctttcgaatggtcgtactaccctctgttttgttcaactccaacaattgaacatactctttctgcatctccgctaacctcatgctgtctgatccagtctccgcctggtactcaaaattgtcctcatccgaagatccatccggatctgagacactagaggaaaggttctcgtcgccatcattggccttgcctttgcctttgcctttgtatctatgagcgggcttccgtttagagacagcctttgcttgcttgacgtcctgtgaaaggctgagagaagcggccatttcggcatccatgtcgatgttgtagcctggaccagatccagacgcgagggcattcatccgagcttgggcggcgtctgctctctgagcagcatttcgagaaagctaaacacacgtatggacaaagatgacggtcagacaccgcgagtactgctaaagaagagaaatacataccagaagagcagcgacaagtgcttcatcttcctcttcttctttttcagcgacatcagaatctactgcaaaatcgctatcatcatcctcgtctgaagtaggaggaatgtcaagatcggaggaaccaattacattgcgaattggtgtctttcccttagccaaacgcttctttgaaggatccaaacctgtctttctacggcgggacatctaatttcgatcaaccgcaatatcagcataaagatctgcgccgggaacgaagagaattcgacgaaaaagtagaccaaccggcacatcactattctcttcgtctgtctcagaaggaacccggtggttggtttcattttttgcagctcgagccggtcgagagagagcctacaaatgttaggaatcaactcatctatttagtatgtaccttgatattctcaagtggatgaaaatgaaaaacaacccctactgatataagaggagaggacaaaccagagggacatcgtcgtcttcttcctcctcaagctcttgcttgatagacagagaatgcttcagcgacagtgttgcggatttctttgccggagagaaatagctctgtggcttcataataagctgatgagaagtatattcggaaagagcgttaagtatgttcaagctacaagccaagattaaaatcaagacggacctcatcatcactctggtccattgcaccagtatactccaacggtgtctcgccttcttcttctttggtcaaaggttcgtccttctcttcctcctcctttcccttaggaagggacaaaaccggacgctcagtttgagacaaatcaagaggctagaatagcaggacgtcggcttcgaaatgagtggccgcgatgcgaaggtgatacatagatactcaaaacagtcactaaccttgataggtaccttgggcctcatcctagaagtgacagccggctttgcaaccactccaacattctgcatgatttctctccttttcaaaggaagtctgccactaccgtcgacctcagacaccattcgttcttttgaactggttggtgtgagcttggttggtcgtgaaggcgcgctatctaggtcgtctgaatctaagtcagagtctgatagaaattaaacaaacaaaaagataagaaggaagaaagaaacagacggctgagtctgttagtaataaggccgcttccagaaccctagaagccaggcaccagctaaagagcaagagaccaaccatcagacacttttcttttatggctcttctgagatatggtcactgtgctcccgacgctattcaatcgactggaccttctagtttctggaggagtgggcaaagccttggcgatcattgaggctggtgttctgaccgatcgccgaacgatagggtcggggatgaacggcggaggctctgaatctgggacggtgctaagggatcgtgtggagtcaggggaatagtcgcctacgaagtacaagagaggatatgtcaaattttgtgcacatataacctgaataatgaaacttggagagcaacctaagccaaaacgagggcttaccttgaatggaatgaggattggagctcgaaataacgatgatatcttgattgatagtggtggcggcgccgccggcggcggtagcagcagcagcggctgctcttcttggaggcatgatccgaaagatttccttttgtttttcctgaagaatatagaataagaaaagactgaagagagaaagttaaagagggagagacagacgcttcaaaagaaagaacgatccaaaagaggcaaaggctggatgaacgaggagaaaaagagagaaggtgaggcaagaaccgattcgccacacgattaacgcgaggcgggcatagccgaccctgaccggatacgtcacgtgtttaattcatttatctttcgacgcgtcgcgcgtcgcgcgtctcaaacacgtgtgaggcaagttagggttactaaccccaagttcgtatttccgttatgatcatcctcttcggatgatgcttgctttttttgttgctcgaacacaacaataatcttacaaccctcgatgtaagtgcatattataggttgctacatgggtcgagtcatacccgatattgacaacagaaagctcctgcaacctatacatctttaggtctactcagatcgataagcctagaggaagcgtggctagtttgttggaaaagttttcacaggcggatgaatcctccaaacaagccaagattcgagatgaacgaatgagttctgttcggacatcagttggaaagagagtgtccgatcgagtctcctctggaccatggacatcgtcgtcgtcatcatcatcaacaattttgacttttaatggagcctgccgacccagtttgaacgacaacaacatcctgccggcgcaatcgggccctgagccgaagaagcccctgaaggattggctatcggtttcatctgtggttacaggtagaaagagtcctggcgaagtaatcagtgtcgatttagaaaggatctggggagcaaagcttgctggagttcgagcagaagacttggaggagaagtcactttcggatcagcagccggttccttcggtggaagtcatcaagccttcctcccctcctcgtcctcggcaggatcaaatcaagacggatccatacaccatagactctgaatccatcaagcttagtccacccttgaatccacccagcgcacaaagccaatcagctattccgaacccagcccctagtccaccaattatggccaagtacactgttgatgagccacccctatcggtgacttccgatcagatcgctagtccggctgtcaatatttcaaagaaatccgagacattctgtgagcccaaagcgttgcctaggttggcttccgccaagacgacttcatcgagacctatccgtgctaccgaggcacattctaaaaacggtcgtgactccgtaagcgtagcgcacttgcctaaaaagatttctgcttcaccagcagatttgactccaccgcgcaagtctcgttcacactcgactccatctaaagcagaggcttctttgtcaagacctcgaacgtctacagcagagcgacccctggccaatgctcattcccaacgtccaggaaatgtaacctctgtccgaaagactaccactcctcaagcaaccactcccagaacgaccatccttgcgccgacttcccgcctgtactcaccaacagcatcctcgctagccaaagcgaagagtcctggtctctcatcttcctcttcgtcaacggcgaccattcaaaaatcgcctctctccggctcaagaacttctttgcatggagagtctaagacagctgattcgccctctgtatcttctcgatctatcagaactagtcctatcgggtcagcatcgaaggctgtctcgattccggctgaacagttgggacgagtgaagagtattccctccagtctcaaatacacctccaaacatccttccgttagaccctcaatgacatcctccggaaaagcacttcgcccgtctcagtcgtcgccaatcatcaagtcgccggctcagaaacaatcttcaacatcggctgccgtttctcgaaagcgagcttctccaaagcctgaaactttgaacgtgaaggtgcaaccgatggccgagcgagacgcctccgaagacattacggaagtgggtgtggttgaggtagctaagaatgatgctcttgttggtcaagagatcgagactgaggtcaatgctgaggccagtcagacagaaatacgacaggtataggcggaaaagagccaaaggtcgtcttggtccagtgactgtacttgtctagataagtggagattatgagaccgaaccatggggtttctccttcaccactctttcgtactctttgcatttgttcctattattccctattgttccgtttttttttattctttcttgctcagttcagtgtaaatttaatcctctcttctactccttctaaccatttggatcggtctggtccttcttgcattcagcgttcgtcctttcggggttcgttccacatccacagtcttttatgaccttgtttctgtgttttttcctcgcttctcttcaggttcttatgaatatgcatatatagtttgtcactatggtttgttcgacggacatgccatgttgtgttgatcccggttacgatttcctcacatcatctccacggttctaatttcgccgagaaccgaagagtagcttaagaaagatataaatacaatgctttcttcccacttccatctcttcaccatccatcttcgccatatctcgatacaacatgtcttttgtgagttccaatttgtccaagtctatccttccgacaaaatatcagccttataaatctgtgtttaaataatagatcgcctcagaactagccgagcaggagaaatctctcgtcctttcttcctttgactccaatgtcgcgttcgaaattggaactcgaattagatcgcatatccagtcgaccttccccaacaagccacaggtcatcattcaaataactgccgacacatccacccagctctatttctttgcgacagtcggacagggaacattaccggataatgcccattgggccgagagaaaacgaaaatctgtgaggagatcgtagctactttacgcatttcctaccttttctgatatcagagacctctctatgttgatcatatggcctaatacatccgttcgaacgccgttgtcacaccaaatgaacgtggggctttctcgtctgtatcataggtctgtcgatggaagacgagcactgccagtttgaggattaagtacaaggacggcatgcctgaaaagtacgggacgttcgaggccgaggtaggtactatatcctaaacaaactcttatgattgtttcggtttctatggggtctttaaaaaagttctgaaattccttgatcccctctgtcccgtccagtacgctacgcatggaggaggatgtaagtttgtcatctgtcctctctttggttctcgcgttggaagaaacatccccttcctttgaaatgaagaaaacccctactgacctatcaacacttccttacttcttattctctcaaactcaccactctatccttttatatatagtccctttgagagtgaagggtgtagagccactcgtcggagttgtcatcgtgagcggacttgctcaggaggaagaccatcagtcgatcgtggacgtgttgaggaagtacattgaagaagaacagaagaccgctttatcttagatcctagattccgctttgacaaagctctggctcatcttctgtcgtttgtaaaactctcgatgactttgaacatgattggaaaaaaaagtcaatatgaaaaatgagacaagggttgggacgtgaaagccaaagggaagttcgggccggtgagccgaagaggagtgaaatcctcataaaggatatcttgaccgaccatccatcctctcttcacttttcctcctcctcttttcaagatccacactcagaacacacccttagaaacaagtttaaaacatctaagaacatgtctacagatccccgcgttatcattgtcaccggtgcctcttctggttcgtcgttcatctgactttgctcccttcctcgtttcttatcatctagatttctttatctcgacaagaagaaagtctcttagagctatctcggaggctgatagtattcattcctatccattctccgttttccactcacgaaatataggtatcggcagagctacatccatcgcgctctccaaagcaggattccaagttgtcctagttggaagacgtcaggaagaattagaggtcacgaaagaatcatgccccgagaaatcagtaattgtagcggccgacgtgtcgtctgaggagggagtcaaattggttttcaagaagagcgtagaagcttttggtatgtatttacatctttctttcacgtatgcgtgcatgtgtgtgtgttttgtcttagagagaccataacaactaataagagctgctggttggaaacattcggtgctctaggtcgagtggatgcaatcttcaacgtacgctcacctcttgcttatcttcttccaactcaaaatcaaagattctgatcccgaaattctttgcatttattcagaacgccggatgtgatagcagcaagcacattatagaagatcttcccctatcagaattcgataaggtctttgcgcttaacgtccgaggagccttcatgatgacacaagaagctgtccgacagatgaaggctcagagtcctcaaggcggccgaatcatcagtgcgtacccttccatccattgacagtcgattcgacgaagatgccatctttgagaccgagcctaattcttattcatctctcgatcagacaatggatcaatatctgcttacgcccctcgacctggtacgtgctcttccaatctctatctttcaataaagtcgtcaaattcaaattcaaacccaatcccttttctctccctagactctgctccttacacaatgtcaaaacacgctattcttggtttgaccaaatgcacgcagcttgatggacgaccgttcaacatcgcctgttctcagatcgatattggaaatgcagtgacttcccttggtaacaccaatgcacccaaggttcgttgtccttctgctctcaatcatccttcacgcccagacaagagagactgacggactgattatttctcacttcattgatttatcccaatcttatctttattttcacatcaagattcaagcatcaggtcatcagctcgtggagcctgcgttcccagttgaccaagtcgcaaacgctgtcgtctacatggctagtttaccgttgggaacgaacgttgctaacatgaccatcatgttcgttacttcccactctatcgacttctctgttctttcctttcaagaaatcatcacgatggtatagaacttgttgacattaaattcttttcggttggttgtgtgacaaatacagggctaccaacatgcctttcattggacgaggttaagccccccaatgtgacactcagattaggctttgatagaacaaccctacgccttgtcttgcgtcccttctccctcgcctctatgccttttatccccagccaattcaaagatttctgtttattggcatcataattattatattcattataagactatgacattcgttcaaaaccattgagaacataacacgcagacggagcagaagcatctatcgtcagtacgtgttgacagtgaccggcgccagaagaaaaagaaaagaaaacgaacagtactcgggtaacggtctttttgccggtattcctttcgcatcctgaggggccgcctcgaatactttatacgattggttcagattctcattaagttctagtatcgatgctacgtttccacatcgataacagtaatttggtgctgcgaggatatcagaatcgaaccgagagtgtcaggccatttcgttcctgattcgaaaaaagagaagaaagacacacctgaccaaacggtcacaatttgtttatcaaacatcatcttgtaaccttccatcacgagttgatgtgctcgtgcaaccaggtctatatcgtttgctctgttgaactgtgagacgatatcggctgtaatgattgcgagtatcgaagagagtatgagcctcgaaagaaaagaaagagttgatcgaaagaaaagcatggtccgacactaaccaccgaacaagaagcctgctccccttggagaaacaccccatgcttcgatatctacatagtcaaagaagtcagtatgagttgtttgaagtgatatctcgattcccagtaggatttcaagagagtatcagagaagatgcggacaaaccatcagggtcggaccataacaggtcacacatcgctccatcatgaggaacttcctgttttctatctatcagtcgaatctggaaagttgcaaacacaaagcagttattgagtgatcagaattgtctgcgagtgcaatacttcagcaagctgggaggtctagaatgctagtctcgaagggtagagatgtcgattcgcgcttggtgacttttaagtttgcgtggtcttccagtcttttcctaacccttacacctgcacagcgactaattcccgcacacacatccacaatttcaaaccctcttgattctctcgcttctccaaccctgtatccgtttcccaagaatcaaatggattggtcactatagagaagaggaaactaacctgatctaatgttaccacactcggactcaaccctccatgcacacagaacacccttccatctactaccgcgcctagacaaagataatcaaacacatcgcagcaatacctccacacattcacgctcccaaattttcgctgacattcatcgtagaaaccatagacctgcgtgatctgccgggattcatgatttcctcggatgagcgtgattcgatccggatatcggactttataaaggagtaggagtaggaaagtttcgacagagtagaaccctcggtcgacaaaatcaccctgtgttgttgacatgcggagaacacaaggcgtcaacaaggtttagttggtcaagggcagaggacagctggaggacgaaccatgaataagtaggatgtttgtggcggttcgccgcctactcgaaagagttctatcaggtcgaagaattggccatggatgtctccacatatctaaaatgcggatcagagtcatgttacattcagaagaaatggtaaaggttcagtacggggtgttacaggtcgagaatatgatggtcatgatcaatagtgtagatgcaatcttgtcgtgtgtccttcagacactatccttcggctccaacttcgttgctccataaggacgaacacggttccttctctggttcacacatgtccgttcccgcccatccagccgacacacaccgcatgaggcaggcaaaaggttgattgtaagaaagacgagagcttaccgtaacaggactatcgacatactgaacgttgccttcctctattaagatctctctagccttcgagcaaagcaccttgacctcttcctctgatattggttcgcatctcttgagctgctcgatctgtctagaaactcataatcacaagggtacatccccaagagtttcagaacaattgattgttagacgccatttaaaatcatcgaacagaaagcttacagcaagacgcaccgatcaagatcactggtaaacatggattataggacgaagactgtctcggcacgacacgcgtttttcttgagagtaaaagcttggagttagacagatgtattatatcgattcgatcaggcgaattcttttcttcgtatggcttcctcttgtttacttggcagagtggtcgtcctggttctaagcagataaactataggagacgagaaatacagaaagagaacgatgaggacgatgggatggttgttcaatgatggtgatgattcaattgacgctcaatcaagtcgcaagaattatcatttaatttaattaagtgtcatctaagac

SEQ ID NO: 2730 - DNA, 13775 bp, Xanthophyllomyces dendrorhous
caccactactacctccttacatgaccacacagtccccgttcttgttttctatctggttgttcaattctcggcctctagatcgacctcctctgttgcctgcctgtagttgaacaacaagtacaccagagttgtgaggatcaagctgggcgtccaggttgtacctgtagaacaagagatgatgacgttaggacagccattgaaccagcaagcatggacagataagatcaagcaaacgaaaacgaatacacaattatggaaattcttacttttccattaaatcctcgatagcaggcttgatcttggccgtatgctgggcactatggttccctttacctgtcaaaggaaagaagagaaggtcgaatatatgataaatcggtcttcttaggatacatcatcatagaaataagagatatgacgaaccaacgatgaatttgatctcctgatcacctcgttgttgagccttttgtatttcttgctccgacatctcgatggctgaaatatccgaccaaagattgaaagtttcgtggtgaatgtcctgttgttataaccggtagagtctagatgctcttgtgcttaccttccttgacgtatagaccatgcaagtcgatcgttcccggaggtgagtccgtgttgttttctatgacaagagtcgtccaaccgaacgtcaaaaatttgaaacaatataaagcgctcggacaagaaaagaagtttagaaaacacacggtagtagatccaatcccgagcctctttatcgatctgagcctttcgcctctgatgttctttcccctcttcactcaacgagtgagcggccgcaccatctccagaagcataagcctgtttagatcggtcgaaacaactgatttgttccaacgccgaaagaacaggaagacgaaaaagttaagccaaggtcaatacttcacgggcacatgtttggttctacaaatttttctcctgattataaatgtagatatgggcccacctagccataagactagcctctgttcgggcctgagcgcgcatagccatatatttctcgtttgactggttgatcatattgggatcctgaagatagagtcatgaaagccgttcaagcaagtttcctcagccttgattgaatctagaaagaaactaaacacgcccattgcattccaaagatgaagaataaaaaagactgcaagcgtaagcgaaacctacttgagaatgataaggcccagcaacctgcccatattggcccgcagactgctgatgattgacctgttgatgaggcttagttgtcccgggatgagcatatgacggctgctgttgagggggataactcgtctgttgattgctgtaaggttgctgtatatgtaagagagccggaacattttgagaagacgaaacgataagcattcggtgtattctggatgcagtagacaagacgcagcaactagcgcacctgttgatgataagtttgattctggttctggttctgattctgattctgattctgattggaggaagagcagaagagttgctggatgcatgagaacagcaagccaagcagctttgcgttatcgttgttgttgttgtttgtcatcgtggaggtgtattatgatgatgaccgatggacggatgtatggatggatgtcaaagatgatgaatgaaagacgttcaaggcaagcaggctcgttcggaaagaataagaaaaaacagaaaaaacgcccaggcgggtaatttcatccaattgtcgatcaccgttctcgtccggcccgagatttgctgcgcatccggtcatatggagtccggtctaggtcggcccttgatttcggcatgattacctaagcaggtctcttctatcaatctcaaccttcactccatccgttttcaccagccggatccaaggcaacagtgttgtagatccaggagaaaggagatatcgtctcagccgataacatgttttccgtgtcgctcagacgatctcaggcaatcagctgttatcggaggtcattatctagtaccactcccaaagtcagtccaacgaagcttgaatcagaggaaggtcgatgctcaacttttctcccttcattcttatataccagccgtttcaacttcctgatgatcagcaaatctttgtctcgcgatcgaatgatccttggttcaacctggctttcgaaaactggtcagtgtctcttgttatcgttattgtctatccaataaccgatcggttgctgaccttgtctaaatctataccaaagcgcaggctattcacaaagacaaaccccgccattccgatcctctttctctaccgaaacaaggcttgtgtagttcttggtcgaaatcaggtatgtgcttcatgataaatagctgtagagactataatgaatcaaactacttgtggcacttacctgttatgattttcgtttcgcgactccaagaacccgtggaaagagatcaaccttccgttgctaaaagaacttgaaatcccgttcattcgtagaaaatcaggcggaggaacggtctaccatgtatgtctatgatttttcatcaactatcagtaggaccggtctgacgtggtctgatatatgatctacttgacgtatatatcaggatatgggaaataccaattactcgatacttattcccaaagattcgttcgatagacgacccaatgcagagctcgtagcccgagcgctgaataccctcaacgttgacgctagagtcaatgaccgtaatgatatcactctagacggcttcaagatgagttgttcattctttctgccttctggacatgtcacaaatgaagcttatattagaccaagccccactggccttctccttttcctttaatggcatcacgtctccggctcggcttacaagctcaacaatcgacgagcgtaccatcacggaaccatgcttctcgacgctcaactcggccgtcttggcaaatcactaaaatctgatagggtccgtattatgttgtttctttctcactgggcctacataaatgctcacattttctgtctcacagtcattcacgatgaacaaagcgaccgattctgtaccctcaccagtatcgaacatcagttcaaaacatccaaatgtgaacaacgagacgtttatcggcgccgtcgtcaaagaattcacctcagtttatggagcacaaacggaagtgatcgatgtcgatgagcaatacatcgatagagaaggaggacagatgaaggaacttgtcgagaaagaggttgctgagttgaaggtcagtctccttctccttttttcttctcttctttctctttaatctatcagatctgacgagcatctctcccaatatatactcatgaccatgaaaacccaatttgcctttcaaaaaagacctggaactgggcttttggtcaaacacctgaattttcaatagatgtccaatcacctattttgaacactctcggtcactctcttgttcgtctagcctttcgtcatttcttttttccttgttcttatctctgagatcatcgtttcccgtctacttattcttcatggggttactcggcctctctttcaccaatgccataacaaaaaagaacgcatcggtgacatccagaaagggcctcatcacgaaaatcgacctgtcgttcccttcatccccttccccgttatacccatcagcaaagtcagaatcaagcccgggctctcgaaccgatctggagaaactagccagctcgttgataggcaggaggtttggagatttggatatcaattcagaaggaaagagacaagaactcgagaacaaaggagtagagagagaagttatagagtggttgggccgatcaatgtagacctttgctcgtcgctttcttgagatactggcaaaagcgagatggttgacaaccttaaacttcatttacatcccataaaaaggaaagaattgagccgacgtgttctcacgcaattcattttaaattcaacatttcattttcttttctatctaaagatattatttcccgaacgaaaacatcgacccagctgacccagccgacccacccatcgctccgaaattgaatgcacccggattcgctccagttcctgtacccgatgtaggcggaagtccactaggcttcgccccgaatgagaatgctgctggtgctgccgttgtcgtggatgatgtcgccgccggtcctgaagatgctccaaagttgaacgccggtttagatatcacaggaggagtacttgtggatgacgttccaaatgaaaatgcaggcgcagaacccgacgtagatgaagcaaaagatgttccagagccaggcggatttgacgaaggcgcaggagcggacgacgtcgagccgaatgagaaggaaggtgcgcttgagctcgctgtagatccagatggagtggctaccttggaaggcgctccgaatgagaaagaagacgcaggtgcagtggtggtaggggcagatacagcaacctttggggctccgaacgagaaagatgaagctggcgaagacgctgcttccgccgatgtggcattgctcgctcctccaaacgagaaagatccagcggcaggagcagctaccgatgaagaccctactgctggctttgaggaagacccaaaggaaaaagaaggcgcagaagccgcaccggttgacgaagcacgctctgctggctttgaaggcgcaccaaacgcgaaagctggagttgagggtttagccggctcagagacagaactagcagcgggggtggatgaagtagcagcagaaggagtagacgctccaaatgagaatgaagactgtttggatggaggagcgggttctgacgactttccgaatgagaagccagctgatcctcctccagtactgttactagctccgaaactaagggctggtgtcttgggagcaggtgtaggagcagcagaagcggaagacggagcaggagcagccgtggaagtcgtcacagaagtagaaccagaggctgcaggcgccccaaagctaaacttctcctttccagtcgaaggagcaaccgatggggcagaactatccaaggctttgggtccaccaaagctgaatgaaggtgcgctgacagcaggcgcaggcgcagtgttggcaggttttgattctgcaacagcgggagtagtagcaggagatgctccgaaggagaggggattactggagcttgcgggagcgggggcagttaaggatgttgtcgcaggagatggagccgcggaagttgcgctggctgtcgttgtcacggcaggcttcgcaaaaaagttgggaatgcttgatgcagatgatggcttgtcgtccgccgcaggtttggattccgaagtgaaagagggagcaggaagagacttagaggccgaaggagttgccgtcgaaagaggaggttgaggaggaggagtagctgatccaggcgaagccggtcctgacgaggtccctgatttgttatttcttcccaacaatctgacacctttaggagcctcatccttatccgccgagttagaggaagccaccgactcggctctcaatcgatctagcattttcgcctctctagctctccgttctctttctcctagcgctcgagggttcatcgccgccttaggtccatcgccaatcttacttgcaaaatcgctatgatagagtgctctaagacccaaagacgaagttgacatgcgaagtttgtcagaggcggaagcagatcggacaggggtgcctggaccactagactgggaaggggaggtcgtcgaaataacaccagagaaagactgtcggaggtcagcaagggaggtcgaagagcggaggggagtggccgatcgaccgatccgctgataaagtcctggtgactcggcactaccgatcgagttggaacggctctgtagatttggtcagagatgatatgcacgatgattgagaaatttttctttcgcgctggcatactatgactcgacaagatgaacgaacttaccagaggtgtccctctagaacctacgtcgctcacactccccgatcgctcttttcgactatccatatcctgatcatcgtcggactgccaagccaatcttttttgagctttaagctgtcaaatgaggaaagttgtccgaaatgatgaataaccaaaaagccaggacaaatccatcagctttgagactcaggagaattagacgatgccagcgcaatttaaaaagtacggacctcagcaaactcagattcggttacccattgctcaacatttccgacaatagtttggtatctatctggatgctcagagtcgataggctagaatcccgtccggttttgttcagtacacgaagtcaggagctcgatagacatgtcatagcggaaacaaaaagtatacggaccatatcgtattttctcatcgtcttcttgacaagtacaagtcgctctcttcccgtaccgttcttcccaactctgaatctgatcccgtttggatcgttccagatgtctccctcttttcttccgttctcatcgactctctcgctttcgctttcgtcctcttcatcttcctcgcttacgtcctcctcttcgacctcctcatcaatcttcaacctgggatcgcccactgtaccgcctgcattgctcttggttcgttttctgaacgaccgtttagaacttacagactcgacgtccgagatctgtcttttttgcttggtcgatttctttgccacaagcggcggaggtgacggcctctcagcctcatcagatgaagatgacatcatgttgtcatcccaatcgatggcgcgcccgttatggagcgaaatagatccttcgtcttcgtcagacatggccgatccagtatcctcgtctgagaacggaccggtttcaacctccatagtggtcgtctgatcatcatcatcctcgctcgtcggttcgagcttgacaacctgttttctccttttccttcctccatcggcctttacttgatttctaaccttactgtgaagttcttcttcggatagagacccctcagattcatcatctttgtcgagggatcttttcctaatccggttcggtttagcgatagaggagcgccgcgaggagacagtcggaatgtgtgtgctagttcgcgcaatcttgtcttgaccagaactcgagatcgatgaagcggtaagatttctctctgcaaagtctttggagaaggatcgatcaagaatagatccgctagtggcagcaaacacgatgatgtcagaggaagtcacagtgatatgtactggagcaagtcaagatgatctcaccttccgaaactattgtatttgtaaacaggggtatcaaatacaggtccagtgttataggaaccatacttgctgctggaagcataggcgagagcttgaggcgatagagtttctttggcaggtaccaaagacattgtgtccctaagcttctctggagctgatcaagacaaagaagagaaacaagcagaaaccatgaaatcagccaactgtgctttatgtcgaactaaacattcactgcaaagctatgaacagccaactcactctgtggcttgaccttcctggtcctcgagatacctgcctccccagcgagggtgcgcctttccaccatctctctacttttgatcagcgcttcggctgcggcctctctaaaaggtctcgtgtcactgtccgggatcccatgtcttcttcttttctcgagtttatactttccaatcttgttctgcaaccgaaagtagtcgactgctttccttgtgtagaagatgaggccaccgagcagaccaagaactacccaccatggaagctttcctaggacggtgagcgagaacgacaagagagagaaaggaggatcaatgacctgcatggtctggtccacagtctctgtatccgtgtaccaggacatcgagggcaaaaggactcctgaagatggtgggtgggatgtatggttgaccgtcaagtcagccaaaatgatggctaacgaaagagccagtcaagtttcgagttacctaagattattttgaattatatatgaataaacaaccggttagtcaccgtttgacccctcagtcagcatttctcctgcttgctatcccacaccttcaaccacccacataaaactcactctgtttggtctagattacctctcaactggccttcagcgaccttgataacatagcattggtagtcaagaccttgaaataggagtcgtcaagcacttggatcattcatatcgtaaaaaggcaaaagattttcaatagctttcacgccatggctttctccgctactctcgttcgtttgtcctcaaggcttcggttcgttggtcaatcatgtactgaccactttcgctttatactttacagacactcagcgatctaaatgattacctcgctccgtctcaagcatgtatccgtcctgtggaggaggaagataaggttgagcagatcgatggcgctgtacgttcaagttctcccagctttttctcatgaccaatcaagatactctcaaaacgactctttcttgatgctgaccaactaagacatttttccctttcttattcttcctccttcctttgcttttttctttcttttgcaatccccaatgtattgtctcgacttcttcctgttcacctcctcttgacgttcaaatgttccacagaaaacacaaattcatattgacgaatcgacaggagcgtactacgaactcgctcttccgaataatctgccttccaccgtctcctccacttccaccgtacctgcgccttcgactgagaagaagaaactcaaaaaggcagagatcagcttgaacgattgtctagcctgctcgtgtgtatctgttatacctattcaaccgtcaattatgactcaaacttacatataactttcctgactttgcccatgtctcactcagaggatgcatcacgacctcccaagaactcctcctccagacgcattcgctcacgcctctcttggaactcttacctccaaacgaaccaaccaagacgttgttcctatcgatctcacctcaatctctctcatcgatttctgcctccttaccgactccacttcctctctccaccttgctccaccggatacagagctttctcccctcaataggcatccctcatatcgccgatcttacgttcgcaagacacctctccttgagcgaaaccgttcaggagttctatgaacgaaaagccggacaaggcggtggactgccgatgttggcaagcggttgtccggggtggatctgctatgcggaaaaagcacacggcgaggtgcttgaaaaagtcggaaaaggaaggagcgcgatgggtatcatgggaggtctcgtgaaaggttggtgggctagaaggaactcgatcgactcgaaggcgatctaccacgtatctgttcaaccgtgttacgatcgaaagcttgaatcatcccgaacccaattcatttcgaccatgacgaaccaaccggaaaccgatcttgttctgaccactggcgagtttcacagtttcctactcgaacgagggttcgatcccaatcaaccgacaaaccttgagaaagctgaaggtgaggtgatccttccggaaacttacgaaggatttccgagcatggtcgatcacccaggaagcagtagcgatgcatacctccatgcgcttcttttccatttcatcgaaaaatatccgccagggtcgttgacgttagcgaccactcctatacgtggaagtccggattacattgagtattctctgacggtcaactcacaacctgcgccttctctttctccgtcatccacttcgaataccctaccacctgtaacactatcaccatctgcatccacatccgcatcgacctcaacaatagcatccataatacccacttccacatcgttatcatcaccccaagcaaacacgtcaactgcatcgtcatccttaccgggttatcttccccttccaccaccgaatacacaaatcttccgagccgctaaatgctacggcttcaaaaatctccaaaacgttgtgcgcaaaagcaaacctacgagttccgcactatcttcccgacctggccttggccgtgcggcggctaaggataagacgtatgactatgtggaagtgatggcctgtccttcaggttgcgtcaacggaggaggtcaactcaaaccaccttctcctcttacttctaactcgggggagcagcaacagccccagagaggggtcaagagggacgaagaagggtttgttagaccttgggaggaaacggatacccaactagctcaggtccagaccgggcctacaggggttgacgtagagatgagatggtccactaaagagtgggttgccagggtggaagccatctactggggtgacctctcctcttcctcctcttcttcatcgacaacgacatcggcaaagacgaaggaagcttcggttgctccacttcgacctgcgaaagcagccgccgccgtgccatctatgtcagcccgtcgaatccaagcgaacgaactggaaaacgttgttcgggatgaaatgtcatctgctgaacttgcctctggtacgagcgacgggaaaggatggatcagaacgtcatacgaggctatcaagcaggaaggagatggtctccttttagggagtggagtcgtttggtagttttcccccagcttccgcttccaatttcgatttctcatttttgcagaaggacgaaccagttcatccttctttcctattcttcatcatatgattctttgtattctcaatagatgactgtttatcttttttcttataggcgtttgatgtgctttaaggtgcctctttcagtctttacataaaaagcgaatgaaattcgatagttaggggacgaaaacaagcctggtttgatacaaaaagcgatgatacaatcacgtccaccataagccaacccaagacttgctcactccttattccactccttcacggcggccatgacgtcctgatccaaccaatcccatacgacttcagtatcttcccaacctaccaactctttcccattgacgcttttccccacgctcgttcccagctgtagggcgccttgtttgttcgagtaccccatatctggacctttgtatttatctctcgcaattccaaccgatccaccttcggatagtagtccgtgggcatagagtatgtcaccgactttggcggataggtctttccaagagtgaggcccagaggtggaggttccaaagatgtagtgagagaaaccatggtggggtgggggaggagcagagggagagaggaggagtttgattagagaaacgtagagcttggtgaggctgtcaatgtgaacattggacctgtgtaagaagaaagaagagaggaatcttgagatgagctcagctagatcaaaagcgaacaagatggtaggacacgcaccaaacgttctttccggctgtaaataagaacaacaatgagtaaagataaatcagccggaaaatctatgactgtttcgaatgcaatcaatgatgacggacgctcgatgtaagccgatcgcttattggtcaacgcatgattgaccaagttggggatctgctgcgagaccgtatgaatgggtccgtttccctgcatccgagaaaatacaaaacatctttttaactcgcaattctcctcgaacccaaagaagaagcgacaaagacaaagcgagaagcgaacaatgccgtagatggtggagggcagaacgatgtaacccaggaaatgacctcgctcaagagcatctgtcactctgtgaacagaagcttgttagtgtttttgctcgcgcactgatatataggcatgaaaacgaagcagccacgagacgcacattatgtcaacctctcgatggggcctgctaggtgcaattccttcgatctgcttcaagtcagagtcctgcaatgcacaaagctcacattgagtcatcctgaaggaaagagggaagaagacggaggaaggcaagacaaacatcataaactgtgttatcctcctctccggcagggatgtccccatcgaccaggacaccagttccagaggtatgaatgtaaactgcctttaatttcttttccagtttcctcttctcagagctagcttcgagaccggcaatgagagacttggcggagggaacatcatcgcaatctgccgcggacacgactgaagaaacagaccgagagggtcagccaatcgagcgagacgaatagagaagatatgtatatatagagtcaacgcaccgacatcggcgatggaagcataatgtttaagaatatcgccatcttgcaaagtagctaaaaatctcgttcattccaagcaacactatataagcatcatcttcagatctgacagggaaaacatatatggacacgcaccttttacaggctctatgttggatgaaaacttctcaagaagagacttgtgctcgtcccttctgtactggacataaaacttgccctttgggtattcatgaatgaggcctgccaagatcgcgcctccgatgtagcctttttcggtgatatcatcgcaatcgcatcagcaggtgaatgatgtcacagttgcgaacaaaagtgtagacatagtcgagtgaaagaagatggaccgtaccggatgcgcccagtaagaagactgagggagcgaccttctgagcttgagtctctgctgtggacatgatgatgtgagtaattttccttgttgattctttagttcttttggaatatcagaagagagagataaattggacagatggaagttgaaggcgaagagagagatatttatcgacctatttgaatggtagatggaaaagtggagggcaagatgttggtgacggatatggtgagctgctgatcgaatgaacacattgtcgtcgtcatcgtcctcgttgccgtcgtatcatgaatgtcctactcttttttaaatcctcggatatctgtccatgatactatcaacgtcttcttctctccgcttctcctggttcaagatcctcatcttcaacggttcagtactatctctgagctaggcaaatgctaatctgacaagggaatgaaaacccggacatgtccgagatggttgatcgatggtctgtcattatatctcgtcaccatcgtcgtcatcatcagaactacaatcttgaagccgacttgagcgcatgcttgtaaagggttccgtagaacctttgtatgacaaagaagcattgatacaacaaaggatgatacaacaactggctcatctgccgctcttcatttctgcttcctcaaccgtctttctgaccttttacaatttagctcagagcctggtgacatgatgaaaacagagttctgatgattgaaagtcgagcgccaggtatggccagtgaattttggggcaggtagatgacgaaatgagtgagagacgccgtgctgatgatctgtttagcgaggcgtctgtgactcaagagtatttcttttatctatccatctatggatgggagaataattcgatgagacatctcagcatctgatttcttcaaattcacctctgcaaaggcgtggtgaagacgaacggagtcaactcacaatagcaggacaggatctagatgaaagatcaccgaagtggttggtgatatctgctcgaagattttctttccgttgtttggatgttgtttttggtttcctatctactacacctgcctctccctgttcctcctgatctgcccatcgactcatttgtctccctcttcaacatcggcctcgtcatcgccttcgaccccttctgcgtcctcttctgcatcctcttcttcttcgtcttctggctcttcttcatcctcgtcctcctcttcttcgtcctcctcatcttctgcatcgtcatcttctacatcttgtccat

SEQ ID NO: 2731 - DNA, 8750 bp, Xanthophyllomyces dendrorhous
atcttctacatcttgtccatcgtctgtcaccttccttgtccgcttggagccagatttggcagcagatccagcactagaccgactagctctagccgacgatcgtctaggtttctcactctgagactgattgttgaagaatgaagcgcgaaaaagtttttggattaccaaacagcgcgtgctgagaaaatgagacgaaagcgatattaagacggaccattcggtatttcgcaagatatatcctcaaggcttccaccgagttatcgaatcctacaaccagaaggagggatccaaggagttgcgttgaatactggttctgaagtcatgaaaaactggaagatgtccatgactgacctaatgctttcatcgcttccaggatgtctgtagacgcaaaaaggaaaggtaaaacacataagtcatttgaatgttggaatcaaaggatgagaagagacctgaacgaaccttcaccattcattgtcttccgtttgttgtctagacaccgctcggatgcctcggaagtgatgaaggcgataaactcagagacgcctatgattatcgtgtgtgttataaagggtgtgtatggtgagatgattaggtcgacccccatatgaatgatggacaaaaagaggcaatggatgccaacgtacattcctgtagacattctttcgattcctttgcaatttttgctgacggaggcaagcagtccctcatgatacggctcacatttgctatctaaatttgagattcccatcgcaaatcaacatccaaagtcaattgtaagcgggacaaatctgagttaaaggtcaacaactgttaagctagaggggtcagacgacgtacgggtagaaatctatcctgctctctgtactcgtctacttgggtctctgtgaattcgtgggagacatccttcagatctgttcccgtttgtctctgaagaagaacacgctgaggcatttgcttcccgacgaccggaactatcggctcgacatctgagtctgtctctggggaaagggatgacactgctgacggtgatgacattgatctggaagagggagagatccaggaggctgtggtcggacagaaaagatagcgaaaagagacaaacggcaaagaaatagaaaatgagaagaagaagagaaaccacttccttggaaaaaagagagggggacaaatcaaaacgttcgagaatcggttttcgccgtctggccaatggtagtcagccagattcgaatttgattctaaaccctctggggttcggccgtcagatcaggtcggacaggtttgagtactttaagtgctcatccgtccatgtttggtcatgacatggatatagagtatgttaccagaaggatctacaacatgtgtatataggtcaggctacgccgtaaggagagccgtcggatagacggcgtcgacagattatgtgacccacgacgtaagaacatccagagtccgcttttgcactcggagagttttcatcctcatttgagagaaccatagcagaacagaacatagtgctgaatgtaattctatagtcatatacacgccaatggtgttgttcgacctgctctgctgacgatacctgcccggctgatactatcgctgaatataccaatattcctcgcttcataagcacacactttgatctaactttatgctgattgataccagatccctctattgcgatgagataccagtcgatatactgacgatatgctgttatatatctaaccatatttcgatcgtctgtgttctagaagtgtgtcagagcatctttatatccaggtgaagccaaattcttctcaatgtgaagaccatccaatctcatactatcagtcctacataccatccagtccaactaagatatttcatgttacatcgttgactctcgttgctacagatgttgagtttgtcttgaaatctattctggtgtgcttggtgtttgcataaatataatgagctccgttcctttacaaaaaaactatattgactcaagtcattcccgatatatccttcaagtcgattgaaattaggactatttccatctacgtaggtcaccttgtggtcgacaagagtgttttctcaccgtctagaagcaaaaaggtctcatagaaaccaattgggataggagtgcaaccttgattatctccatcttggttcaagtcagtacccactgcagtcgagtcagcgcgctggtcgagggtggtgcagagtcaggtttccaggtctcctcagtgctccaaatagaaactagcacttcttttgaaacgacgactcgtcgtgtccttcgttacacatgccaatcgtacatgtatcatgaaacattgctccttctcagcttagagatccataaaatatatactcacgctttcctcgcctcattcggagaagcaaggctcgaagggaaaacattagcctgctgcttacataatgccaaaggaaacatggaacgttgcactttccccatagctaccatcacccatcatccatccaacaatacggcttgggacaagctctgaacgatgggctcagtatcctcgccctatgtgctatacgcaacttttacaattctggccttcgctcttgttcaggtagaactcccggatccctatatggtttgttctttcgtcatttgcttccttgctttaatcatcattcattgtcgaggctgactggctattcggctatgtccgtcatcgatggcttcgataggatgaaatctttcatgtaccacaagctcagagatactgtactggcgactacttcacttgggatccaaagttgacaacccctcctggtctgtgagtggtttttccgttcgtgaacgagtctggcttccagatgacaatcacccctcttcccctaaactcactggtgacgcgaaggattttgaaaacccagatacattctctccgtgataccggcaaaagtctttcatatcagttgcacaacggaatatctccggggaacaaaccttgtcctgagtctccttcttcctgctattatccggtttgttctctccaccttcccacctcgaacgtcgtcaacttctacgtccctacaggtgagcagttcggcaaacaccctggaatcggtgtcgatcgcgctctttccggcaacatggttctttggaaacctgtattacacggatctaggttcgctcgtgctcgttcttctcagttggggaatggcaagaaaagaacggttctgggtttccagtttggtatgatcacaccatattctctccaaatgttcttgtgaatttcaacttgagctcacgctgatgcaagcatacactgatttgagtaacaggtagggctgctctcgttagcatttagacaaacaaacgtcatctggatgatcttcatctttgcagtctctgttcttcacgagcttgatgtcgtccaggatctagagcgatctcgggcgatgactatcaatgggcggactcgccggcaagctgagaaggagagggacgagctcacgataggtaagtaccactgccatcttgaaatcttcccccctaaatgattctgaaccatataccaacttgtctcgtgatcgaatctgatttccaggtgaaatacttagtgaaacaatcaagattccctcgagattattgacgtcctggaaagagttgatgccagtggcggtaccatatatacccacgctgatcgctttcggagcattcatccgctggaacggaggaattgtactcggtttgtagaactctatttccatctttaactcatctctggtcatgcgctgacattgaactgcattacatcatccttgtaggccataaagaaatgcacgaagccacgcttcatttccctcaactaggttactttctagcgtttgctactttgctcggatggcccatcctactggataggggagtgactgaacttctgaaaagggccatcaaagatgggttcggtggcatcaggtttgttctcttgtttagttttcttcttggtttttttttgtttctcttctttcagcttcatactttttaggagagtcgatcgaacccggaaaaaatgatctcgctaatccggagagtatgtttcaatatgggcggaaacagacaagcattgacaacgagcgttctaacgagagtaacgatgttagctatcaaacataccacgttcgtctcacgttctaatctttattcgtctcttcgttcttttccgctgacactgtcactcttcctgatcgatcggactggaaaataaactataggatcgtccatccattcctcttagcggataacagacactacgcattttacgtttggcgtcgagtcatcaatccattccctgcagcgaggtttttattgggagtaggctacgtaggttgtgcgatcatttgggccggtagactttgttcgtattcaatttcctccacctctgtcctgctcatcaccttgtgcatggcttacctatggggtttgtatctctctcattccgttaaaagtccggacgcaaccgccgttgacagtattgggtctattcacagctaccctactcactttgacaccttctccgttgatcgaacctcgatatttccttatccctttcaccatccttcgtatattggcttccccttctcctcttccttccgtctcggcagcttctgagtcaaaaccagtagacggtgttgcatcaacaacagcatcaacatcgacatcgacaaaaaggactgccaagctagatgcggacgataagaaacgcagaataatcattgtcgaactcctatcgtacaccttcatcaacattctcacactgactgtgttcctgacagtcaagttcaagtgggattctgaacctggggtttggcagagattcatgtggtaatctccttttctgtggctgacaacggttctctagatggcaagatatgatgtgatacatccaatagataaaacaaaattccgcattactgagtacaaacgatcgtgtttgatgtaggaagagtacattggagtggtctaaaaggaattgaaaaatgcttcagatgaacagaaaagagcaaaaagcatatgacaaagatgaagagctgatagctggatatagagatatgaaaaagaaaatgaaaaagaagaaaaaaaatcgagagaggaacgacattcaaacagagacccaaccggctgctctcgctcgtttctcacattccactctagcctcttcacaccgtctggccagccaaactccgaagtgttcttttcggttttagtagaaagacaaagaagagatcagccaacttccctttcgtcttagaaaagatcgtttgaatgggcgatgcctaggaagagaagagaaacgagattgggacgcactacttttcaaaaatgtgtcgtagaaactttgggcagatccagtcgttgaacccagccctgactttctaaacgacaaagctgatccgtgagctcttaatgaagagagaaatgaggctgaggaaaatggtttgaggggaggtaattgattcgagctgtcaggtgtgctaagaatacgatagaatacaatgaaggaaagagagtgaggtcaggacctatcaaaggaaggtgttgaacgcgcgatgagagagacaaacagatcagtagggatgagcgaagcaaagtatcgattgagtggctgcaaaaacttttctgtcaaatcggcaaaatggaaccgaatttgatcgtttgcttctggatctgatggggaaaaaatcatcagtttgatgagaaactcaacattcccatatgaaaggcaagaagagaacacgaactttgaagatcaccagctgctacgacggcctccaacttctttaatagaattctgtcttttgacacctgtcgctttcgtttcgactgaaaactctctactagagcagctttgggaggaattggactgggactaggtctagcgctattactgctggggttcgggccggaggcttgtctaatcggtcctgtattgggttttgatagactgaactcgaaaaaaggacgaacaaagaagtctggttgacaacgggttcatgatcgatatcaagaaaactggcaaaaagacgaactatgaactaattttgtctcctaacgtgatcacatttgaccaattcacgcaagcttgtctaaagtatggattagttgcaccaatgaccgcaccagccggcggactgtgtgcgtttacaagcagagaaaatgaagcgtcgtggatgtgaaagtacgggcggagatcgccggaaggaggtagctggataaaagaggaaacagttttagctcaaatcagagtcaaaagaagagacccttggaaagaagatatcacaaacaggccggatccaatctcttaaccaccaaacaagctctgaacatgactttggatccggtgcaatgataagaattggttcggccaggataaggcactcccaaatcaaccaaatcgaagacaaaatctttccgagaagtattagaggtggtatcgatggaagcgaagccaatatctgtttgatgatcaacgatgaaagaaaatgttgagcgcaggtcgacagattttctttgaatgtagcttcaaatgaaaggacaactgaaaacacccacgacaccgctcgtacgtaaggctctcgcgtgaggcaacattgtacgtcctgatattggtactgggagtgacggtgcgcttggtaggctatccgaagagggcactctcgcaacaggtcctagagaaagttgagtagactgattgggcgacggtagttgaacgttgaatgttgatcctagaaagggaagcgacaaggaggctgaaggtgtcggtgggggcctgagagtttaaaatatatcacagacagaagtttcagaagactcccgatgtcaaaaatttcatgcttaaacaggatttaggaagggtgcttaccatgaggcaatttcctgacaagcagcttcaagtacggacgggcctctactaaagaagtgcggcgccagatgcatcacgagttggttgaagaatgaggggtagggtaatgtgcttaagatgaccacagatttctgatgatcatgaatgaaggcgtttcagattgattttacagaaaggaaaaaaaaaccgtaacgaatctatcagaaattgtccagatgtacaaacggcgctcaaattgattgactcacttgaaagaatcctcgtttgatcgtaccgtctctcttctgcaagaacaatacaaatccaaacagcctgccttcctgctgtccacctccttctccaccgtttggatcaagtttctccttgttgattttctcttcctcgcccttgtcccttacaattgagctgcctcctccattgggtaacggcgcaaatgctgcttctctcgaggcctgacatcccaatccatcgttcaatttgaaactccacgagagctgaccttcagtgaacaagctcgtatctgggaaactcgagaacgcgatattctcagccactccgatcccccatctcctttctggtacactgagctccataactggtccgatatcgagatcaaagttgatgatcacaagtgcttcgatccatcgtctcaagtttgcccggtatgtttggacgaggaccggatcgagcgcagggtccgttcggactgatccaaggtcttgagataatccacgattggttctacaaaatcgaggaggaattgaatttgatctggagagtgctctttgggttcttattctaggaggagataatggatggacaggtaatgaagactttgtgttcatggctaatgaatcggagatatcctgatggtgactgttcgatagcggaagttctgaggatgatggagagaaaggtattctaggtgatgattgtaatctctctatcacatacggttttggcggtaccggagggggcagctctgagagggagagcaagccaatgtcttcctccatggtcggtcagaatgtgtcgcctttgtgatggtccaagtagaaccgatgaagtagttcgaagagaaacaagagaacgtcagatggttacgcagtttacatgaaggttacgatttgtaacgcctctctggctcgcttgctttcgttctctctttgcctggcggttgctctgctgttcatagtagaaatatgtttgggtacatcttagctatcaaaggaatcttcaagtctgattcatcagtaaatgatcaactgctcgactctggtcgaaatcactgtctcagcccaggatttgttatgattgcaaagaattgaaacaaaaaagttttcagtcattgagaggaagatgatgaaagctttgaataaaaagccattgctcaaagatataaagtacaagatgagaaaaagacacacctttgctgcaaggcgcgaatgacctgatctcttgtgtagttgggaaacatctctctcaacctgcagcgccatttataggtttgaaagaggatggtgtaagagtcaatcaacaaactcaagtagccacaattagatatacactcgagaaagaagtatattggactgactcagtgatttctgcttcggtaggagctctcactggacttgatgaactcaaattctccacccactgagacatcctagtccccgtcgaggtggtagcagcagtcgtcgacggccctgccggtggatttggcgttagtatcgtaggtatctccgtactgggaccattatttgtcggagaattctctgcagacggagtggcctctgattccaactgcccctgcgcagagctggacaatgtctcaactatattttctcttggcgataaagc

SEQ ID NO: 2732 - DNA, 81352 bp, Xanthophyllomyces dendrorhous
ggcgataaagcgggtacagccacaactgctgttcttctttctacccctcggcctggaacagacgcgacagtgtttgcctctactcctatccgtcttctgaacctacccagtaagtttctacccactacgatccctggtccatctcttctcgtatcgttttctggccaggcaactatacttcgtttaggagggacggtgcttcctaggagaggtgaaataaaccgatttgacagtcggactagaggtaagggaactctgaaaaatgaaagaagaggatgtcgatcgatcaagtaggatatcaacaggccaattagaggcattgtcagggtggtgtagagaaactgaaggttaccgaaaaagaatatcagcgcatccagccagaaaggaagaaatgatggcttcgaatagagaccaacaaacctgagtggaaaggccatagagaaagactttgtcgcccaactcaatcggaccgattcgaacagtatacaaatccggaacaagttgtccgtatctgaataaaatggcgaacaagattgacgtgggtccaggatgtatgttgttgatgccgaacattcggtgagctgccaacagaaagagaaaggaaaacgcgctcgagagtacggcagatagaataacgaaggacttgatcacacaaaaatcaggaccaggatgagctgtaggcatagtctgttcttttttctagtaacatgatgtgactaactgcgaatttccgggaaccatatgctcgttcgacatgtcttgatactgtgtacataagaatctcgaacagtacaagctccgacatgttgacataacatacaggttgaataaagagtctccagaactgaaaaaaagcagtagatacgtcatgtcaatatatattgagaggtcaagatcaagaaatggttcacatatgatacctacctgatggtacttcgtcaggtgaggactcaagatcaccggaacgtatggtttcacttgagcaatcgatacggccaaagataacaggccaacagagaccatcaaaaactacagagaacccagtgatgtcagcgggtgtcacatccaatacgaccctccagaatcaagctaaccttggtcaccgagacatgatgaaaccccgacgacattatatcttcctcgtttttctgtcctcttggagaaatactcaggaaggaaagtgtgtatgagatgatgatgaggaaggtacgattgcacagcttgcagtgcgaggttgaaccgccacgaaagatttcacgtgatctcggtgtatgtcggcaattgagtgcgccgaggttcccggcattgaccgaatgtcaatccggcaatcgtggattcgtccaagtgaagaatacctgctagtttccttgccgtccacatccttcattttgtactcgttctacttactcagacatcgtcagttcggaaactatgccagacaaagaagttactgctcaagagcttgccaagcattctaccaaagaggattgttggatcactattcatggtacgtctggatcattgtctggatatattgttcttcatcggagagagatagtccgatctgaactctgcgatcccctttttctccatattgtttgtctctctcggtgaattgtttgttctaggaaatgtatatgatatcactagcttcatagaagtaagttcgagttagcgttcctctggaatgtgccagggcaagggtgaaacttatcgaacttgattttcttcttcaaggatcatccgggtggagaaaagattctgcttaaagtatgtaaatcctacgataataccggggtctttgaagtgaggtctcatgaacaggatgattaagccaaatatattctgcatttttgaacgtctgtatagtatgctggaaaggatgctacagaggtgcgtgatttgagtgttatgtgcgattttggaactcgcaactaatgatgtactgatgaaacacctattcatataggaatttgatgaaattcactcacctgatataccgacaaaatacttggacgaaagccgttcgtttattgtccacctgctttgccaccagtctttgtttgtaatgacctcatgcatttcaacatttctaacctcgctttctctcataccggcttgtagaacaacttgggcccctcaagacggagccaacatctgcgccttcggccgagtccatctctggagtagttgagcaaaagctgctcggtagggaattgacagcagtcgagatgaggcgtcgactcaagatggaagaacgaccagcgctgggtgaggtgctcagtcttcatgatttcgaaggaattgctagagaggttatggagcccagaggttgggcgtacgtatctcaagtttcatcttgatatccctttcaagtccggggagagctgactgaatcgtctgagaatcgacagttactattcttctggagccgatgatgaggtgactatgagagaaaatcacatggcctacggacgagtcttcttccgaccgcgtattcttcgggatgttgtaagtttgcgaatacacgccacacgttctcttcattgcagaatgaccaatttgaacagttgaatcttgaacgcaacgtttgtttttaatgtatgttccagaccgaggtggattactctactaccattctgggccagaagtctagtatgccaatttatgttggtccttctatatcttaacacattcaagaaatccgacatcccaactcgaagctgacaatgtaatttcatctcgtatcagatcactgctaccgctctcggaaaactgggacatccagaaggagagaaaaacctgacccgagcgggtggcaagcatggtgtcattcagatggtacttctctcttttgcctctttgcatctaaaggcaagcgtggtgctgaggctgatgttttaccaaatttagataccgacgctagcaagttgctcgttcgatgagattgtcgacgctgccatccctggccaagtccaatttatgcaactgtgcgtagtctctttggtttcatgggacacaaagacgcaagttattaattacaaggttatcatttacttccttcaccatacataccagatatgtcaacaaagatcgagaaaagacaaagaagattgtccagcatgctgaatcgcgaggcatcaaggtcatacctttcttttctttctgatagactctctcgacgacagtttggactgactatttttcttgcaatcggatgatgacatcagggtctctttatcactgtcgatgctcctcaacttggccggcgggagaaggacatgcgtcagaagtttgacaactctgagggagccagcgttcaacgatcggattcagtcgaacagaatcagggagctgcgcgtgctatatcaagcttcattgatccagggttaagctggaaggacatggcgttcttcagagagatcacgaagagtatgtatttcttttactgtaatggtcgcattgtaacacagtcagtcgattgaatcatatgtttgatttctctgtggcatcaaaagtgcccctcatcttaaagggggtgcagacctgggaggtgagttctacatcctctgttcaaatttatctctcttttcgttgaacattttctatttctagcgctaggctaatccatattgttgtttttgacacaccgttcaggatgctgttatggcagctgaagctggcttggatggagttgttctttctaaccacgggtaagtcctctcccattatcctgttcgaaatcttcgatgatagggttatcttgacgaaccatttggtgtgcgattggcctacatgacactaagtggacgtcaattggactcttcccggtccggtctagaagtcttggttgaagttgtaagggaactcaaaaagagaaagctattcccgaacccaaagtttgagattatgattgatggaggaatccgaagggcttctggttcgtctatcctttcacttccactaccttagccatgctcttaatatagtttgccacattgcatcgtacacaatctaccagacgtcctgaaggctgtggcattgggggccacgagtgtcggaatcggacgaccattgctttatgcgtatagcgcctacggccaggaaggagttgagcatgctttccagcttcttaaagatggtgcgcttcttctctcaatcaatttaatgaacggtaatcatctttttgagggctgacatcgccaattttgctctggtctgttgatagaatttgagatgaacatgcgtctactcggcgctcggtcgatcgaggaggtcgtacctgagatggtcgatgcttccgctttgacgcaacacaacagctcgcccagagatgagaagtttgcttctacttgtacgtctagcttctcctatgtgatatattgaaaagtcttcaaaaactgtccactgatggacctcttattctatacacgaatgacgtaaatatagacgagaggctgcaaccttcgacattgcgagccaagctctgaacgaacctcattttgtggctctctcttccttctctacttcttttcttgcattctttatcctttgtgattccacgtgtcgatagtgttgtatgaacctgtttggattttatgtatgttgaaaacgcgtccaagagaaaaatcagtcgcgttgttttctcgtgttcctcgacgcgtcttcagaaatcaacgcgactaacgaatattcagcaactggcattgaccgaccactaacgaccaacgatcaatctctcatcaattcatcaagagtaacgagaagcatagagtgtgcgggtgatgtattccaccaatgttcgtctctcaatcaatctgttcttggagagtttggtctcgtatttttgtggtgaacggaactagacctgacgttccttctacacgagacgtttgatagacgaagagcgtccgtacatacggcaagagtaaaacggttggtggtttattcgcttcacatctaactttcgaggcagctcttaattttcttctttcggtgtgatgtttcaaaacagcgagttgtcaaaattcatcgagaccatgactttcccgaatctcctgctccgcctcctataaagaagatcgccatccatcaagtcgccccacgaacgcatatcgctgtgtcccctagcaggaccagcgcagtcttcagacctaccagattacgttctgagtttgctgtggaccaggcatcaccggtcaaattcctaaaagatgtccaaaacacgccggtcaagatcagcatagtagacaaagagaacagaaaggggttgaaggctaggtcgaagctcggactactaaatttcaacaatctggaagccgacacggatgatgaggagcctgactcgaagattgagaaacctatgaagaccaagtcgaaaggaatcgtgaaggagaaggctagattgaggatggttggagagaaggagaacgcccaagtggaggatgagcggaaggcaaacaagaaatccgggaaagagaagtctataatagcacgacccggaaaacttcaagcgaccagatcatcatcggctagttctctaaagtctgttatgcctcttgagccgggacgaaccttgtcctcgacatataaaccagtgatttcctcggaaaacatcagttccgctcctatatcaaccctggctcctgcttctatctcagctcctgaccttaacattccgaaacatccgaagcgcacttctcgtaacgttcggatctctccttcttcaaaaattgttttctctccaccggctcgccggtacagtaattccaaggagtcgactccgccctggcttacttctcggctgaaaggactagccatgctagatacccctccttcatctgcttcttcgcccgggacaggcttgggagaccgatactcagatcccattcttatcgatgaggatgaacttgagcgcgcactcctttcttcctctttgatgccaaacgaacttcctccgatatcacgcatgatcaaaccctcctccgaactagacgaagtagctgaagagttgtacgatttgtcgctcatcgaggttgaatcgcctccactagatactgctttgtatgacgatggcgaggatgaagttgaatgtgaacaggtcgattctgctgttcggctaccaatcgatcaccttttagaagcctgccatcaaatcgatcctcctctctcgttcaccgagtttgtaacgacccatcagttcttccctcattcaacatccagaaccaaagtcacattcaacaaggtgggcgaggcgacatattcagaagttttttccgtgggacttgctaagcaaaaggcaatagtgatgaagatcattccgcttttaacggacgaagaatgtgtcaagttggacatgatgggaagaggcggaaaatcaaaggagcgtcgagaggaggaggaggaggaggaggaagaggttggaccagaacccacttggtccgatccaagggatgtcgcgaaagagattagcttgggaaagctcgtcggcgagctagatgggttctgtgaggtcaagaggtatgtttttttcttcttttgggatcaacatagatctttaacctgccatcagaaacagctaaatctttctttgactgttgtaacgaagtgcatttgtggtgcaagggttttaccccaaggcgctcgtcaaagaatgggatgctttcgcaaagtcatttccagagcagtgtgagaatgcccgaccctgtaagcttcatctgtttgttgtgattgttatcaattcgcgttttcaagctgagcgcgatgtttttggtgtatcatcacattccttggtcttcttctttgatagctgtatttggtgcgtcacaacgatatgcggtactcttcatgtcgtacgcaggaaaggacttggaatcgttcgccttctcaaaaacacacgaactctcgcaatcggcaggggttttctggtcgatctgtaaaagtgtaggtgacgctgaaaagattcacaagttcgaggtgagtttcccatcaaggtgttggtaaaatgtgtcttgacatatagtatgactgacaacttcgataacgaatcaacgtggcagcatcgggatcttcaccttggtcagattcttgtcgaaccaacggattgccaaccatacgcgcccaccggtcctttcgactcgtcctctggattagggctcacactgattgactttggactctctagagtggagatgcctgatggaaacattctttggtcgcctatcgacgaggaagtctttgatggcgttggtgagtgatcttgactatatactgtgagcagttgcgggtgaattgatattgatattgatcctgaccgaaccggttggaccaaaaaaaggaaaacaatgggatgtgtacagagcgatcagaagccatattggtgatcgaaattgggaaggattctttcccaaaacgaatctctttgtatgtccctaatcttttccttactctcaacatgtatagtcaacaagagctcatccgtcttcgagggtcgtcaaacgaatgaacagtggctgtcgtttatcctatcgtctcttcttcaatcccccgaatcggtcgctctcgtaaaatcgacccgatcgacttcctcatcccgatcgaaaccgcgcgtgtcgataacgacggcgcgtgaaaaagaagcgctgaagtcgatggaagccacaaaaagggaattgacgaaaatgttgagtggaacaggaaagtacggagagttcgagccaggggcgaaagagttggtgttgtggggtcagtcaaaagggtggtgttcggtctgaaccatccttgcctctttctctccctgttttactcttcctcgctttgttgcgcttgctgtttctccaaacttgcctatcgactgggactgctgaggcgatctctaccaaccttgacgagagattaaccttttgctgaattctcatgtaaacatcctactcacctcaatcgcatacttcttcgacaactctgggctcaacatgtatgtttcgcataatcgaacgaaccaccctaaacgctacacgtccatgctatcctccatacgatacccctcttacttgacttaaaatccgtgcgacctacctctcgttctgatgcttcactagtatgttctcttgaaccgtatacaaatagttttctttctttctttctttcttcgtgctcgatgttgtatactatgccctaagctttctggacgacggatgatgattggcggtcgacgatcatgaccaagagaaggacctttatgcgatttgcccttacctttctacaatagagaagatatttcactgccatgggtgactgaaatggaagactacatcaagtgatatataaatatatacaaaacaacacaacatatgcacgattcgtttcatcccttgtctttgtgagatgacattggagggaactgacaaggaagatggagagaacgtaaagatccgataatcaagtagacgggggagtggagaagagtgcttgaggaacaaagcaagacgagagagagagagagagaaagagaagcaaaggagcggccgaagccagagatcaaaggaaaggaaaggaagagacccggttggttcagaaaggagggtccagatcaagattcatctcgcttaaccccagactctgcctctgcaggagaaccgctctgacggcactgacgacggcctcggcggtcatctgaagggtccacacgcctacagaacgcatccgttgttggttagcttgttgagatgtcacatgatgtgctagggctgcgtagacttggtttgaagtggcatcgagtaggccggctagggagggaaacagaaaggggagaaagcaaaggaaggaggattagctttttttgaggtttagatgacgatgagaagagagggggataggagacttactttcgaaaggctggtttgagatatgtgcaacgaaatccacaaagaaaccatgtatcagtgtcggtcttccaaggaagaattaaacaaatctttaaaaagaacaggcgacatacagtccaagagccatcgaattcgctaagatcagagattacctggcattgaataggcaacagtgttctgtttgcactacagttgttatcgttgtttcgatgtgaaccaaagacaatataaatcagattttggtgcgattgttacaggttcctcctccgaaagagagaaccgagagaacgaagagggatgaaaaagaaaaaagagacaaacttgatgaaggcgacgatgggtctgatgagcgcggcgttaacataactcaattcgctcggcatataaggcacggccgctttgagatcccggaatctgaggtctacatcaaccaccacaactcttctctcttcttgattttcgcttccctgtttgtcatttgcacctgtgtgtgcgtcacgagtcggttctttggtgggagacgatccggggccgggagcaactaacgctggctttcctagcggccgctgaccgggattgatcaccaatcgttggtcggccgcccaggaagaggaatgcggagagtttccagaagcgatttcgttgacgtttccgatgatttcagtgaggacggacgtaaagtcaacttcatcatctggatgacggggaaacttgacgtccatcacgccgtctagctttccagaagtaatccaggcgagtggaccagaggaggaagatccttggaggtgatcgatcgggagtccatcgattcggagtcgagcctgatgatatgatgggatgagaagaacgcgtagtcagacggcagattgagaaaagagcaaacgggaacagaaaaaaagaaaaaaagaaaaaaagaaaaaaagattgtaccattcgttgccaacgaccttccttgagatcttcgcccacagttttaccgattcgttggggtttatgtaacgaaaagagacagttgtcgtattgacctgttatcgagtctgctgactgtgtatacggacgatacgacgtctcacgtcagctttcaggaagagataggaccgtacggcgagacacaagaacgagagaaatgagaacaagaagaaagccaaaacacgtaccaaaacatcatagaacagccatttcttcctgaaccttcccaactcggccttgaagatactgacgttgaacggtctgaacccgccgggctggtagactgtacagagcagatcctcaacttggaaggaagaaagattgaaagaaccatcacctggctgggttggatgtctccactcggaaggaatccaggggtccgaaggatcccatacgacgtttcggcgatctgaggttcgtgtgaggacaagagtgcaaagaggcgtgagatgaagagcgtcaggcaaacgtctttctgagacagagtagaccacataccaaatacgcctcggacgcctttgacgagcgcgcgtttgactagaccttctccattgagccaactgacgaaactgagctcgacgtcgatctgatcaacgttgacatcaaacattgtataatttgtgtcttcttcttcttcttcgttcttctcctctttctcatctaacgaaacggacgaagcagatggaagaggatcgggatcaggagcgataagtgagggatcgccgtctgacgaaacatctcgaaggacttgaggtatggaagaatatgatggggacgtgagtggccgtcgggagatgtagacgtttcgaagggtgattgtggactttaataaattgggtaccaaggctgactcaaagctaaacaggacgtgtccaggaaggctttctcagtacagacagcatcacgggacccttgaggtaaaagaagacggtccggatcaaccaaggacgtacacgacggtgatgccagagccttgtgtgaagtaatccgagagcgcgcgagcgatataatctgcggaaaccgttcagaaggaagggattgagctggtctgttctgagttcgctcatctaaatagctagaaaaagagaggatcctttacgaaccttgtaaatccagactgttggccgtccaaaggaccataccgacgaaagtggttgttcccaaaaccaaccagcccagatggccgacaagaatccagctgacgagggcgctccactcatcagcgttgaactttctgaaacctcggatggtgagccatttccatctgattcggagtcgttcgaaccagtttgtcgagagtttgagcaggtcgtgcttcgacggacggctctgagactctggtaggagtgaggccaatcgacgcaacgacggtggatatgtctggatgagagcttcgtgagaatagggagaaggagatgcagaagagggagagggactagttgaaggcggactggaagactgcgaagaagaagaagaaggaagagagaaagtggaggacgaggaagaagaagagggaaccgatgcgggatcatcaggtggaggttcaggaggctgggaggaagaggccggtggatgcgagtgaccgaacgtcccacgtccatctgaaagcgagccatcgacagaaggtggcgaacgcgacgaaggagttggtgggacggctgctgatctgaacaacgaatgagagaacgacctgtaggaaagctgactgaacaagaaagacgagggaggacgagaagaccgtcctaacgaacgggatgttcccaacaccaacggagctgaacgacgctggacatggaagaacgtctgaacgatagcgtatcgttcgaacgatgccgacgacagcaggcgccttgacgatctatcgagcgttctacgagacacggacattggcgtatgctatcgacccaagcgattcctctctcggtctggtctgatggtggctgcctaaagagaggcgaggcctgggttgagtgctgacgacgggctgggtgtgaaaaattcaaactccggtcgagcgcgcaaaggctgggtgatgatgaggagggggggacgaggtgaggtgaggtgaggagagaagagatcagatcagatgaggaaggagtgaggaggataggtgtgagtagaggagtgtatgttggtgtgctagcaaagatgggcagcaacgtaccagatgagcacttggccatgaggatgtcgtccgtgttgatgatggagagcatgttcatccagagccgacgccttggattcctatcgtctcttccctcggacacacacacatacacatatgtatatatatttatagacacttttatgcgcttgacagtgctcagcaaggatacatggcttgctcacagactgcacccagagatgagcccgaacggaaagagatcgaacgtacagactcatcgcgctcacagaacaaggaaggagagcagccaggtcgctttcgattcttcatcatctttaccttgacatcgacctccatctttcgttcgccttgctttggctcattctttctcgcttatactatcattatgggagtccaacagtcgatccttcaggcctttaacggttctcctgcttctactccagtcagattcatcaaggtgtccatccaggacgaacaggccgtgctcgcaacctccgttccgcctagaggatctgtgaaggaagactttgctctcatcgaggagaacgctcagatctcgattacagaaccttgctatctgctctacaggctcgatgggaacaacgcctggctctttatcacctatgtgagtcttctatcgaggtttgcttgtatctcgttcacacagttcagagatggaacgatggaccgatggaccgatggaacggttgtctcaggcaatttaccagtcaaccaaccaaccaaacattgagctgatctctatccgatgaaacaggtgccagatgccgcaaaggtaagagacaagatgctctactcgtccagcaagtctcgactcgtcaaagctcttggagagaccaattttgtgcgtgtttctccctggtgtatatcccatgtccgtccagattcaagtcctcacgtcacattcgcctgatcggccgtcggccgtgtcgaatcttagaccgacaccatccatgccacctcgccttcggacttgactcctcgggcatacgaactccatctcgcagcactcgccgctcccaagccactcacagagaaggagaaggcgatggcagaggttcgggcggccgagtacgaagcttcgaaggagggatcgatgaggggcaccggtggaggcgtcagaggtggagccggtccgttgagcggtgtcatgggcgtcggcaagggactcgtctgggctgaaggtatcgagcaggctctcgaaggactcaaacaggatggaaagctcgtcggtctggtaagcttcgttttgctctatctcgttcatcatctctcccttttttttttttactggctcagcagggcatacacccttcttaactctggtccaagaagctgatccatctattgtgatcactttcacttcacgactgtgaacgcgcacacccacgtccacaaccacacagacgatagacccaaaatcgccaaccaatttgacgttggccgtgaacgagtccagcacacttgccctattccatacccatctccccccgtcgtcccctcaatacacattcttctcttaccgaccgacggatgcgtcagccgagtcaaccccgatcgtattattcgtgtacacatgtccaccaaaatctccgatcaagatgcgaatgatctactcgagcagcgtcggtagtctggtcgccaacgtcaagacaaaagtcgggattgaggttggcaagaaggtgagaagatggatcattcagattcacacaaatgcccgctaacccagcttattattttgtttttgtttttctctttcatttctcctcatagattgagtcctccgagcccgactcactgacagagtccgaactgctatccgagatcaagcctttgatcagtacaaaccctatccggtctttctccgttccgactccggcaccgacccgaccgtcaggcgttgctccgaacgcttttgcctcatccttttctggttcaactacagaatcaacaaacactcttccttcgtctatgcctctcggttcaggtcaacccacgagctctggaggaccgaacggaggaaacacatttgccaggccgagaggaccggcaaggaggccggttggcggaagggtggcggctgccagaagcgcgttcgaggcggccaatcaataagatctgattcatttcttcgtctgtagactcttcgagggcttctctcttccttatttttcttttttttcctcctttcctcaacttgttgtcttgataaagatggatgttttctgtcgagacgttgtgatcaactttgccttggggaaatttgttatcttatcgctcaacggttttatccgatctcgcttcttccttttcgtcatcaacgtccatcatccttcgtctaggccacattcgctttcgtccttctacatatagaaacactcacacacatacacatacacatacacatacacatacacatacacatacacatacactcactcgacacagaccactcagatggacgctaaggacgcactgcatctctcgtcctcggttgctggaagtggcataggtcttgctgtcaaagggactcggtttggtgtatgttcagtgctggccactttcaatctctcctttcgttcctccttctttatcaacaaagcgtgtggctattctatgctgactcgctcgttgaactctgcttcttgatacttctgtctcctctttcttcaaccgtcggcagcttggtatcgcccggaaggtgtcttctgggttcgccaccgtggcgggcacagttctcgaccagacgttctctctcggcccaccctctgaaaacttcatgtccggcccgacttctacgttcttccaagcagccacgacctcatcgtttgatctgatagagacattagcgatcgctcctttgcttctcactcaaaagttcacgacgtctgctctttcgacagctgccgaggtcgcaccctacttcttccgttcatcctcgtcgtccctcgacgatcggtcgttagaccaagaagggttttctctcgctgctttcgtcagactggtacaaagagagctgaacgacccaactcagggcctggaaggagtcacctatagtctgacaggcgtgctgacctcgatcagcgcctgggcaggcttgcaagctgtgacagccgaaagatggggcgacaacagattgctgtctggtctaaggcagattgatgtcggtagagagtgggagggagtcaaccaggatgttcttaaaggagaatgcagagaaggagagagggctgcagatgactcttcatcaatattgacacctccaccgtcgtcgtcgccgccgccgccgccatatgaatgtccgacaggccaagggcaaagtgttctgcaggaagaggcgggaaaccaggtgaaggatatagatgacgaaaaggtcaaggtaacagccaccgaagaaatcacttcttcactcttaggaggttcctttacctcctgtgtcatctcagcagaagtgggcacgaaacgaccaccatcttctccttcgtcccaagcgacttcctcgacgtcgacgtccagtcaaaagcaggaggtgtctttcagaacgaacgtgatcaggttttcgaggatctgtctaggatcgtacggaggatccggactcttgtttttcggtgtccctgttcctgtcaaagaaggttcggtagaagcagataagaaggagaaggaaaggcaagaggagatggcaaaggagaaggagaaagcaaagaacgctggccctggattttgggatactgtttgggggaaacacgaccaaattatttgtaagtactatactcatgatgaacacactggtgttctcgtctctgacagctcttggccttgatgaacgaacaacgctcttttccttctcttctggcgcgccagtcgagcattacgcggagataggtgctgagaatgaagtatcgatagaaccaacggatgtgcctgcttcaccgagcacagcagcagcttctgcagaactcttgagtgaccaaatgactgagacagaatcgaaagtctctggagcggtcgtccagtccgtccagggccttccccggttttggattctcaccggtttgtctgttatcctgctgtatgtgatcgtgcgatctggatgcttaccctttctcttgttttccttttccgtcactctggtcaatcacagatcatcgacggcaagaagttgtgctggctctaagaggaacgatgtcgctaaatgaagttcggcgcattatctttactctcttcattgatgtaccaggtactgatgtgtgattgcgcgaatcgtctcattcagttggctatagacctaacgtgcgactcctccctcttcacgccggcctcttcgtcgactttggtttcacctccgagagcatacctagttcactctgggatgcttactctggcccgtcagatggcttccccccgaggactactacatcaagccgtccggaaggctctggaagccaacgaagggtacagtctacagatctgtgggcattccctgggcgctggcgcgggagctatgctgggtatgatgtgggctggtttggataccggagagacagtgagggattcagaattgcccgtgggtagaaaggtcaaagtgtgggctttcgcttgcccgttcgttcactttcttgtccgctttctcgtcactttcttgagctgcttttcttctttgacgatactgatgcttgtaaaagaaaattgggcaaacagatgcatcacttccctggaactatcccaattgtccaaaggattcatcacctccatcgtcctctcttacgatctcgtttcgcgtctaagtctgggcagtattcgggacatccgatcggtagttgattggttaagctacgctacgaacgacaagggaaagggaaccgagtcaacaggtaacgaaggcgtagatggcttgttaggcaggttggcgagattcaagttgggtggaaagggaaactggatcgataaagaggggaggcaaagagaggaggactgggtgagtttgcgcaccgtcaaactctcttcgaatagaactaaccccaagctcgcacacacttttctttttcgttctcctttgtccctcgatggggaggggaaaaacaagtttttatcattaagaaagacgctttcagctcagatgcaagcacatcaccttttcccggcaggaacgacgtttcttctcctgcgcgatacagaccttcaagcaaacacattggcggaactgccagtcaaacaggggaagggatcaagggtgtttgaagttgtcaagccagatatagtttttggagaaatcgtctttgatccagggatgttgaggttcgttcttctctcccctcctgtctatctattgtagtctgctgtgaccgacattcctgatgattcttcgaccatcgtcttggggttttacgatcgacgagctactctagtatgcacttgcctcaacaatatgagaaatcactctcggcagtctttctctagtcagacaaatctatcatctattcatctccttttctctctctccaatttcctttcttcctatcctcttctcctcctttcacatagtactttcagatggaccaacacatatttcataacgacccaatagttattcataccattgatccaggcgatagcccgcacatatcttctttcacgatctagagactctgcactataaattcaaaacaaaactccgattcatccgatcacatgaattgatagaagaagaatagagtcggagcgaggaacaagcgcgcttcgttgacgcggaaggaggtataaacacaagctacggtatagggaagaataagaatccgatattctggcgaaccaaccgagcacaaatcctttctgtctacctccgtctcccagctagatatggtcggtgttggcaagcaggagacagggagaaagaagcacaggtcacagctgttttcgtattctttggaagcgcgcgtctaaagggagggtctttgatggtctcatacggttgcttctatttccttgctgacatagtacaacctgcgcagggagattaaagcacaacaaatgtttgagtgaatcgcaacttaaaacagaactgaggaaaaagcgcacctgcttgctacatcctcaacgacccagtctaaaccctcgaccagattctcacccgttactgctgaacatggttgaattctccaccgatgagacttgatcgatgggagatctagagcctgataggtttgaatcgataggaaagatgaaaaattccattaagcagcatgctctggtcttctttttcctgtccgaacgaatgcctcaggtaagagaggagaacaaacctccttgatctcagcgggtgtaagcgcattgctgacatcttgcttgtttgcaaagatgagaagagttgcacctgccagacgctgtttcgccatataattcgtgaaggagaacgacatcagtaggaaaattctgtgaaagaaagtatacggaagatcaaaacaaacctcttcgaccaagagcgtcgccaactctttcttgcaatcttccaaccggaatctatctcccgaatcgactacccaaactgtacatattcaagaaaatatctgtcaatgggggtctagctctcaagaggaacatagggaatgccagcagtcgacagaagaaggccaccaaccgatggcatccgtcatttcaaagtagtttctccagtatggtcgaagagttcgctgacctcctacatcccctgattaagagcacggcacacacatcgaagaataatcttgacacttagtcaccccgatacagctgctttgagtgaaaagatgataagtgaaacagaggacttgcaaacattcaaagtatagctcttgtgggcgaacgtccgaatctcgaaaccaagggtagggctgacggtcctgatgtcttctccgttgagtttcttgagaatcgtcgttttcccagcgttatctagacccctttttgtcccatcgtacggttatatggccggtcaatatagatgagaatgaacagattcatagatattaggtagatcatcaaaggggagcaatgaataaatggaacaaacagaaatagaacgcgcatctcgcgctctttgaatctgttctttctgataatcgtcaagagtcccatttggctagacctacaaaagaggtgaaatggctgtgtttacggatgcagatgtgtccgtgtgttgaacgaagagatgaatgcaagatggtcgatgtctgatggtaggatggattggctgtggaaggatgagaacgagcgttgagtcgtccagctaagaatttcccgttccatatccagactttcattctttaccttaactccactctcaacctttttgccccacctctcctctctttctcttctacgatgtctatgggtcaagaaagctacagtgtcaggttggtctgtcttccgtctcttcactgccactcgccgatgctcatgtttgttcattgccgattcctccagggaagccgcaaagacgtactttcctgatggctacgtatgtgcaatttccgtttctctgttcttctcttcttacatgacaattcaacactacaagatctgacccaatcgagatatctttcctgtctcatttatcatgcagacgatgtctatggctatgcgacgagctcgtcgtgcgtacttctgggggaacgtccgtggaatgatcgccacgttcgctttcggaggagctatcttctactactctatcaaggctgtctctcaagatgactttgtgcgtgtttttttcctattttttatgtctcacgaggaagcttcgactgttcaggggatagagtggctctctgatggacaaggctaagagaaagagaaaacaaaaaagaccccaaatcctacttctttacatccattcttcagatccatgcgtccaccaactttatcgttcgaccaagatacatcttgaagccaactaaccctctcatctcgtttgcttctcgttttttcatcctacacttctataggaggatctcacggaccttattccttctgccgagatccgagcgaaaatcccctcgctcgaggatcaaacggctgccaagaaggcttctcgtctagccgcttcatccacaacggactctatccttccttctacattctcctcttcgtcatcttcgtcaacatcatcagcctcgccatcgtcgtcttctagtccgatactcgcctcaacagctacgacagactggacatcgttcggcgtggcttcaaagttgatgtactactggccgagaggggaaggtttggtcaaaggagcacctgcactggacaatttgggtaaaatgggtgataggaggggtacaggatgggcagatgccgatagggtttgagactctcatatttggtttcagtcagcagggttcacttttatatgatgaacatgcagtgatcgatatgttcgcctatcgaatggaagatctgcttgcaagtcatctgctgttcagagccggtgaaaaggcaagagactttggaaactagtgagatatgttcgtatgttgatagacagaagaaataagttggttgtcacaacatatatctagtatttatacactaatgcttttccgagtccgagcgctatggatatacgtcctccaatatcttatccttcgccactattactctctatcttctggttttaatgaagttgtcatgttgaatttgagccaatcctctcttcttcttccggatgggaacagagaaacgtctctctcgtaaattcacgagaaaagagctaaaggaggatttagatgttggttgtttgaacattccccacctgaggtctaagagtcttgaagacgatgagttaaatctatcagaggccaagttggactggaccaggttcggtcgaggtcttatgaagaaggtctcttgcgtcctcgacgctcgtcaaatgtcgctctcgtcacctttagatgaagaatcaacaaattgtctcagtgcgcgccgaacgacatcaacagatcactaggtcgctagatgagaaaaagaaaaaggcgtacaggtggtagaagcgcgtcaagaatggattcttcactcaaggttgaaacctctgacgcgaggtaaggtcgcaatttggggtacagtatacaccatgtatctgctgtcgaaagatgtcgggaggcggtcgccaccaggccggccgtgcctgcagagaggaggaggaaacaggaagggcgacaaatgttactcatcgttcgtatttacccatactagcgcgtgatgagagagaagctgatgaagaggataagaacaaagaacttactttgccgaatccatacgtttggatgggaaaggaagggataactcttgcccagaagctcccacaaacgaggacgtctgaacaggtcgagttccaccaaactttggaatgaagcaataaccctagccactacggattcctctgggtctgtaattcaagataggaggaagcggttgtgtcggccaaacgaaggaaaagtctcttacgtcggagataccatgtttggttcgagcatacgtacctagtaatgcctcgatcatcatcggaaagataaacatctccagacttcccgccccgacgaatgcagctacgccgacaacactctcgaagaatgcctctctcaacatccaatccgcatcgttcaagtaggtaaacatatgactgagtacgacctcgtttgtttttgaccggccaaagaaaaggcaaaaggttgtgatgtgtgcaagcacggcccgtttgaccgctggagaaggatctgaaagaagactggagacttcgttttgaatgatcctgtggagctcttctttcgattcttcataggtcgtctgtgaagagaagatatataagtatactggctagacaaaccggcaacagagtgataagatgagccaacctcattgaatgcagcatgctcatccgtctcttctgaaaatacagccgtgcctcccctggaccggaaactttccgagatttccagaaaccgggagcctgtctctgttaaggagcccattgagctggcataggcgatacgaactgagacctcttcatcctttgctagatgccatgcatttgggagaatgtactcggttacaactgccatatttgaaggggtgactactgtaattccttcaagctaggtcattccagacaagatgcagacaagaacaaaaaaaaaaggtgttagtaagcagaacgaaaagccaagtccatgttgcagatttgccggtgggcaaaacctcgctttctgttgagatacaaaattgaagacaggaacgaaccatttgagctaacgcatgaatggaagcagcgcgcactccaggtgcctcgtctgataacaagacaactaagaacgggcatacccggtccagtttggattcatccgataggtacacacataactcggccatgatgtcaatcgcgttcgtcttagaagatggtcgtcggcagcttcggatgttggacgtgatgagagcgaggacgagaagagctaggccatctgttccaaaccgcaggcgtgtgagccgtcatattttacagattgaaataggtctggagagcgctacattaggaaaaatcaccttcagttatgatgtctttcgagacttcttcacctccttgatcgcgatgtatatctagttgatgtttgatatctcccatatccatcttcaatctgtcaatccgttgatccgaatcactaggcagttcgtcttcctggccgaggccaagctcttcattcaaaggcgcgtatgtccgaataaatgccaaaggagaaaggttctcttgcaaggtgacgttgtaaggatggaagaatgagtagaagaactcggacagagtagttcctcgatttgattcgagaagctgttcaaacgaaggacgggatgagggttcaagcgaagtcatctgacgaaccatggcctattgtatatgcgcgtcgtcaacgttatcgtcttctgggcggtgaacataaagagaacggaacatacctgaatgcctagatccgggatctcactcaacacagcctctggactgctctcccccttgcgccaaccaagcatgccactcagactgaacatgtcctttccctcaagccagagttcacaaatcgtacatccggccgaaaacacgtccatctgttcggtgacctttccgtcacgtttgccttcctccagactgctctccgctcgtttcttctcggctttggttccggaggcgtaaaacctttcgggtgcgaggtagcatgatcggcgctgcgacatgtcgaagaagaaggaaaagtccgcagggtcgtcttcgggaatgtacaccggtttaaacggtgccagatcggtgatgagagcccagttgctcgtcgtcacaagcacgtttgaaggtttgagatctccatgagagacctgaaaggcatagaggctgagatggtgagctttcaatatataccaatgatcaaagagagacgtataatcgaacagacctttctacttctaagctcttgcatccctctaaggatctggtaggtaagccacttcttctctatattcgcaagaaagggtctcgtgctaattattgcgcgaagagttagtcaattacagcccttgagatagatagtacgcgatgaaaagaggatatatacctaatacggtcatatagatcacttgccaaatattgtctaacgagataggcggcattctctgtttcgactatggcaacataaggagagatattgggcgcgttctctagaatctccttgtccgctaccgaatcaaattgagtattgttgatagtgagtatatgagacaagatcgggaacatccgagtataagatgaatattcctgcccacctttgagccgtctcctccaaactatgaacggaataggctcgtttttaatgaatatcttgataagcaacggtccgtttcggtgtcttcctttgatagtcttcaagaatctggatgtgccgatactgaattctcagacgaaccaataacgtgagtctgtctgcttgcatccctatactataacgtgtttgacgtggatgggccaagaaagctaactatagaaaggccgaacctctgctcgtagacgacatcctttccaagttcttcgacatagctgtcgagtgtggtcgatggcctgggagcattgactgccctagctgggagatttcccatgtgtttgcgtgtgtctgtctgtctatctgtatgtctaccagagagatgaaagcaagatggtggttgatgatggttgatagcgattgatgatcgttcaagagattaggggcctaaacaagatcatcttgatcacttaagtaaccttacgtaatattcatttactcgtctctgctcctgtcatcctctcaagagcgcatatagccatccctcaccatcatcaccatcgtcacctcaggttgctcgtcatgtcggcaaagaaactctcgtacgtcctccaaagctctccaagtcgtatcttggtctgttcctttaagcgctcattgtattttggtttccttggccactcatacaaccgtcttacagcgaccaagaggtcaaccaaatctaccaacgatcaaaggtaagagagtatctcctttctttggctgtacatgtatctgtccgaacttgaatcgctcattacttgtcgatttgggatacagaacgagcttcagggaatcgctcagaagattggagagcttgagggtgaagctgatgagtactcgtcagtatctttatcttatgcctctcttcagtctttggattaagtctcatcagtattatacggtccaatcatatcatatgatggaacggttctctcttttctcaacctttctttagactagttctctcgacacttcttcagacggaagttaaggacccgaatcgaaaatgtttcaggctgattggaggtgtcctcgtcgagcgaacagtcaaggatgtcgtcccagatttgaagacaaatagcgaaggcgtacgctctctttcacctgatatcttttccctctctccctatatactgctgatactgatttttcgctaatatgtcttgtcttttgtcttgatcgtcgatctctttacatgcttccacttctgataacgtcgaccaattcgtccggtatcaacctcgcctttgctcctctcctactctgccgaaaccatgaacaatacatgcctggccttgcacccataccagatcaaatcggttctgtcatctctgatcacccagtacaagaccagagaagaggagtttgagaagtttacaaaagataatggtatcagatcgtcgactgttcagcgcgcatgattgtatttattatttaaaaaaaggggggctagaaggagaaatggatataatggctttcagacgagaacaccttctgctatcttttctaacttgatatgaaatcctctcagagagtagaagaagagcatgacgactagaacagagatgaatgtcagtaaacatatggggtcttgtatttgttcacgcccgtcttcgtccattacgtcaaccatcattcactcaacctatccaacccgactatggcagcttctgtcctcagtacggtcgaaactcttcagaaatgccttcttgaaaggatcccatttgtattcaatctcccgttgatggatatcgtgggtgtaccgagattgtgtgttataatggaccaactcttcagagagacaaatcgcgtcagacggccgggcgagatgtatgatgacgattcagagacggacgagaaggcagatggtacgaagaaggcagcgggaactcggcctagcttcatagcagaggtaagctcttattctatcctcctctgctgccagctctttgttaacgtatccgttttgtcaatccttcctttactttgctttccgttctctggagtagatcttcaccatcttgactttgatctttgcaggcgagacgattctcccacttatacatccagtacctgcatcgtcccatgcatctcactcgattcctccatctgcttggttgacgaacccaacaccactcgtcatgttcaccattgtccattatcttgtgtcgagaacaggattaaacaagtttgtcccgacaaagatgagcgcgttgtgggagaccgcgttagcagggttcgatgcgctggtgagagatctcatttgcttctttgtcctcgcttttacacaaatgaaaccgtctgaccttctccccatcctttcgcacttcttttacttcttcttctcttctcatcatgtacacttctagggtcgatcgattgtggtctgtacattctttgtagatgcgtttcttcagaaaccatacatcgcttcgaattggtacacagtgatcatcctcacctggatcggagtctacgggtgtggtctttcttcttcatatttcgttctcctataatctcttaccctcggctagatctgactctctgtgcgcatcacatgcgtcaaaatacatacttaaacagaggtggtctcgttgtcaatgcgctcgacatgttttcctctgaatggaagtttcagactcccggggagttcaagccctggggttggacgacggttgatttttgggtgtatgttctctttccaaatccaagaaaacctactcattcctgaaagtccctaatcttgtgtgaatttctgatggtttcttcgtgtatgtttcgatctgtttgagattcaaccagaccccctgtatcatcactactctatctgactcttctccaaccacctctccttcctcctgtcttcgactctctttcctctctgtcattatccccgttatcaaccaaacacatcgcaccgtggtcaccgtatagtccatcagaagcaagagcagtatgcggcttattcctcatggtcgtctttcagatcagagcatactggaactttgaaggacagctccgggtgagaagggtcgtcaaagaagcgagaaagagaggagaaaagatcaagacgatgtaactacgtgttttttaactagatggataggattgaaccaagtgcaatgttctgtaggtaggtagatccgttcatgtttgatcgcgattggtctgtaaatattatatctcttttcctatgcgcgaaccagtttcttctctaaaagaacaagaatttcgtacatcgagcaagaataccaaacacggttgggtaaagagagaatacaagatgagagaaacctaatggcgagaggaaagaagaaaggagaaacaagaagggatattcatccttttggtttccaaagacccttcctcgtcatattcgctggtgggaccaatgtattacttccaccgttcgtcttactctttccaaaccctaccgagccccatcttcctccttccttgtccttgtccttttccttctccttccctttgtcttcgctgcctctagtccgtttggtggtcttccctgatggaccgcccccggcgctcgtaccgacactcattccatcagaagatgacactctggatgatgtcgacccaggcccagcccgagcctgaataggaacagattgatgaccaccgatcttgaacagatgagtcatcgagtttcgtttcgtcagcggagggtcttgatgtggatgggtttgatgaccaaaaggacggctggagacgacgaatgatgaagacgatgacgatgaagcgggaagtgacggagtcagcactggttctggtgctggtggcggggacattgaagatattacgtctgatcgaccgatcggacttttttgagtccgattgtctagaggaattggagatactggtacagagtctgttgaactttcgtttatcagtctacttgatttaaaaacacgaggtggtgttggagacggcggaattgagtgtggtggtcgagatggttgcaaggattgcatagtagttccctcaccaccgagcggaaggatggtagaggtggaagtagggaagtaagtcgatcgagagggtgtgggcggaagagaagttgggttttcggatataggagtggcgtatgctgattcactaggtgttcctatgaaaggaggtgtactaggttgccttttggtcaacggtgaaggtggtgaggaggatccatcgttttctttaccgtcgatattggtgttgctgttgggaatcttgagatacgataaggacggccgagaagatgaggatggtagagaaggcacaaacaccgactggaactgcccaagctggctcgtaggtggcggaccaagttgaaagccctcgaatcctatgaccgcaccaacctccctgtctccttgccttcctctctcctcgtcttcctcctcaacaccttcttctcgctcctgcttctgctcttcttcctcggtctcagtctcactctcagtgcgtcggaaggaatccgggggagggaacgtgctaaacgtaggcgtgatggaaggaacagagttactccgttcagggacgttctctccatatgggaattgagggttccgacgattgagtctcttgttcgtcacttgcgttcggacgagttcgtatatgatcttctgtagttgagctctgcatccagttcagatcgaggaacggaacgatcagtaacgtatgacgaagaacgacagataacagacggacagacgaacgagtaggagaagtcactagctgtgaacccgtcattgttcctcgctgcaaactgacaacctgaggagatgagaagccggacgacctatcgatcgtggtcatatcgttagtctgaacaagagagacacaatcaaaagagtagaaggaacaaagacatacatcgagatgaccccatgcgctagcgctggtttttttttcggacccacaaacggaatatacgcgtttcagaatatgcgctcttctcaatcacttcctcccgttctctctgtgatctcgtcaaaggaatgatagcagacagaattcaacatactagtgtagaggtgtgtttccgaaaatatctggcaagtcgaagtctgctcctaagtctaccaaaagctatgaacgcggtcttcaggtaagtcgacggaacgtcggatggtctacctgcctgataggccaatcatccgagaaagatagacgatgaacgagtcttgacgactaactttgacgaagccttcgttgccttcttgagcagctacgtgcaggccagtctttcctcctacattagcccaatccagaacgaaggagactgacatagcccatgatgaaagattccaaccgaagaccgataggaagaaaatgatagtctatcagccttctgtattcagtatatcgccttctttgtcttgctatgaggcagatgacgatatgcgcaagagatgaaaggaagatgctcggaacggacatcgatcatagtatattgaagccattcgaatggccgcgccatgttggaacacatgagctctcgatggaggagtatacagttgggatggtaaagaagccaacagatgaatcaacgtgttgttttccgagtcctgaatagagaaggaagggaagaatcaacgtcaattcagagaccttgatagggagccagaagagaaggtagaaggaaaaaacgtaggagaactactgactctgctcagttcatcatcatcatgacctgccacgacgaccaaccactcaaacatgtcttcattcccacagatcgcagaccacgataatgatgtatgcatgttcttgtctgtgtttcgcatgtcatatcgaccgaccaaccttttaaccaacggaaggttatcctctgttaccgttgtgacagaacgggtttgacagacggttgatttcgaaacgacagattaagtatgtcggaaacgtaaacaaagagatacacccgtgttgagagaacagattgaagaccaaatacaactaatgttcaaaagacttctacgtgattgaaggagcatgaaagcaaagaagacgaaacggtcgtgagctgaccttgaacggcccgtcttagccggacggtcggatctctagaagacaacatatgcttttgtccaaacgcggcgagggagaaggatggggaacggttctcttagagagtgcgatctgtccttcctgggatagatctaaggatatgagacgtgtagaacagattgaacgaatatgttatggcaattatacgagttcgataggtgggttaaaggaaccaaggccgttaggatgaaggactgattgtttaatgatctctctgctgtataaccttaagaaactgtcggtcggctcggaagtgacaaagacgatgatgatgactacgagctgtctctgcctagatcagatatactctagagtgaaagaagctatcggacagaaactagccggaaggacaaatcgagtgatggtttggaggatgtcggttagcacgatgaagatgatgatgatgatctcggtctagggttccaagtcgctatcgttctctcgaccaggcatactcatctactgatctctcgttcaagatcttcatgagcgtcatgatatctgaatgacaacgcatgctgttcttctagttatatagcttttctgttgtgctgattgttaattttattcagccaaatgatcggtaggaacagatttcgttggcaggcaaggctatgaagatagtctcagttgcagcttctttctaggacaccaatctttctgggtcaatttgcagcatgatcgatgtctcgaagttggctaccttagatcaccgcccaccaatcagttcttaacctaatcgtaattcctcttctccccttctcgagtttgcattagaagccaagacttgttaagtcgattatgtgttaggagaagctcatgatatttcaggaaaacatcaaggccgggcctctccctcaaaggtgcagaagagaccgcgaaagcgagtagaagcaaggagcgaagaagggacgacgtccagcaaagacgttataaactagcgttttagggctaatttacttggcagcagcgttggcgacggcggggttgatcttcttgccatccttgaacctggctcggacggggggagctctgtatggacaagggagggagaaagaattagaaattgagaaaagatcttgacaagggaagagcaaagaagactaaccggttgtgtcgggagttgggggccttcttgtcggtagatcgcactcggacgatcttggagtggatggcgcaagagatgcagtgctgaatcttgtggtagagcttgggaaggacgtactctggagaagtagcgaaatgggaagaaaaaaggatcagtggtctgactagaaaattgatcaaggaaagagggaaagcaaagtgaaccaaccagggtaaaccgaagcgtcgctcatatctcggacggcagcagcctcaacaatgttggtgaccttgtacctcttgatggccttgtcctgtgagttttgaggaaaaggaaggaaacagttagtcacctgaatatttgtgaacctgagttcgagcgaactggtatctctgtatccgtcttattgaatcattctgccacccttgatgtcactccggtcctttcattgccttcctgatctcacgacctcttccttcttctgactttctctaagagcctcttgtgttctaagcgaaaactaaccttaggaacacatcgggagcagttggcacatcggacgggcttgacgtgtccacgtcccttcttgtttcgtccggtatttcttcttttcttggtcatctagagaagaaacaaaagttgtgccgttgggagagcgaaaccaaagaaaaggaaagaaaagacaaaaccaatacatggcaaaagagtcagagctgccccatccctaactaacaggcaaggcaaacccatcataggtatgcctgcacaccaaaggggcctgattgaagaacacataccttgctggatggaaagaaagagagagaaaaaaaggagaagggagaatttttcggcttggacgattcgagcgagcgggggcgagcgacgctttcgtttcaaactccgacagggcaggctcattttcactcgcccgtcacgcccgtatgggcacagcctgcagcacgtgtaagggcagatgatgcacgtgctcatacttacggtcgtatgacgtaagctgtaaatctgtagccatggctacgttaccattaaccttgctctctctctgccctacactctcccagaggtttctctgccatctctatagtcacatcattacaggcacacacacagatccacatagcaaatggcatcgttcgaaccaccagcaggacacaccagaccagtcgtgttcttcgacatccagatcggagagaccccggcaggtaggatcaagatcgagttgttcgatgatgtagttcccaagtgagctggttcttcaagtgtgttctcggctcatgagctctgggcgttgaccgggttttctatttgctcttgtgtgtgtgtgtgtatgtgtgaaaggacgtgcgagaactttcgacagctttgcacaggcgagaccaggttggtgcatacatctttatgttagaatcacatacgtttactcaacttttctttcgtcggccgtcttctatcaggcttaacaacgttccccaaggatacaagtcatcaatctttcatcggtacgagaatcatcccgttcctttcgctctctttccacgccgaagcgcgtctgacccgtccgcattctgtctcttattcatctaacgccgtagagtcatcaaggatttcatgatccaaggaggtgatttcttgaaacaggatggaacaggctcatggtcgatatatggaaaccagttcgaggtttgtctccttgaacgttatctttggacagggaccgatgcgaacgactcgtctgacgcgtctttttctcttcatctcattaggatgaaaactttcagttcaagcataccggcccaggactcctttccatggtccgtttcgtcttttttctttcttttactctctcattccttgcctctttctttcaatcctgacaatagatacatggtaacaaaaaccgcccaataggccaactctggaccgggaacgaacgggtgtcagttcttcatcaccgtccaaccggcggatttcctcgatggaaagcatgttgtctttggccgagtcaccggtttgtcccttcgttctatcgctactttttccctctgattgagcgcgcgtgtggaatctcaccagccatgcatcatttgttcttgttttttcttctctcttcctgtcttcctccttcgtgtgttcaaacactaacatgaaaaaagacggaatgctgactgtgagaaagatcgagaacgtaccgacaggtcctaacaaccgaccgaagttggctgtgaaagtcatcggttcgtgcctactcttttcctttcttccactttgggttgctagtttcgactttccctcttcaatcctctcctttgagagctcgttcgcttgaactgtttgactaaatgttctctttgtttgtgcttggacatctcccgggatttttctgatcgagcagaatgcggagagatgtagacacgacaggttaattggaaacagaaaattttaaacaaggcccttcgatccatcaacaagtctagaaagggaggggaaggaaaccgtctaatatgtatacacccttttttcctggggaggcaatctagagaacgtctttgtccgcaaattctgatcgaaccacatacggaaaagacagaaaacagagagtggaaagaggaaaagattcaccaggatctaccgaacagaaaatactgtcgacgcacataacgaaaactcagagtcctttattgaaaaagaccttctcatccagcccaccattctccgctcttgcgaatctctcaaacttgtccttctcaagttttcccaagctgacagaagctctctgagggaaaacggcgatggaaggaggaaggaaaaagtacaagctcgctcctaggatcgacagttgagacaagttttcccaaaggacctttctaggtccttggaaggctcctctggctgccagcgccgtcattatcagcggcgggaagatgagcgtcgggctatgttggggtgagaagagctccgtgtcagcgaggctcggtcggagcagaccgacgacttgtacagatagatataaagcaaagggtgggaaacgaaaagacagacatgttggtcaacacccgggaagcagcactctgcccgacagctctcgttccggccacactactctttcctagttcttcctttgtctctataggtttggcgtccggcgcgccctggggaggttcagttcggttcagtctgaacacggtgattccgtctctgatctctttccaccggatgcatgagatactagagggaagagaaaagataagcacctggccgcgagaggatgactgggtttagaatagactgaaaggaagaaagacaaacttgacgactccggccgaggctacactcgcgaagggaaccatttttcccaataattctttcccggactgactgatcaccgagttggggatcttcgggaccatcctagagagtgagactgcgatgagcaccgaggtaagagtggccgaggtgtatgcggtaagaagctcttgggtggagagtgagatcgatttgttggcgttgttgctttggtagtgttaccaaaggaagatagataagagggttaggcgactggagtgagcagtgaggttgaatggaacgacgaaaaagaaacccactagttgacggccacgttgagcgactggttggcccactgccagaagatcaatgtccggagctggatcggacgcgtgggttcaaccaagatttagcatgtcgatcgttggtctatcaaaaggagcctacttaccgatggattgggcgtcagcatacccgcgcagatgacctgagacggaaaagaagacgtttggacatcaatattgatctgaccgaacgaaaaaaagagacctaaggaaggactcaccaagtttgtcggcacaaaggcggacattctgaacaacagcggcacggccttaccggtatcgggatgaatcgaggaatcgaccactttttacgcgagatgaacgtgatgtgagtcatagtgtcaccagacgcccgagaaagaggatgagcgagagctcaaagagaagaaccgactacacacgctgtttgtccttccagaactgatctctttcggctctgcctacccagacgggtcgtcctttagcctcgtcaatcctctcctgagcttttttaactgctgccgaggactgttcgagcttggagaccggtgcgagcaaagtgagtggtgaggtcaccgtgtaaaagtgcttgagccgaccgatgtacgtcgtgagatcatatctatctgcgctcagatcgaccaggtctccgtttgccggtagagtcgacgccatggctgtatggtgagtgaaggcgagggtgaaggtgaaggtgaggagcgatttatggtgacaagaaggaagtaaagatagaaagagggtccggcgcactggccatctctccgaacgtaaccgggctagggttattgattaggtaagcagtccgtgcttctggtcccagatcgtgctctaccaccatctatccttccctgggacgatgaaaagctcaaaagaggaaagaagagggggaactaaatctactgaatcaacttgatgtgcatctctggagcgaattgggatcgtttagatgagcgcaaagacgaggtagggtcttgagggcgagtgtaaccaccaggctgctcgacccataaccagcgtaattcctgatttttttccaattttttttctttttttcttttttgctcttttgctctttgcctttgctctttctacccagctaccatagacttttccttcctggtccttgccgattacagctggatcccatcgtagagtgagtaccgcctggttagctatccgtatgtctgctcttctggcttccttccttagaggcatcagtcaattccatcggccggccggtcgcctatcactttccggccaacgaggaagaggagaaaaaaaaagaagacagagagagagcgagagagagcagggaacgaaggatgagggagcgagtatgctagctccttgctggaacgcccgactcaactggacatcgtctggctacctagacgagctagaagagatctccttttcgcattcgttcattcaatagggagctactctgccggtttccttgggattcattttctccctttctgtgggctgacgttgcatactagattgaacccataatcttttttctttctctcttttttgtcttttctacttctatcattctctctttgtcttcttctttcctgtatgttccctgcgtcttatcctttctgacattgtctgtgttatttcggggtatcaacagtctttttctagaaatccaaacgtataaatcccttttctctgggtcacttctcttcggtatcctcttccgaccatacctccgaatcgctaggaaggcgatcgacccatctatcttccctttttaccaacagccatctttacgctaaaagtaaacagaagagatcacctcttgagagaaacaaacaagaaacaaaaaaaaagaaatgtccgacacctctgcagcttccacggctgctccggcgcccgctgctacttctaccactactaccactgccaccaccaccaccgcgcccaccaccgctccttcttctcctacagccgctccggctgctcctgctccgatgtcatgggccgatcgagcggctttgaacagacctccttcgtccgttgacgtccctaccatcagcactccttccctctctgaatctgtcacactccagccaacgcccgagcatggagagtctcaccctcgatcatctgagaaaggtcagaagccgtctcgatcaggaaggaacggaggtggaggaaataaggaggatcgcagatcgtccaccgccggtcagaagaatgcaggtagaagggaaggaggtgagcgatcaggaaagaaaggtggtcagcccggttcaagaaagtcaaccaagactggtgaggccgccggagagaccaagactgttgcttctggtaccaccatcgagggtgagggtgagaacaaggaggccggagacgcctcggtcactgccgctcctccggcgccaaagaaaaaggtccttcctggagcccctaaggtgaacccgtggaaggtcaagccgacgacgacgatttctgagaacacgtctgcttcggcttcaaactcagctgagacctctggcgagcacgtcactggcagcccgactttggagaacgagtctgctctcaacaacaacaccactaccatcaacaccatcccatcatccaccacagagtccagcttcccaagtttagccccggcaccagcaaagaagcacagatcgaaacaaaaagttcagacgaacgagcaggaaggtggggaggccaagaagggaaagaagggtacgttcaaatccgccctcgggttgctagatctcatccttcactgatattttgatttcatcttcgtattaacgatcgaacgaatgtacaaacggaatacagaaaagacaaagtggaagcccgtgccccaacatgagcttcagttcactaccgatctctcaaccgagcgaaaaaagtccggtaagcctcggtctgccggaccgaactcttccaacacccaccctggtgcggcaggaagaaagaagaagaacccgtcttctgccaacgccggaaagaagaccaaaaagaccgaggattccacctcggctgctgagatctcgatcgatgaccaaggtgtgacgtacgatatcgaggctgcatcgacagatatgcagagcttgggattgaacccagcagagggcgacattcagatttccaaggaggtcgagaagagtctgatgaagtctgcaacggatgaaaagagaaaggtcaacgggaacgccgcaaaaggggggaagtcttctcaggcttccaaaggcgccgcccggaacggtcagccaaaggtcggtcatcatcaacaagttgcgttgaatgcgacaacggactctttccaacccaaccaggaattcttctacaaccctcacccccacgttgccggccgagctggtggaccgttcccttcggctcctgtccctccgaacggatcgatgcccaccggtcagatcggtaaacaccaggccggcgtcgaggcttactacacccctccaccgatgcccatcccggtgaccatcccgggtttccagttggatcccctcaggttctacctcctcggtcaattggagtactacttcggtatccaaaacttggccatggacttcttcctcagacaacaggtttgtgtcatctcccttgttttgtatcagagtgtttcatcgctaatgcaatatggtttcttctcctccagatggacactctcggatacgtttccctctcaatggtagcctcattcaacagagtaaagaacttgacgaccgatctgtctcttgtccgagagaccatgctgctctcccagctggtcgaagtccgagacgtcaaggacgagactaaggtccggttggccaacaacggttgggctcagtgggtcttgccaggcgcgccggtttctgtcgttgaggagggagtggagaacggagagaaatcagaggacgtggtcgtgcaggccaggcaagcagaggagagtagggaggacgtcgtgattgaggaaaagaaggatagagaggaagaggaggccgtggacgctgctttatagaaagcctccttttcgtttctttttttttctttgcccttgtttcttctgcctccttttcttttcttactttgattatgatcgcatctttgcaaagaatatccagaacgaagggaaataaaagaatgaagaaagaattgggtagcttttcgtcagtcctggatcctcttgttctttctctctttctttctctcgaccttgtgttggcctgaccgaggtcgatcccttcttttcttaaaaaggatgtgaggaaacaagaaacagaaacgacccctatccatatctcatcccaaaacaagaatcagaaccccataactcgtacgacttgaaaacaagacaaaaacatgatatattatcctttctttccttcttttggtttttctttcattttgctcgtgtacaggggttctggagtttctttccttcttccttccaaacgcaaacgcttacgcttccgagctttctcatattctacatttacgtctttgccctcttgttcatttcattcaatgtttggcttcaattttcttttctttctttctggctttcttcatccatcccctcaactgatcttttctctctcttcattcattcgttcatcccttctgtttctcttcttctcttcctctcttctcttctctttttcattctcatcattgtttccaacgaaccggctcttatttttctcaatcttcttcaatcccaaatctcttcatgtcgtgaatcaaatctccaaagtctactctaccaaaaaaatctctcaaagttcgaagtttcaagttcaaatctttatcaaattttcatacctctttcttctgcttttattttaagaaaaaaaatccttctcagactgcttctcgttctcattcttttctttctttgtctttgttttatccctttaattgtttcaaaaaccgatcgagagaagagggccaaacgggtaaacgggtgaacaaacgaacaaacgagagcagaaagtcaatcgttcagcgagggaaacaaagatagagataaacacgagcatattatcaacacaatataagccccagtcaagaatcctgcccatcaaccccttccttctgttggtcgagttgaaatgaaacagagagagcttcgggtcccagatagaggtctttctccctagctggggtttggtttcaaatctagaagtcgtccggaacaaatttggatgcgacctattcgtagttgatttaaagaagagaggtcagtttcgatcacatcaaagcaaattcaaaagtagaaagaagcagagaaagaacaaggtgacgtacatcccagtatccttgattcttttcacccaaaaactctctagccatcctctcactctctgtactcttcggtttgaagaacttgaagtttctctctctgataggaccttcccagacgagatcacacctgttgtcctccatgttctgctcttcttcctcccctcctccttcccgagtggaaggttccccggatgggtcttcatctccatcgacgttccgagcttcttcggtccaatcgattcggacaagcatgacccgtttatagaatttgatcgctttggccgatccttcgacaaggacgagacagaacttggggttgaaaatgcaacatcctgtcaagttgttttgtgtcgcgttctctctgactttaaacttgtgacctgggttagaaaggtatttgattctgaaggagacaaaggtgaaaggcgtgatgatcagtgaagagaaaagagggacttctcttcgaaagagaaaaccgagtgagaatgacatacttgaagacagcaccgtacaaccccttgtcctcctctttaagcttttgggtctcttccttttccttccgttgttcatgcgtcagctttctagcctcattcgtcttttcgtgcttcactcgtctcgctttgacttctcgtctaactttggcctcgaccttggtaggatcctgaatcgcatccgacgccaataccttcatcaagtttccaatggacactagagagggttgcaaaaaagaaaaaagaaaacagacagataaatcacatcatcagctacatactcgaacgaaagacgctcgtagaatatatgcaatgattcatacgtacccttgggcttatcaggaggaatcaaacccattcggactcgatcctgcctgtccttcaagtcggccattcgtctctgcttcctcatctttttcgcttcctgtgttgtagaaaacagtcagtcaatctcgagtcagtttctctccagtcgtcgtcggtggaaacatgataagaacacgacccgaaccttctttgtcaacatcaacggcctgggctcaactttcttcttgtcccacggggcctgaatttggataggatgctggacgaaaggcgtgataggagagtcctccgcgtcgatctttgtctttgaggcttccacatcatcgtaagtcttgttggtcagcaacggctcatcccaccattcgacttccggtggaggctccctctgatcgttcgaccaaacaaacatcacgagtaactgtcagtcccgtttccacacgcgttcaacaaggaaggagagaaaccaaacgacttacgcgcaaagttcgttccgaggcgtcaaactcgctgtccaatcctgctttctttgcagcatcagcaattcgcttcttgagcgcctccatgttggcatccgcccgcatttggtcggctaaagcgacgtattttccttgctgtacgaaattaaactttctgcttcgtctctctctcggggtaggaacgtactcgcccgactctgcggctgcctctttggcggctgtcgccgtctcagcagcgatcgttaggtatgggttgactctctcgacaggaacaggtgagtttgcacccgtcggcggggcaggggtactgttccgagcatttgctttgagagtggcaaacttgggggcaagtgccttatgtctatctctgtaggaaagggtggaagtggaagtggacaggaaagagggtgtggatgactctaggagagacggatgaatggccatgttgagtccggatgcaggccgggatgaagacgaggaagcttcaggagccgggctggtgtgagcctaagcggagagaacatgaaaggacgagctcgtcaacccaaccaactcttatgtgacatacaaaaaagagagagagaaagaaaaagagatccctcttagagatacttactgtggcaggaggaccagtggcaatccctcgagcagccgtggcagccagcactttggctttcgccgcttcaatccttgctgccaggtctggggccaatccagccgggagggagctaggtctggcgactccagcaggagaaattgaggaaggagcgccattaccgttcaaaatccctgaaggagaagcgacagacgaagcaggtgcacgggatccaactgttgaaggggctgaagacgtggcaagagctccttgcttgtaagcagctagtttggctgcaatctctgctcgtttggcggctaagagctcggccgtgctgatgggtctctggtgaacacgtgaattagaaagcagaaaccatgacttggtcagtagctagagccagtccaaagaagtagccaaaagctgaggaagagacttaccccaagatccctatgaacagaaggagaaaggaaaccaaacggggaagggtcaattcatctgaagcaacatggtgatcaatcacggtcgaatctaacggcaaaccacccaaccaaagacacactcacggtttaacaagcttgctaggagatccattctccagaggctctcctggtctcttattggaagacatttcgaagagggttgactctaaagtctgtgtctgatcgagggtgatggttggaggtgaaacgaaaagagaaaggaaattccattttggctttctctgttttcctccaccatcaccaccatcatcgccgtcatcgtcatcatcaccttttccccatagatcagtacacatgagcgcattagagagtaagtcagaaggattccttttcgtcaaatctttgtctgtgtgtgtgttgttgaccggttggactgtttgcacctctaaaagaaagcttgtttcagctgaaagtatattcatctcgcaaagactctatcttttggatgcaacagaatccctcgagtctgatgttctgttcttcttggcttcttttcctccatcgccatcaatcaagttcactgctaaatcacttcagagacagtccaagaaggcacagaaggacgagagtaaggaaaaggcgaatctcaagaaggcgcgtgtggtctaccgagcttactgtcgagatttacacaggctaatccggtgtacgtttcataggctttgcaacaaggaaacactgacggagcacgtatatatgctgccaatgcgatccgtaaaaagaacgagtccttgaatctgcttcgtctgggaagtaggatcgacgcggtcgccagcagggtggagactgcagtgacgatgagacaagtgagtgcctaccgggttgttctctctctgtcttcttgatatctatgcttatgtagctctgtcgcctcccggacggaataggtcacaggaagcatggctagtgtcgtcaaagggatggacaaagcgatggaacagatgaatctcgaaaaggtatgcgcgccatgctctatctttgtttttggacatagctcacacccgacttgtctgcatgcttgcatccgttcatctgctgtctatctctcacagatatcaagcgtcatggacaagtttgaatcgcagtttaccgacttggatgtccaaacatcctacatggaatctaccatgtcatccacaagcgcgaccacgacgccgcaggatcaggtggacttgttaatgcaaaaagtggcagacgaagccggactcgaggtccagcacgagcttatggggaagagcacaagtggtgtggagaagaacttggaaccggtgccggcgaccaaggaggtcgttggagaggaagatgatgcattggccgatcggttcgttcccttcatttgcgtgtatatgtgtcgatcgtgtgatgcccttcggttgtgcgatgctgaccgggtctgactggttctcccttggttcaatcagattgagagctcttcgtcctgcggtctgatcgagtggatgagcgtttcttgttgtacttttctcttgtgtctatcgttcacgatcctgctagaaatgttatgtgcatgtcttttcttctccgactcgtcgctctctggatgattcgtagcctgtgggtatcactggatgtggtctgagttaatacgagacaagaacagacgtgccaatgatgcttccatggtggagagagcccaggcaagaagagatgccgatcaccgcaagcgatggagatgactcgttctcttttttgtttccttaccgtctctccgataaacaaccatctcttaagccgcaaaaacctctatcaccatgtacaaatacgaggcaagttccagcaaggccgaaagaacagacgagagcgctcctcgaattagatacgctgactgtctcgtttgtttgaacgccttggtggaccaacagcacatccctgggttcttccatcaagatattctagcccctctgatctctggcgaagccgccgttcgttcttctcatcgatctatctctttcgaaaaatcaacttatggatacgatcaagctgtgaaactgagaacgctgtctgtgtcctttcttcggtgtccagctcgagcagtcttttggtctcttggacgagagtcctcagcattggcagctattcaagaacaagatcgccggtccgtccatctcgtctcgagtcccaatccccagctgttctccttggtcttgcacctatgacggcaacggcggagaaaatatagaaaactaacatctatatattgatcgctccaaacggcacatagaactcgacgagaaagctgaggatggggcatcctataaagttatttggctaggccgacacggacaggttggcttcgtttatacaatcattctcatgatgatgcttttcgtagacgttacgacaagcagaaatctgacttgatcaatctgggatcattcaacggaaatacaggggtttcacaacgtcgctgctgccaaatatcaagctctcgggacttgggagaacaaatggtctttcgagacgactgatggggagatcacttgggtgcgccaaacgtctcgatgcctctagaaaggtcgtttcttaattttaatttcaatcttcttgttgtatctcttcctttagggcccagaccctgtgttgacgcccttaggtgaatcccaagcaagagcgctctccaaggcctggttgaacgcatcgaagaatggaattccgttaccgaccaggtggttcgttagtccgctgcagaggacaatccagacttgtcagatcacttggggagacgtctgggagaaagtgttgagtaaaggtcgggacggagcaggcgtcggtgtccgagcgatcgaggttggttcaagctttctcatttccttctcgagagtacattgccgtcacgctgacactcttcttggacgttgtctggtgcaataataaggatttgagagagaaagcatgggctgacagtaagtcttatcttcgacgagggaggattctggtccagtatacatatattctgacatctttgtcttgcgattgatcaacagccgccaaccatgtgagatcttgaggttcgttttcgtaccaatagcatatatgctgacggatctcactttcgttgcctgatagcgccgaacaaaatccgaggtctcgagagactatccaacagtaatcttccctgaatcgattccggaagaagacatgctgtggcatccaaaagtgagcgaagaggatgaacatgtgagagatcgagcgaagagttggttaggaactgtatgggaatatgacgatacctgttcgtcactctcttcatttatgtgtggttttctctcgacgttaagaaaggaatcgaaatggacttgctaactggactcatgttctttcctcattctgttcaatttttgtgttatggaatacaagtcgtgtcctgtacggcccacggtgatatcatgagggcaacctttgaaggtacgtcatcttgtatcctttctatcctttctgggtctatctttcgtccttcctctcatggtctaaccatcttagcctccttcgctactgatcggtagtaatcaaccacccgttatgcccgatcgagaccgccgagttgatcccaatcgtcgtgaagaggacgaagatttaactcagacatatccacacgggatctcagcgctgatctcggtagccccagctcaatctcatgactgtgatccttgaatcttcttcattcccactgtgtcttttcttgtaccctcccgcttttcatcgactgtttcattctttcttcgtcattgtatcgatttttcgaaacagagaatctccaaatagaagatagacgcatatcttttggattttcttctcaaccctacacgatcgactaaatgacaagacacaacaaacctaccaaattcaatctataatggacgctatttgctgcgttcaggaggactgagggggatttttgaaaggaaaactctattcgaggtttagtcttcgatgtttccctctcccgggaaaccacctggtaccgcccggttctcttctgcgagagccatgatctttaatttccaacataccaaaccagatcgtcagtgcaacacagctaaaagagagacacagcaggcaagagggaaagaaagaagatgggaagtttacctgggccatcatcaaatccctttcctcttccgacatctcacctccgccttctccatcgcctgcctgacccaacaaccttcgtaacctcccacctaggttagccaaaacaccttgatcgtccatcccatgtgcccctcctcccgcgttctctccttcacctccggctccagcggtgaactgtaagatcgagttgatcatagcctgcatgaaaccatcgtcttctccttcatcttctccttcgtcgttagacattcgacgttgatgaggacgtctgcgagttgtcatttgtgaaaagtatgcgttctatacagtataagtcgaaaagagaagcaaggtggagagaaccaaccccagaggaggacatgttagtggaggcggatgctgacgttgtgagaagggctgcagcacaagaaaaggagcgaaagaagagcatcttacgttgtaagcagtgatagctgtccgaggaggagccggatcgaagctcatacccattccttccttaacgccggcttccaggaagccgagccaacttgaattatcctcgctgaccagtacgtgcctggtcagactttcgccggatcctgacttccaatacgaaaggactctagctctggatggggagggtgaagatggggaggaagaaagcaggtcggggtaaatttgagggagttgagcttggatccaggagaggtgggacgcttccttgaaaagagagtgagatcgggagacgtaaatttgtgacaaaaggtgaagcggagtgagaggtccaggtctggttcaaagaaatcacgtcgtaaagagattagattgatgatcgatatagacaagagaaactaggaaaggagcgataagatccttactcgtaacctagtcggatctctactgaagggtgagaccggatctcagaaggaacgttgaatcccactatagatttcgagagcagacgacaggtatcgttagttgagatgcctgatagagatagaaaaaacacgccaaaattctgacctttgtctgcaagcaagggcaagacctctgggaaggtcaaaacggcttctctcaaagccacatcggcctttcctttctctatctatatatctcaaacatattcgatggagatgagaagttggaacattagtgacaaggacgatcaagctgaaatattgaaggaacatagacacggaccttgcttcctttcttggtctcctccattctcaagccgagtgcttttgcccaagccataccaggcagcatatctagctctacccttcgtcttttagtttggccgccttccaggtcatccaaagcctcgctccaagcagccaagatctccagaagccaagtctggttattcgacttgagtgctaggaagtcgaggtgcaggagagctccttggggctgcatatcgaatatcatgaggaggcgaagcggtcaatatagattaggaaaagaggggtaattaaaatgaaaatgagtgaaaatgagactagggcaagacatacgtctgtatgagggtctaaactgaggaggaattttgcaaagttgaaggatgtgttccagcatcctcttcgtcccaagaacctattagaaaccaatacagattgctcgtgtgagtcccctacatcaaatgccaaggattcaataagaaaaagtttaaacaggcaacacgatactgactgtaagtttcttacaacaccaagatagaatcctcgattctcaactctatcaaagtctaatcgaacgttcccgtgagcaacaccaaagccgggcatgaaagctctctcaaatgcaaacaaggcacggtcgatgaattcggaagcttgaccaagatctagattgagtgaggaagcgcgaacgcgtgagggataagtgcatgtatgacatgttgtgaagatcaatggaaggaatttacctgcttgttgtcggtatacttctcccactgaaatatagacacagcgcagtttttaaagatgttaagattatgtcttatgagtagcaagaagcacagccaaggaaacatatcactcactctgtagaatggtatcggtatggtacggatagacttgcagaagcgcgaacagctgattcgggtcatgacttccgattgcgcccaagaactgtcgctgagcctccttccacatgcctccgtgctcaaaggtgaaccacttttctccttttccacccttcgggctcaagccaagtcttgctctcttttcttgaacctcatcgtccgtcaactctctcatccccaagcccaacaaggacgtcggcggaggccagttcggcctaggtttagagaggtgtgtcttgataagattccgacgggcgccacccccaggcccgcctcgagtaggcgttgagccggagggcgcggcaatgactttggacccgaagaattttcgaagctccagatcgggatcgagatttttggggtcgattgtcaagagagttcgaagagcaagagatgaagctgtggtctgattggtctgtgaagaagaggatgggtcggaaggtccggtggttgaaggttcaccatattgagctttgatctcggccaaagctcgatcaacctcatccatgccagagtagtcggtctgagacggcttggtgctcttcttggaatggctcatgggagcagtagaagcgaggccagaagtagtgatctcttcagcctcatctccttgagccatagaagaggcgttcttctttttctttttcttcttattggttttctgattttttattcaagacatcgagggtgcagaagcgatcagaaaagcctggtcgagcgggaatgaaaagagagatcacacctttttcttgatcacctcttccacctcgttgtcttcttcctcgtcttccggagcatcatcgtccccgatgttgagctttttgatagaagtatcggagctgtgagaatttcaatctggtacaaaacagatatgagaagagcaagagaaaaggaatcaaactactcactgcagcaaatgcgttcacaggctgactcttttcctcctgatcgtccccatgcccaattggttcctcctggttgtcttccgatggtccaacggatgtcacctcgggaacaggctcctctagctgttgcaacctttgctgtcgtttgttcagtctcttggacattctctcgatggttgaaggctgatcgtcgtcagaggtaatcgagtatgggcgtgtgtgagaatgacgttggagggatgatggctacaagggcacgtgactgacatcgtaaccatggtaacatgggcaattccaaaattctttgaacactttgggaactcaacatttgacgaccgtcgaccttccgctctcctctatctctgaccttttccttcgtctgtacagctatcaggaaggaaacaacagctagcgcttacatcctgaagaatggccaagggatcccagcttacacagctcaagtcggctttgacatctgcaggtctggatcgaaagaaacagcagcagatcaaagcaaagtctaacaatgcaggaaccaaaagaaagagaggaccggacgatgagaagaagctcgagaagattcgaaaggagatgaaccctttcgaagagaggacgatgagggttcgtattcatctgtttataggttcttcagatcatctgatctatcagatatcacgcaagagctatgcacataactaacggacgcctggtctccacacagctcaaacatgatatcggaggtcgaaagctcaagggatcctcaggacgaccaggtctcagcaaacagactggactcgaagaggtacgtctgcattttttttatctcttgattacttttcgaacgttctatgtcttgattctcattctcccacactttgtctaaaccttccgctctttgcacaaaccaatcaactcgcgatttgcataatctatagcgtcaacgaacgcttcttcccgctcttcagaacaggaaccacacaacaactttccaagatcgtcgattcggagaatccaacccgacacttacgccagaagaaaagatgctcgaacgtttcactagagagaaacaggcgcagcgatcggctctcggcggcgcgtctggccgagggaagggcaaagagttattcaacctcggagatgatgaagccggcatggaaggatttggagaagacgaggtcggctggggtggaggagctggagcaggtggagaggagtggggactaacgcatggcggccgaagcttagaagatgacttcgagctcggtgggtttggagctggagaggatgatgaggatcgaggttagtaaatgttcttcttattgtttcgaataagtatcaagcgatatgattcctcaactgattgtattgcccgtctcttcaatcaggccaaatcgaccgacgaaccgttcaaaagagccatttcggtggtttcgaagaggaagacaacgattctgaagatgataaggttagggttcaagctacctttcactttccatgtattttgcaaagctaatcggtatccttacaacctttcttcaccgtagcctgagcgcaagaggtctaaagccgagattatggctgaagtcattgcgaaatcgaaagaccacaaagttcgctctcaaaccttgcctctttcaacaatgtagacagatatctaacccttttgtcccttccacatctcagtatgctcgacagatggagaaagaaaaagacgaggcaactcgactcgagatcgataacgagttcgctgatatccgagatatgcttatgggcatggctactcttccagatgaagatcccgaggaggatgctttccctggtacaaaggctaatcagatccctcttggtgtccgagctggaggtccagtacccacttccaccactactactaccgacgcgactatagaaggtgatgcgaaagccgaaccttcagccgagtctttggactatgataccttcgttcgatctcttgctttcgaccgacgagccaagcctaccgaccgaacaaagacagaggacgagctcctcctggaggagaaagagcgtctagaggaagccgaacgaaagcgattgcgaagacagcaaggattggcatcggattctgaggacgaaggtgcggcaaagtctatgaaggccaagcgggagcgagaaaagaggaaccgaggtgcggatgatttggatgatgatttcgccggagaggatggaatggaaggagtggaggacggggagtttggcttgggaggtggtttggaaaagagcgggggcccaatggtcatgctcagtggcagcgagagcgagggcgaggatgatgacgaggaaggatcggatgatgaagacgaggaggggtctgatgaggatgacgaaagcgaagatgatgaagaggacgacgggttctctgatctggagggatcgcagacgaacgaggctctgccagacgacgaagatgacgccgacgaactcgaagagcctactcctgccgtttcagcccagaaagctactagaaagtcgtcaaagaagaagtccacggctggcaaagccaaggaacttccattcactttcccttgccctaccacccatgaggacctgctcgacatgcttgaagaacatgatgttgtccgagatgaggatgtcgaattggtcattaagcgtatccgagcggtctggcatccgaaacttggagagggaaacaaagagaggatgcaggttcgtttgtttgtgttatatttctaagactagctcaaaatttgatgttgatatcaatcggacttctcttcatagatcttctctaccatccttctcgaccatgccctatacgttctctcctctccaactccgaatttcgcccttctatcactcctccttcctcatctatcttccctaacgaccgcatacccgctcatctccgctcaacacacaatttccaagctcagcctcatcaaccgaaatctctcccttgcgctctctcgaggcccgttggcactcgaatcacagacctggcccagctcgcctgagcttggattacttcgaatcatcggtatcacttggagtacaagtgatttcagtcatccggtctcagccccggcggtgctgttgattggaaggtggctcagtcagagtaaagttcgaggaatcttggatctttctaagggtctgttcttgtgcagcttattcttgcaggttcgtccatccactttatcatacatccttgtctatctttcgcgcttatcactcgaaataccgaaccgactgaaaacttaaatttgacatgtatgatcacttgtagtatgaagcactttccaaacgattcatgcccgaggttctcaacttcctatccttcgctctcctcatcctctctccttctactttcaacccatctactcccctgcctggaacgttccctttccccgacgtctttgacgatcgatacaaaccacttaagattcgatctgtcaaatctactgaaaacgaactgcctgtagaccctgcgccaacaccgagtataacggatctactctcattagagaacggttctaaagtcatcgaggagcaggtcaaagtggacctgatgggtgttgcgcttaggttgatcagtaagagtagagaattgtgggctgggtcggacgcgtacgtagagatgttcagaccggtggaagatgttttgaaaggtttgaaggtcaaaaagcttcctgctggtcttcaggtttgtgtctttctctgtttttatatttctctctgttcgccttctagcttcaaagctcatactctcttgtctatgcattctcaaaggctctgcacaagacgacgctctccactctttccaacactctcaaattctcccttcaagctcgacgacctcttcgattacagaaccataagccaatccctattccgtcgtacattcccaaattcgagggttcgttctatacccccggcaagcgatacgatccggatgcagagaggaatgcggcaagcaaacttcgcagtcagtacaagcaagagaagaagggcgcgatccgagaactcaggaaggacgcaaagttcttgtcggcagagaggaacagagtcaaggacgaaaaggacaaagcttgtcagttcacctcttcctcttcgttttgtttctttctatcatgtaatccaagctcattacgtttcaatcttcctctcggatgtgaacagacgaacaacgtatgcgttctgcccacggagcaatccaagtcgagcgatccgaggaaaaacagatggaaagagagaaggctcgggacaagaaacgggctggaaagtgatagttcgaatgttgttttctgtagatttcactctctttctattggttttcgagagatccatgttctttttgttatatcttttttacttatcgagaagcagtgtcaggacgatcggttctcgatgatgtagaaccgttgaagagaaagtaatactagacatgatatcgtccaacccaacccaaataatacacagagcaagaaggatcaaggcaaaggaaaggaaagacctagtattttttgattctcttcttgaatcgttccatcgtgatctcatcattactaacttgcgacttatttctgtagttcttgctgtttcggttttttctatcgatagccggaagacccatcgcttctcttctagcgtcttccaatgcgtctttgtctgattggacgttgctgaccggtcggtagactattaaaaaaaaccgcatcgtcaaattctttttcttcacactatcgacaagtaattgagaaacagagacaagacccccaaagactgaacgtgcaacgaatggagaagaacgtacaacgagcagcggcaaaatcgttatcagcttgactaggacgaggagcggctttcttccttgcttccaacatagcgcgtttagctttctcagtgtcttcgatgttcttcagtcgattactgttcaaacgagagcgaagaggttaacaactatcgattcaatggaactgtcgatcaagaagaaagaaaagggcctactccatcccaagatcaacctccggaactgttttgttcgttacgaatcagcacatcaagtcagcactgaatatattgtaggtagacggaagaaaacgaagagaggacacactagctgtaagcatagccatcgagttcataacgtttccaccttcttcatcatcctctcctccattctttccatccttcttcttttcaattctgtactgttctgcaatctcgtataaggcctcgtgaggatcgaaaggtttgacagatgaggaagcagctgcgtcggatgtgttctctgtgtcaattccacgtcgtttttgaagttctgtctcgatatatgccatcctaaattttccatgagcccggaatgagaagagagaatcgaagaggcgtcaacaatgttgagaaatgaagaggagaagaaataaagagacgagaaaggacgcacatgtgcttatcgacgtctaatgcgttcgtttgttgggtaaagttagaagcactaatgagtcgtttcatctttgccgattcgtctgacggatcactacaatcccccaagatgtacagtacgggagagccaagtatagtcagactctcttcttgaaaccacacaaacaaagctgagaagaacacgtacatctcctttccaccactcccctttccaggtctaagtccgacttggatttcctcctccccatcgtcttctccttcctcttctccttcttcagctgtgcccgtcgtcttcttctttctccgtctgatttcaccccggtttagtttctcgagcgagagtccttcggcttgtttcctaaatcggcgaagtgacatcaaatcctgaatagttgccctattgtgtgtttcgtttcatacgtgccagacagtaattgataagacatacatcagtacaagcgatcacatcttcccctacgccgacaccactatgccagagagagatgaacctcaaagagacgcgtcaagaacttactccacattgggctcatcattttcttcaaccgccggactagccaccgcctccgacggatccaaaggttccccggttgatgtcggggtttgattgacagatggagtgtccttcgtacggacatttgctggtcttgtgcgtttcttaaacatgttttgtcccttccttggttgtaagtacacgagaagttggagggttggaggaaagcacgagaagggaatgaagggaaattgggtaggaaacaggcggaaattcaagaaaagggatttgtggggactccgctctctttcttgctatcttgtatcgtgtatcgtgatggcctccaaacgacgagcatcttttcgacaaagtggtgttgcagtttgttgatcgtgacaagtttcgtgtatagatatgatggagacaaagacgatctatcaaggagaagagaaaaagaaagaagaaacgatacgagaacgatacgagcagactacgatcaccaaaatatacatttcctatccacatagactagcctctccgacttgctttccgttctctcaacatcctctgacttcctaacttttttgtctacttctccctttctttgttcttcccctccctttctctaaccaaacggaattagtcgtatctcttgttgttttatcggttcttggcgtgttctggggcgtgatcggtttcatgatcgacgtggacgctgtaaaggtaaaatcatcgtcgaagaagacgaaacaagggaaagaaagaaaattacaagatgtttcaaagtcaggaaactgtcaaacaaactaaaagagagaaagaaaaagaaaaagaaaaggaaaaagaaaaagagaaagagaaagaaagctcctttccgacgctaaaaagagaaggagagatatagaatgaaaaagaaagatgagtgacttacaacgctcgatcgatccctggcaatcgttcgagtgtatcctggagagattgagcgagatcatgtgacgttctcagggtcgtctctggttccataactgtgtgtaagaatgattgaagagagttcagagatacacagagagatgtcttggtaaatgtgcaatgaagtttgagtggaaaaaggacgtcaagaatcaagaacgaaccgatgtctacctctgcaatgtaatctatattcatcgccattatcccagacgcagaatacagaacaacatgaaacgtgagtcttggcaggtagctcgaaagttagtccgaatgagagcagataaagagaatagacgaaccttctccattggcatagattttgacgctgtccaattgagtgatcaaaggcgagaacgtcatgcactggttcgacccaaaatcaagaagcagtgagcagtcatttcaatcagtatcagagctgtttggtgaagaacttcaaaaatggaaccttactttgtaggtcacaaagttgagcatctctggctcggcgctctttcctgccaataatgtgaaatgttctgcaacggtgatcgtccacgacgtgatgactgcacatgcgataagaatctgtgaaggaaccgttccatcagattgaatcactaacagatattgtatcgggataaagacaaagaggaaatatagagaaagaaaaggtgacatacggctcccattgggtcgatccaccaagcaatctttgctccagctgcactcgtaaagatacccatagcgtttaccggctgtttttgtttgtttaatgaaagatccatctatttaacattccctgcatatgttgtgttgagaatttttgctaaggatgaaaggcttacgagatcatttcggtgatcctcccagagcaccctgtcaatgaagagaaaagtagttttggtcagtgaggttggacgttttgataattacagaaacggaactgatctgatagtgtagggaaaacaagaaatgaagagacagaggaacatataagacacaaaaacgaagactgactggacctgagagctctgactcttgatagcataacaatagaggaaaagcgcgaatttcgttcctaccatcgttaaatcaattttttgtcacattagtcttcactcgttgtttaacaagagggtaaattgatcgaggagagacataccaagagcgactccgactgcaactagagaagcaatatgaagtttgttatcgtcgtctccatctccatgagtggcgagtgatcgaatagattcaacaatcagaaccttgaaaaaccggagaagatggtggttgttagtaccgggtctgtgggtttgcgcgcggctaggacgaggtacagactcaccaggttgacacctcccatctttgaggattgagtatttcgagaggatcaaacatatgtcagttgtatgcatcaattttcaaacaaaacaccaaacagtgaaaagaggcggtgcacgaacgaggaaaccgtaaacgacgtttccgatcgtctggaattttgctcctccctgcggccatttcttcgggtctgctgagatacctttcttgtgaagatagttgaggatcagattctaggttttttttgatagatgtgagaatcgagatagaaaaagatgattagcgtgaaacctagttgtgttgggcgtgagagatgggcgtagacatactgcgaaagggtcaaaaacctttatgggaatacggcgtgaaacatacgtatcagaggtcagattgatgtgaacaggggaaacaggttggaaaacaagcatgaaagcactcgaactgactgaatcgatggcagtggcgaataaagaaagactcaatgaagaaagcgcggcatagagctgaaggattgccaaaagacagttacaaataaaggacgctctgatcgcgatctttactttgagggctgaagcatcttcctcttctgttgcttctgatgtgtggacagacatcggtttgagcagatttttgatgtgctgagaggagatacatcgagagagaagaaaaacgacaagccatgacatcagtatatcagcacatcaacacgcaagaggaaaagcttgaacaaacttcgttctggttctcgtaatacttagccaacgctttgttccgcttcttcgacataccctttcccttcctcttcaaaagcgtattgatttgctcatcaggttggatttttgattgaagagacagtggatctatcggggtagtcccctcgccgccgatggacctgatggacctggatgtgccagtgtgttccggatctgtcgctcgggcgaggtttctaagttcaaacgtagtgcccagctctatcggattggatgtctcgtggagactggtctttgtaacagacatgacgggctgctatgattcaaaagtaggtgggagtgttgatggtgtgcagactgttgtacccaacaattatttttcttgtttccctagctgcttttgggctcggataagcccggataatgactaagcagatttccacacagcccctgccatcagtgccagactctgggcgacaacgagacaaggttggattgaggaaaaagtgtaggtgagtgactgcatatcagaacagattagggaaaagtagagagatatagtgtgtgttgtatgtgtgtgcgtgtgtatgtgtgtgcgcgtgtgcatatgactgaaggaaagatagggagagaggaactttccatcacactctgtaatttgaagagaacgagaaggttaacggtcgattttgtggtcttcttgcgcttactcttgcatctcatctgacgaagaacagtccaattcaacactcgttcaggtcagtttcagagtttcataaactcgccgtccagaaaacacgcttgatatacagagacaagagagatcataagtacatagagaaatgtatgctactatcgaacgagctgactgccgctgcaatctgtcgagactgagcttttcttttgctcttcatatcattctatctgcaacctggctcagtaatatacacccataaacccacataaacatacagctttctgactctttgccgaatattctgtttctggagaaacatggtgtgatagacagagtgtcttagtacgtgggtacatttgggtgcctgggttctgggtggaactgtcttacgtaatcgacggccagcgcaaccgattcccttcatcctcataccctcgtcccctctcttctcttctgtccatcacctttgtcgacatctttcactctttgtcccttcccccctcgagatggctccaggactgggatatgatgagcagggatctctagccaactatttcctcatcacctttataaccatcgccctcgttcccaccacctttttcaccttcaaatcacaacttcagccaggtctgttttcctttctctccctctccggtcgtgtcatttagctcctgacctgtctctcttcgccttttgattgtgattattgtgcaatatcttttcccggaaaatataactcctctagcgaacgtcaaggcccttaccgacggactcgctgtgccagagagtagacagcgagcatctagggaaaagatctttggcaaacaaaagtctaaaaagaagggcatctctaaaaagtgagtactctgcgttccctttacttcctggctttttgagcacaagagacaatcggtcgaacacaccgctcattcacctccatctttacttcctcgtagagccatctttctcatcctcggctggtccgcatttgcgttccttgcccatcggatccacaattccgaggcaatcgagaacgtcatctataacccgttcgagatccttggaatcaccgacgtacgtccagcaccccagcttcgtacttgttctctttccttcttcttctcgacacacattcacctctctgctctctctaacaaaatatacagtcgttgaccgagaaggagattaaacggtcctacaaaaaactctcgttaaaattgtatgagttgtctaattgttctgatctctgcccaggcatccaaccttatacgtgccttctctgcttcttgctttcctttcagccaccccgacaagtacaaacttcaagagaatgaaactcaagaggatgccgacgccaagtttgtcgagatcacaaaggcctacaaagcgttcgttcctgtcttcaagtgctctttctctttcttacttctgcttcaacactcacctcagctatcttctgcgtgacgaatagattgacagatgatgtaacacgtgaaaactggcaattatatggaaaccccgacggaccccagcagagggaagatgtggtggcgatcccgaaatgggtgatcgaaggaaagaatggatcctgggttttggccgtgtacggtctggtgatcggaggaatccttccatggcttgtagtgagtatctttcctcagcaatatgtccttttcatctctctcgtttctagctttactcttcctgacctcacatttgcttatagggaaaatggtggttcggaaccaggcagtataccaaagacggaacgaccaactctacagccgcgacgttcttccgtcgactggacgagatgacaagtgtatccgacctcatctccatcctggcctccgcttccgaatttacttctccggcatccgaggcctctaaaaaggtggccaaggacaagaaaactatcaaggccgagcttggagcgctcgaggaggccgttcgaaaacgagcgactgagctggggctggaaggtcaaaacgtagattgggaagagactggtttgggtgaggtgatgggcggaaggtttgacagtctaggaaacaagcgagctggcgtgttgatctggggacacctactgcgaatccagtgggattctccatctgttcgagaaggtccgttcccttatgcagactatagctgttggcaccatccactgatgatcattctttttaaaaatggaacaatagaaaccgccgaattgttactttctcttccacctctgttggcttctttgttgaacatatccttgtcccaccactggttctctacctccctccagatcatgcatcttcaggcataccttgcccaagcgaccctgcctacattacctaacctgcttcagttgcctcatatcactttcgagcaggctcaagcgcttgaatccaaggttcgaagcttccgctcggtcgttggggctggcaatggtgatcggtgggtcagagcgttcaacaggattgagaaggagaagaaaaaggcactactagatgaagtgaaagttacagacaatgaaacggagaggaacgagatggatagcgtggcaaagagttggcccaaattggagattgtcagcgcaaagttcaaaggtaagattcttcctcagatgagggcatagaaaggacaagattggctgctcaccatttttatctttaatcttgtttcccgatagtcattggagagaagaacatcgccccatcatcgatcgttcaatgtgcgtttaagctacgactgtcaaaccaaaccacctcggccgtcgagcctgatgccaagaaagtcgaggaggacagtgatgatgaagacgagtctgaagccgttaaaaaagctaaggacgaggcgctcaagaagaaaacacctctcacagcttacactccttattggccggaggtaagaaaatcttctttttcgattgacatttcaggtttcctcactcattcttatctttgtgattaccctacagaatcgaccactcaagttttgggcaatgatcggagatattaaatccgatagggtcatcgtccaaccggtgtttatcccaacaatctatctgggggaaaccttgtcgttctcgctccagttccaggcaccgcccaacgcgggacactatactttccaagcaacgttcttaagcaactcggtagtgggaagtgaagttcgaaagggaatgcttgttcgtctcttgctctgttcttttctgttctcctctttatcttctggtttgaatgacgagctaacgcctgtatactcgacatgttctgttcttcagctcattgtagacgagccagttgcagaggcagagtccgaagacgacgatatctctgaccccgaagaggattcccttgccggtcaactcgctcagatgaaaggacaacgggttaaatcgagcaagcttgccggagaagatgatgactcaagtgaagaggattcgtcaagtgatgaggacggtccgagaggaaagaagggaaatgacgatagtagcagtgattctgacagcgattgaaaccgtctgtccttaagagatggtgattgcgaaggtgaaaatggtgctgcttgctatatctttctctgagaatctatatatttgatgtgaatggaatggtttgagaaaaggccaagaacggtcgtacactatcgtttattgctgttcctacgtgttcttctcaggcgcaagattcgattacgtgttgaatcggagaaaagatattcgagaaagttgattttctcgtcaacaatcccagaccaatgatcgcttcatcaccatcatctaccaactcacttttttctgcccactccttttcctcatctgaagacgagagagatgatgtagacccttcctctggatcttcagctctttgctcagcactctcaacagcccaagagacctcgccttcgtccacatcgagacagagaccgaagccagtatcaggtccagttttcaaagaagcatcaaatctgataacatcaattgaaccacctcagatctcaggcctcacgttcataccttcgattctctctccaccgttatgctcagatctggtcaaatgtatggctgcatctgatgtgttcctaggaggaagcagggatcaagtcatgttgttcggtggccgacttgaatgtcgaccaaattctcttccggtcccaagctcggcatcaaccttgaatgatgttgataaagatttagcaacagaagagaacttagaactcgaacaaagaacaaggttcagaggtttaccgtcatggttagaccaggcgctagagagtatagaaaatgagttaagaggggtgttggaagacgaaatttgggaagagtcattcaaccggaaagatcttaagcgtcagggtttgttcatcttcttttcttcatctttatttctctcagcttattgtttctgggttcgaaggtctaacatttcgtgaacttgctacgactttttagtcattctaaacttatataaaccgggtgttcgtcttctctctcgtctttaatatcatgacctcgtccttctcttcttgcacctgatgtttcctcaattttctggtgaatgtatatagcaaggtatcacacctcatgtggacctcccgaacagatatgattcacctatagtagctgtctctttactctctggaatctcttttctcttacgtcgtcgtcatcgtcgtatatcttcttcgctgtcgtcatcaagtttgggtgcagcgccggtgttagaggagaaagaggaggaggaagagtgggaaacccataggttttggttaccggagagaagcgttctgatactcgacggggaatctcgttgggaatgggagcatgggatcgaggtttgtctatactcttcatcttctcttcgtagtgcgcaagaatcagatgttgatcactatatgtatgtctactcgtctgggaatttgtgatctgtgctctattttgaagtcacatgagatggacctcgtagagtcgtcggatgggacgggtcccagctggagagttagaggtgttcgagtgagtatgacgtttcggtggctcaagtctggtggagatgtcgttggtggatgaagatatcagtctcttatccctttcaaatatcgataataattgtatgaatgtgatcttttcggaaggctttcctttcattgagaacttctatacatatacattttatctataggatacaccgagagagaaaggtgatgtttctttgctcttggttcgtacgttgggtttgtgatacttaacaatccatctcacccaagaggtcaaacatccctcctagtcctccggtctgctttgtagtcttcttcccttgcgaatctcctcctcccccagaagcagccgctgccgccttttcccgcttcgccttctttttgtcccgtttcctgcttgtcctatcatccacttgaccttctggctcaatcgacgcattctcttttacttcacttcctaacacatcctccacgcaactttcataatctttctcctcttcatctgatttgaacgacggtcgataagctctgtcggtcgaccaatcggataaagacttgtgggctagttttccgttgtagaacacgtgaggaccagggaagaccgttcgtgggaggagtaacgcttgggcgagaagatcgctgtcgtgtaaagcgtgaagatagtaagaggttacgtgaattgcccgatttgtcagttccccaaccgagtattcttccagaagggagactccttcggcagcaggagtctcattatcggtggttgtagagtttgaatcctgttcagggttgaattggcgctgccatttcgaccaagcatggaacgaacggacagcagtaaagatgatcgccttgatctctgcccgtcttgaatggtaattcactccaggcttcgaaggttcttcagctaaacgacgagcgatccatcggataaccaacaccatcggtttcagttcatctctgatcgtgatggatggagatccaagtaggtgcatataagcttggatccgaacggagaggggttggagcacaagtagagttgtgcttaaatccaattttggttcgaaaacgctcgaatcaagaagatcggttattggggtgatggggatgagcgtaggatgaaagattgtgcctgaacggaggtaggtttgaatgtacctagtatcggaggggtggtcttgttcttcgaccggatcttgttctgctggagaaggatcttcggcgttggattcaccagcagcggcgttggcttctaggatagcgtcgagttcttctcgctgagcttcggccgtaggatcatcttcctcgtctccctcttctaaagcggtgtcgaccttgtcttcgtccattttctcatcttcatccttctcctcctccttctcctcctcctcctcctcctcctctctaaagccaatacctagtccttgattcagtacggcccaacaggcttccctgatcccttctccggcacgttttccaatggacgctctggtcgtatcctctatgaacaacctgccgagatatcttccgtccctgacgacgcctgctaattttggagcaaaccgaccagctcggacagcgtctacgtagagaccaaacacgtcgtcctcggatggagaagagactgtcggtggaaaagatgaaggagagagcggaaggtctgtcaattccaaagggattgtgtatgaaagagctgaatcaatgagggcatgaaggatggcttccatctcttgttccgtcctgggatgaagaaggagcgcgcttgtcgcgtttgacaagagaagaagagcttcatcccctgaggtttctataggtgtggccgttccagacctaacgtttgacgatgaaggtctctttgccttggggcttaggcagtcccggaggacggtcgagactctgtctactttttgagtggatgtagcggatcggtggtggaacgcttgaccatatttgaagtaatcgtttcctaccagcgcagcgaataaaggaaggatgtttaacggaaggtcgagctcagcagcaaggagctctggtgtatagatgataacggagagggacgtcaaaaacgatacggccgggacagagggtgggagggctgatggttttcgattgttccaacgaccttttcgatcgaatcgaccaccggtggtggtgttataagtgttgtttcgattccgctcattctttttatgtgtttttgacttgacgacctggaagaattcaccagctccatcatcatcatcctcatccgggatgactaccgagtcttcatccgctttcttctcttgctccggctcctcttcttcctcttgttcgagttcaacccagtcccacttcatttggttcaaggggatgtaccctctcccggctcctctgccctgagcgccgtagatcgtgaaatctgaatcgagtccagtaatgtatccgttcctcttgcttgcctcgtatgcgcacctcaagtcagcctcagattcagcccagatactctcaacgccaagagcgaggccgacatcgacagctgtcgagtaaaacaatggcgggaggatcgtttgagacgaccatgacgatcgggaaagacgtgatgcaggtgacgtatggtgaaacaatgagatgggaaggattaaggactgttgacgttggagctcagttgagaatttgatcggaggcgtcggaccttcatgtatgcaaaggaagagataactagacgaatgagtatcgagacaaacacctttctcagtctgacggaagatgatctcttctaaagagaaggaaaggacacaccatcgtaaacaaacacaggctcgatacctacagccctccaacctgtgaccgtccgtcgaaggaggtctgcaaactcaaggtgttcacctccatagggccatggagtatgggacagaagctcgtatatgagtctggtttgagagaatgaagatggaattcaatcgattgtcgtcagacatcaaagagaacactacgatacagatacagatgtttctttttctcctccacaaaacttgatcgatctgaaagaaacgacgaaatcgaggcgaggaagagagaaaagatagggatagtgatgatgaaacgctgtaaaaggagaactcacccccaagcgtcgactacaagtgcgacctttgttcgttcctcctcttctacgccgagaacagagtcaaatttgagaggtctagaaacgagacttgcattttcattgagatacgttgcgagaccgaggactcccatattgaatgtgtggtctttcttggatgaaaagacggatggaagtgagaggtgacgaatgcgaagatgaaaggttttgtcgatttttatttttaagcctctttaatttttatctttcgactctcctcatataaacattgtataagtcaacaacagcaaaaacaacaacccggaaaaacgttcttctatcaataacagcgaaacgttcctttcagtgtttcacttcccaaagaaaaaaaatctataggttcttttttccgttaacttttccggaaccagccggaggcgcaggtatggtgtgaccattagtctgagagaccccaacagtggctttctttccttttttggatttgctttcggtaatcttagcccacgcctgtatacgacagaaagagtcaagctttagaagagccaagaaaggatgacagagggacgtgaagaggactcacctcgaccccgattccaaggaagacgactgctgctcctagccattggccgagagtgagttgatgatcgaacaataccacactcagctggcgcaattcaatggatagaaaaaccaaccttatgttagctctcccgtgcctattcagatattgataagagaaaggaagggggaagcaatctctacgaaccatcatagtgaacaactttcgggtcacagtgaccattaccagggtcaaacttccgaattcccccagagtctcaaagatgaacaactggccaagagcaccggtgactgagtatccaaccaaaggtttcaacaagtctggatgggtggacaggaaggacaggaaggaggatagctcagattgagaagagggcgtcgggtgaatgagcggaatacttggggtcgtgattgaaaaaggtcagggaacaggtcaatgatcagattggtgggaggggagggagattaaagaagaaacttacggagggagagggagtagaatcaacgggagagagataagtaaagtgaagaacgacataaagaacatcatttgctggcctgtagatcataaggaaatgggaatcagctcagcacgtacatatcacaaaaccgcgcgcacgtatgcatgagaagaatcctacataccagtgaccttccatctcctaaatatttcatcctgtcccgagtttgttgctccgtcgatcagcaagtttatcactaatagtcccagtccgaccaagctttccccgctggtcttgactgcggacgaccccttgtgggaggaatgtttgttggaggcaccttcggctccgagaagcataaagagggagattccgagcgtcacgagtgtaacaacaaggtacttgtgaggtgggaactttcgacggtacaggatgaactagatgggcgaaagaaagcgagttagaataagcaatggagatagtgctttgttcagacgcgcgagcgacgatagtctggttgcacgattctgatctcaagggtaaaggttaaacatacgttcatgaacagaacaggcactagcttgcagcttttgcccaggaccatggtcggatagcttatatgccttagactggcaaatccaaaaggaccggccgaggtattgagcatggcaaccttggcgaacgcaccaaggagacctctcgtgtcgccattaggctggttgaggcctagcaaggatgtagatgacggagaggacggccgtctgatggatatgtagataaaggagaacaagagagatgcaagcgcctgggtagtgttgaggaccaagatggacttgaaccgggccggcggttcatgtgggagagttgaggggaaaggaacggatactgagggagaatgcatggagaccagaggagcgatcagcgagtttcagaacagaatcaagacgaaacacacctacgtctttcttgagcgatagcccatatctataccagccaagtcatgttgtgagcaagagaaacatggttaagctttcggttgaaaaaggtaagaacgacaagagctaagaacgtaccaagaacatcgcgtagaccccaccacaacacacaccgaacctgtgggtctcaccaaaacatcaaaggcgttagtcttggcttatttctacctcctcctctgcagacagagcgaacgagagagaagaagaacccacttgaggacaggcatgttgcttgaacgtttgtttgatgatccatccgagagattgaaggtctaggggatattacttatgggctggccgtgtacagctttacacgtgaccgttcacgtgtaaagcgcacgtgtatctgagcgtgtggcgctccatcagatatcctcctgcccatctcgccctcttgggcttcggccaccgtcaccatcaacatcaaacaacatggacgacgcaaagaagcactttgtgagtatgcttcgctggcgtgagcgcatctgtgtgtctgattgtgctcgttgtcattgatgccagacgttgtttgcccttcgctgtagcaatccttcaccgtcggcaaggttagtttgctcatagcctccgggccatctctcttatgccgtcacacagacctttggctgagcttttgtgcataccaactatcgctctctagcttgatgctggaatggtaagtctcacgttttggaacgccaacgtatcataaggattcgacctgttgaccgctcaacctcttttggatctgatcttggcctttacccgattgtatacttgtgcaggcggtaagtgcctgcgatatactattcatatggtagccactctgaacgatttcttccttggttctctccacctcaacagatcctcattggagaacgagcccatctaatcgagttcccctcacttctccttccgcctggcacacaatcaggatcgatcgtatccatctctgtccagcgcgatcttcctgccgagcattctcaccaaaaggccttcactcagcttcagtcgctcatcctatccaccttcggacagacttccccgtcgcctcctcggcttgttcttcggaacacgacacagactagtgtcactcttgagtggggtaaactagaattcgccaccgctcaactcaaaggagtcgacatctacagaaacggcacacggctcgcgggcatcccgaatcctaccgtcaacacgtcaaccaagttgtcaagcttggcactcgacacggactacaccttccaactagtcatgtcagttaaatctgtctcttccgcgttgtttagcctgttcttctccagttgtcttatacttgctctttgttctcttgcatattcctgatcctttaggaaaacgtcggcaggaacttatccgtccaacgtgattagaattcgaacgcacactatcaagtacgtcttcatactctgcaccattcatcctcttcatccttgccctggtaagctaacgcatctttcgtttcttttagtgacacatctggtatttcagtctcgttcgggaatgtccaagacccaaatctgttgaatcagtgcaaggccgcactcgatcagatgggcgcaaaatacagtgaccacattcagatcgacaccactcactttgtgtgtaccaccccagtaggatccaatagtggcaggtgagatcttagccgtcttccttctctaccatgggatgcttttctgtatactgaatacactgcgcgaattttaatgttcttatttgaatcggccggatcatgcagcggaccctcggtagagtaccagaaagctctgcagttgagtttacccgtagtcgagcctggatggatcttggcctgcctaagcgagaaacggatggttccaagtaagatttcctatcctacctcagatagctgatactaattcagacagcctatctgatctcgatggttcccgtttgaaatgttacacactcttcgacaatcagtttctcagcaccttctcggcactcatccaaccacatttaatccaacggccttcaaccgagcgtctctgcccagctctccgttcaccaaccgagcgtcccttcctgctgacgctaatgttgaagctgacgacgaaggagcaggcgcagcttcgacgtctgctggtcccgacgaatctttgagggagtctgaatcgatcgttggcctggttgcaggtcagtctgatgcctccgaagcgaacgggcttgatgagagacaagagttcaagcggccagcaagtagaaatggaggggttttgaatagagcattcaagtatgtctcgatagttttctcttacgacatcttatctcttcttggtgatccgtggctgaacatattctctcttttcggtttccgcccatattagattcccattaaatgaatctaccggctcatccacatcactccctttagaatcacaaccaccctcttcgtccactgaacaacccgatatcaggcaggcgacagcgccgttgcctcccaaggaagacgcccgactgcctttgcacgaggatgaagaacacacacaggttccgacagcgactacggggatagagaatcgtaaagaggctgaaacagagttcgagagcgtgatcttggaggcttcccatcccgacgccgaacccgaacccgaacccgaaccagaaccagaaccagaaccagaaccagaatcagaacccaagacggctatcccggctgaagagtttgccgaccaaggtcccatagatcatgtcgcacaaaccgagacggaaacagaaccagaaccggaaccggaacccacggcatctatcgtcgttcccgaaccggcatcggcgacagaaagcgagcctgtatcgttacctacacctatcgagcatccttctcctgaaccccaagaaccaaccgacgtagaggaacctcagagtatcaatgacgttcctgaaaatgaagaagatttaaacgatactcaaccagaagaggtggaggaaggagaaggggaggaggtggaggtggaggggaaaaggaagctttctgtcccgttgaggtcaccttcgatcatgattcaagatatggactccaatctaccagcttcgcctctggtcgatgatgacgaagctagattcgtcgatgtcgatgtcggcgccgatgcggatgcgaacgcagatgaaacgattgatgaggagggtacagaggaaggaaacgatgaggatgatggagagggagagggagaggacgaagaaggaggcgaaggtgaaccaacagaagaaggagcggcccctgtttcagaggccatcggagcgaagaagaagaaaaagagtaacaagaaggggaaagggaaagggaagggaggacgctgatcagttaaacgcgctatccgtcctccatattttcgttctaccctctctttcttttcgttccttttcgatctcgcttgctcctcatcctgatgtatattgacacgattgatgcgcttttcttgcattaagcctgataagtacatacatgttgattctatttgtattaaaataagataaaataaaataaaaggacataaagcgagcctcctctacaaatatgaagaatagacagtgattcacagccatgcgaaatagactgtgaacggtagtggtcttgtggataaacaacgcggacgaccaaaaaagaggaaagtgcatgaaaagggataaggtcctttagagagaaagggaagaagaagaaagaaacttcccccttcattacacaatcacgaaaccaatctaaccgcccagacttcctcctcacacctgtatctactcagcccctttcctttttctcttctgatcacaccgaacggctcggcgccttgttcgaaaggaacggctttctccaccctaggtggcctataaatccgtgttccagcgatccactccagaacgtctctgatgtcttcacccatatggtcgaccattggtccggaaccggaaggagagatcacgttatagtcgatgtgtttcttgtctttcttaacaaacgttcgacggagggatcgcatagagttcttggtgggtgctccttcggaagataaaggttcgtttaaatctcctttgagcgaggtgaatcttttttttgtgaattagaggtggttgttaaccaaaggaggggaaggagaagaaccccaatttaagaataaatttaaaaaagtcagacgatttgtttgatatatagaaacccctacacagagaaagaaggagacagaaaacgaacctgccaccggtaatcatgattcttcgactggcgtcatacgtccttcttccacctccacaatccaagataaagtcgaatgatccttcatgttcctcatggacgacctctaccggttcacccgttctcacatgaccttccctcacgttcggtacgagtgacctgacccagctctctcctagatcagccgagacctggataatgaccacaacgcctctcgagacgagttcttgagctgctaggattccgacgctccaatccgcgattgcaggaaccgtattttccgatgccgtcgggctttcaccaagaaggacgagtgctcgggatcctttgttgatcccaccgacagcgcggtgggcggacacaccgaggagcggcaaagaggcgatatcttcaaggctcagcccagaatcaagctcggaagcaagggccccaacagaaggggctttagcgaggtaccgtctttcgatttcgatgaattctgaaagcgccccggatcgtttcacgctcactgttcggattcgtatccaaagcatcagataggatattagtatgcttactcggcagtgcacacgagatttgacaatctaatattcgaccaaataacttacatagtccaaacacccagtctcctttactgaattcattcacaccatctccccactcgactacttttcctacaaaacttcttccggggatgaaccccttggaagcatctctcgccgcaaacgcatcgtacgcgtccaaagcaacggcccatactctaaccaataaactcgtgcttgacagtttctttgggggcggtatatgagaagtgaacgatgcagagatcactggtgtatggacaagcaagctggcagctgaggcagtggacgatggggatgataatgataacgaggatgatcgatgaagaagggatgaaggagacgaagtggacgttggagacggcgcaggccgggcggtggaggtgattgtgatcgtggccatcgttgtttgaggaattccaagggtatcgtaagccaccttggagacgtacctcgagggtgatttggatggtcgataagctccagaaggcaacgtcaacgtactaggaatagcaatggtcatggggaaagaatcgagttcagaagcggatctgtgacagagtatgataatgaaacaagggagagataaaaaatactcacgaatatcctgcacctccgctcaagctgctaccagaatccccgtatatagacccactcatcacttggggctgtctgtaccgactgatgctctccaacccggcatcactcatcgccctggatccctttttatccatctgatggaatccgacctcactcgtactagctcttcgttgagcggtcgtgtaagctctgacttctcctgatcgatcgccagcaaatgagttcaagctcctcacgtccgcctcggacctatcatcgatggccgagctcgctttcttcgttgctccatagatagatcgagctctagaccatgcggctcctcctccatccgagatcacactagacggtgcagacggatagagcggaacgggagaagacacagcggatgggtaggaaccagtcatctcgaacgtgttcatcagtgtcgacgtcggtctaggaaggaaaaactgttgtctgccggccgaagtggctgatgaagggctaggagaaggtgaccggaatgaaggtccaccgatagtaatcggcgacggatggacagacgacgggtttgacgaatgcccgagaggtgaacccgagataggggaaggagcgggtggaaacgcggatggataaagggatggtggtgtccattctgaatcatctcttgaactaataccgacggaagattcgctccctcgtctgttccgatgatagtatcttgattgactgagttccataggtgaagagtttccactgccaccgcttccactacgatcattgacgactgaattcgagatcgtcaacgcttctaacgtactgctcaggatgacgggcgggggtacgtccacgtcgggccggtacgagttctgagaatacctagaaacagacgaagccaaagagagcgcagagcttgctctactgggagaaccgtttccggtatttctcaagttccgatggaccagttgagactgagtaccgatcactccagattgatctcctgccatgagccttgcggttgagaaataaggagtatcttcctcctcttcgccaactggtgaaagcatcgctccgatgtaagcctcgtctgttcttgagtctccggtactggcactggcgccggtaccagccaacatattcatcgcgggctgtcggccgtacacttggtcgacatcttcgttcgcgggagaaaccgctctgggggaattggactctgaagagattccgccgtaagcggattcgtaggtctctctccgtataggatgtatcaacggaggtgggatgacctctctaatcaacggcggggggacctcggttcgcctagtgatatctgtctgagtgaggccatctgtcccaaagtaggtcaagcctgatccggtaggggtggatgctgaagatgagggtgaggcgagaggaccggttgagaaagctgtgggtgtgggcggctggagtgtcaagaacggggtgaatgtatcagatccgggttggtgattcggccggctggtttcccgaggtggtgagagatggttgctatcaatgaccacatcatcggccacgccgttcgaccggagttgaacacccagaggttgtgtgcttaggaatgatggatcagtcaagacagaagtcaagcgaggggaagagaccggtgtgtagaacgcatccgattcagagtcgctctgaccgacagagtcgatggatctactgggagagatctcttgaaaattcgctgaagaagacatcaacttttggtcggtttggacgagtgacgggacaataccggctcgctggatggcttcacgtttggtcgtggttgaaggtagataactcctcgagagtttttgtctgtacgaatcatcggataggtcagaagctccgggtgatggttctcgtcctcggccttctcgctctcgttgtcttcggcgtcggcttgatgcttccgctcgatagaaagaggggtctgagagctcatcctcatcctcatatcgatcacgctcacgctcacgtcgctctttccaaccgttcggtcgatcgtccaccatcgaactcgacctagttttcctcctcccaccggtactcatatattcctccttgaacgactggtggtcgaaccagtcggaagactgtgtggttcgataacctccgtcactgcctccgtaagcggccgaggatcttcctgctttccttaaccgaggatctatccaacgggtagtgttccgaccttcttcttccctatatccgtccgaactgtccttgtcgtcatcctctgcctcgacctcatcctgtgccgaccactctctggggcgcgttcggtcgcctcctgatgaagctgaacgcctctgatatcgaccgtaatgattcccgccatcaccatggtcttcgtcatcgtcgtcactatcccctctatatcgatacctgtcctcacgatccatataccgataccggccagactcccccatgcccatcgttgggggataaggttcttctgaacgacgactaccgcgaggtaatttggatggatggataggagcagcttgagaatacgatttcgaaggcgcgtgtgtgaccgattgccagaacgaaggtttccctctggagcttccttgtttcgagggcatgactggtgagtgagtgaagcggatgaagggaaagaacgaagagagagagagaggaaacgattcaaggaagaggtgatgcagaagagaagacggctgaaacggcgaccggtcgacggtgatcgaaggctgagaactagcctgatgttttctttctttcttttgccaagacccaaacggagtcacaacaagggatcagactacactctcaacgggagacggaaacgcagaaggatctgtctgtcttactctgcttgtcttcttgtgagatgtcgatggtaaagggaaccagctgggtgtcgaacgagacgaaagaaggtaaaaaaagagaggcaagggaaacaaagcgggtaaggcacgaaggcaaacaggcacgaaggcaaacaggcacacgaagaaaaggtccagaccgggcgaacctacgtcatcagttacatcacgttctctcctagttacgcaagccttggaaataaagttactcatcccatcgtacacgtcgatcgacagaatggacaagcagaagtgggagtacaagcacatgtatgaggattccttcagagttttatgaccatacaatctctacatttcgtactacgcgctctttacatactcttttccgaattcaatctctacaccttttgagcccattctttccaagagaacggagctttatagatcgtatccgtccggggtggcttctcgaaaaagatcaccttcacagtcgtatcatccctctggaacctactgaccgggggtcctacactcaacaactctctcatctttcgatcgtctccgccagccagagagtttcggatgagtagcgttgccgcgttgagatccttcccaaacatgaacgttccctcggtcgattctgccttcttagcttgtactttggcgttctttccatcaaacccggtcgacagagagtccacggtggacaatatatccgcccgtggaatttctaagaaacagaaataaaagagagggataacaaagaaagaaagaaagaaaagaaagaaaacacgacgatattgcttccgatgaatatgtttgttcagaaaaaggcagagtggagaggaaaggaaagaagaggacataccaccgtgaagatcaggttggtcaatgaacgctcctactagaccgacaatagcctcgttcgacaacctatcgtacactgcaagttgcgttcccccgtccgtgcacgccaagaacaaaaatgatcagcgccccaagcaaaagaaatgtaacaacaaggagatgaagcctcgacaaaggcggaaacgaagacgtacaaccatcggttcccaaaaccaagaacctcaattcaccctctctgtctgacccgtctgacttgagatggatcacctccggtgtggccgtcacatagggtggcgtcttactcaatgatggggcaggccttggtcgtttcgagccagctggaacgaggctgtctatgagtctgatttttttttgacaatcacacagagaagcgctcagtggacgggtcttaggccagacaaagtgaaagggagaaggagaacagatgtaagagaaagactaactccggttggatctccttggaccatttatatctcgcatctccaaactgatccaattggacatttgaaaagaaaattagaaagaagagttagctagaagaagaactcaacctgggatccaggtctatacgtagaatgaaaacagtaacgcacagctctggaaggttcaagtccaccaagaacccgaccgcgcatgatgactgaatctctctccccttgtgggtgttcaccttggattctatatacgtgagagggcccgaaagaaatttcgaacatcagcgatgatggcacgagtcatcttgaaaggaagaaatcagaagaaggagaaaccagacctaccgttcgagttcctaacaatccaacacacgcagtaaaagaggtttaagataacaagggatgagagatgaaaagaagtgagtttagatacaacccctgtttcttcatccgaacagtcaacacagacccgacatgcctttggattccttccagtttggtcctccgttaatacttcaactctccaccttccggctggtgcctgtgaggtttgatctgtctgtccgtctggattgagctgggtcgacgcaggattcgggacccaatacccggcgacagcccgacaatcaccagcaagggcgatatagatgtctttccgggcggtatcgatcacggacagtagggcgcacgaaccggagagcgcaggaagaatcgtggggtacgagatcaagctcaggtccggactattagtggaaaagaacagggaaagagacaagataaggaataaatcggaacgggacgagtttaaatctaaaagacggatgtctcaagtatgggaaccccgcgcgcttgatagcacagcacgcgatactcactttgaaggaagacttgacagaagatccacagctaaaaggtaaaagatgaatctttcttcgatcagagacacgtacttgatatcttcttccatcttgtcaatagaaaaatagggaacgaacgatcccagacaatgctcttgtcgagagtctgccaggcatgcttaatgctctccttgatctcgtccatagaggccccctctagctctctactctgtttggaggacgaggaaaagatatccctgagtctgctcaaacccaaagttgagaatgaagagggagacggctggtctgtggtcgtgcgtagctctgaatccgagctgaaaggcgaaggagatctggacagagtggattggaccgagagggacgttgtcgggatgagcgtttgggagaggaggtgagaggtttgaaagccagagtgaccactgaagtgggatcgagcgacatgaaaggagatatcagccagctgaacctgagtgtaaggatatgattcgagactcactcgaaaacggcaaagaaacagaggctgcgaaaaggagagaaggagaagagggtatcagcatatacccaaagagaaggagaaaaataggaggaggggagagaaaacactcgaaactttatactgactctccatctgcgcccttaagaatggcttgggcgctccgatcttcgataaactcattcgctttgagcgagctagtgtccgacctgacaaccggatttcctggtctgtctagagtgacaatcttttcgtctgctttcagcactcgttcagcctctgctagtccgatgagtttccaggtgtcgacccggacattcgaaggatctatgatgagacaaggtgcatagatagattagagtgtgcgtatgtgagtgatcggaactgggcgattacagatatacgcgtagaaggacatatgctagtagacgagaaaagggcgcgatgtagaatggacctaccagatttcgttggtagtctgtcgttcaagtgttcagaaagcagcgagtggtaaccttagctcgaatatacccagacaagagaatgaactaggaggaaaggaagaagactgacgagaacttggtgtcaaacttgtgagcggtatagacctgactttcttctctgtgttctcggtcgagttcccatctgatcaagaatatcacgcagaacgtgccaaggaagagggagaccgcgttgagagacctatcaaacacttttttcctgccttccggggtctgcaatgcggggtgggattgaagcttgtgaaagagcttgaacctgccgtccggcagctcggccggtggaggaggagctcgaggaaaccgagggattctttgatgttgggatgatgacggtggtgatggtggtggtgggagtgcgtacgttctgatactcaacctaggatatatgagagattgactcaacaggcagacctgccggtagagacgtgaacgaggcaacatgatgtcgattggatgagcttgatgcgtctagagtagaggtacaaacggagcacccacaggagcaacgggcgagtacagaatgaatgagtgaccgacttgggtgagatggcgccggttgggttagggttagttcatggttacggtcaaaagcggtgtgcaagcccgattaacatgcccacgtgacatccaaaaataagagttatctcaaaagtaacccagcagcgcatcaatcccgcagcttactaaccgttgttcgacggaagcccacccagcccac

SEQ ID NO: 2733 - DNA, 46164 bp, Xanthophyllomyces dendrorhous
gcccaagtggcaggccggtcggtcggtcgatcgaacggatcactctgcaggctggccatcgaacgagcggtggttctgctctgttcctcaattgaatacgcatgcttatttttggctacgggatttacgaaaatagaaacgtctcaggcacaagtgatttatatgacgtcatatcgtcatccggcatcgatcttcatcctcgctagaccgtagtctgagagatacgtatgtacatgtgaagatcgagtgaatgactgagtgactgagcgggtgagtacgcaggcgggagagccatcaagcggatgtacgctaacaaactctcttgagctcatcatgtcctccttctcctcctcaacgcttacgtaggtctctgcagcaaaggaggatggcttactgatcacgatcgagcgtcgttcgtcgtgttcctctttattttcgtggggatatataaaccaagagggtgaaacctttcaacagacttgtcttcttcctcttttctactatcatctatacacagaaccactaaacagcaatcatgggcaacgtgagtatcctcttggtcttctagtccagtctgacctttctagatcatccatcctttctcttgccctgaatgctgactcttatccgctcacctcttgttttaacctttcctatcttctaactattctcccccctagaacgctattattgataacgtcagttcctcgagttttatgcgcacatacacacacacacacacatctacacattcacatatccacatctatcaggcaaaacgcatgaacaaacccacttacccttctctcctcggttttctttctcccagccaaacacatccactttggatcttaccacccatggatcagacttcctctgggcggtatgcgcactgatgctgctcactgatctcatcgtcatcttctggatgatgacgctgccaaagggaaccagagtgttccaccagatatccgccctcatccttaccactgcctcgatcgcgtactttactatggccagtgatctaggagtacgtcctctttcttgtccttcgcctactaacttcatgtgctgatggatttgctctccctactgttttagtccacccctattgttcctacgttcatccggggagcggcccgatcatcccccagaactgcagacggtcagattacccgatcgatctggtacgtccgatacatcgactggaccgtcaccactccgcttctcctcctcgagatcctcctttgcactggcttgcctctttcggacattgttaccaccgtctttttcgatcttgtcatgatcatcggcggcctcgtcggtgctctaatcactagccgatacaagtttggttattttgtcggcgcgtgcttcgccatgttctacgtcttttacatcctcctctgggaaggcagagtctcggcaaagaggctctcccccggagttggaaaatcctataccacctcggcttccattctcgtcttcctctggactttgtacccggtcgcctggattcttgcagacggaattaactacattgcgactgattcagagatggttttctacgggatttgtgagtctagtgtctttctatattcttgtctgagtatttgtttgtctacttgcctgtgaactcggtgactaaccacactttctcgcgtttattttcttcgtcctccctccctcaaagtggacgttttggctaagccggtgttctgccttttccacctgtaccaactccgatccgaagatctcaccgttctccacctccagtctggtaaggtatccgacggtgtcggtggacactacgatcagaagcgatcgtacgagcttaacggaggtccgactacgtctgtaagctccgtcggagctggcaccggtctggccgctcccgttcgaccggacaacgctcgacgaagaacttctgagaggcgagctgcgttggaggagcaggccggcgctcagtagagaggaagaacgtctcacggaaataaaagggaaaggatctcttggatagggaacgctgagccttttgaaatccccttcccgtggtaaacagggcagtctcttttttgtttttttctctttctctttcttcccaactacacttcttcaacatctttgtagtattccatacttctctttctctctcccctcctctccccctccttgataatctccaccttgatcttctacactttaatctatatttccagacatacaatgtctgaatcttctactacatctctacacatgtatccctaactacttatcctctcgatcatgtacatgatcacttatcggtccctatcaaatgcttatccctccccatcatcgtattggctctctcctctgtttccaggacacatgcgttgatcccagactacacgcctgatttgaatatacaaagctcatctatcgtttgcagagagaaaaataaacaacaaaaacaacaacgacgagaacaacaagccccagtgctgctagaagacagtcaaagcatacttcacactagtgaacgacgcaagcgcgcttagtttcaatagaccaactaaacgaagatctgcttccgagctttctccgcaatatgctgtgggcgaacaatcggtactgccgctcggtgttcgttgactctgctggcccgatagagatgaagcaggactttacacatcacgttttaccgttacccgttggggttcgagatgaccgagcacgaaaaggagtgcgcgcgtagacctcccagcccacaccattctggagtccgggaaaacaggagaaagagagagagagagagagacatacaggtcgagagagcggctagggcgacgagatcatgctccttgggaacgagtgatctgattaaaggttccggttccgatttggtcaagattcagcccagatacaccgagaaaagaaacatagaaagtgatgaagaacaaagaggcgtgaccttacatcatggtaacagacttcgtgagcgagtacgcgtacgttcatgtgtgtaactgactgactgagagatgaagtgatcagacgaatcttgtaccgaaacttgagctggtgtccggccgcacattcgcggttcagacgtggatgtattcatcctcctccaaataagacagcgtgtatacattcgacaaacatcctgccattcttaggcttgatgatctatgccatagcctttgttgttcagaaacatcgtgtttcgcccttttctctatcggtttctctggatgagacagagagagtattcgaagatagatgtatgcttcttgatgaagatagctgcagcgatacaatacctgtcatcgtgtgcaagcaagtaccgcatcggagatagaccagtagcaaagcatggcacattccgtcgaaacatgcgtaccccataagacgaagaaaaacaagagacaaggagaaccactcaaccatcacggcgacctattaacatcggatgatcctgaccggtgtccatgatcataaactttggccgtgctagaactgaaatggtggtgtaaacatatttgcagctaacaaatgaggaaagtatgatcgttccaaatgttgcggccacgtgaagcacttgtaggtttgtttctcaagacaggatagaatggaaggagaagaaaagtcaagacatcagaggaaatagagacgacgatgaggacgacgtccgccagaagaaaagagatacagaaagaaagtgacgctcacatccaccataagcgtaccgagcttcgggatcaccagtgtgatatccgtacgtgtacaacaccctacccagcacccagattgcgcccagggaagcagacaagagtgggtactctagtccgttgaacaagatcccaaatatcatgtgtggaaagttctttatgggtttagcaaagtgacatcgtcagatcagcagaaagcatatcgcaaccaagcgcgatgcgcgtatcgaagaagaaagagaatgaaaaagaaggtagacaaacctccatcgtgtttgcctgtgctcgttgagcgcaattaaacctaacagcctctgggctggcatccatctgggccttttctgccatatactgtgggtacggaatctttgctgccgctcgaaacttgttcactctgatggattggtatacatttaggaagacttgatctgattgaaggacaacaaagagaggaaagacaagaggaggaagcgcgcatgcccccgagagagtctaatcagacatagaaagccccctcttcttaattgacgaggtgagaagagaaacacaagatttacaggttgatgtgaccaccagagtcacatagctatagttcttaggaagcacggagctgagcgattggaaaaccaaccgataaccacaaggaatagaggagagagagacatgtcaagatcgattcaaccagtggtacattgatgttccagaggccatcggaaacaagaacccttacaaaactgcagagtccatcttgaagtgacaagagaagtagcgaacaaaacatcgagacaagaggaactcaggataccgaaacagtcctatagactttatctaacccagaggtcacactccatccaagctgttttccctcatgcacaaagtctcatgccaaaatcactggattcatggatcaattcgtctcaacacaggatgaaaccaaaaaaaaagttggagagaaagagctgcctttcagccagagagactgggctacgtgtagatcaaaacacaagtaccaaaaaaaaaagagagggagagggaacgtagagaaaaagaataagtaacaaggggaagcgatagaggataagaaagaaagccacaagataaagaagtgagaagaaaaaggatggaaggagaaaacgtgagacgctggttatgcttaaacactggatatccgtctagaaagtcgtcatctcttcaaaaagaaatctccgacatcatctatgacttgtctgtgtttgtggaataaatccaaaaatcgatcgatgtatcagtaacagatacagagaatacgctctagacatcaaaagcagaagagtcactaacaaaggtttcgcttgatgaccttgacaagcaagttggtgtcagggaaagagagggtctcaaggttctcggcgtaaggagtgggaacgtcggcaccggtgattcgctcagcaggagcatcaaggtagtcccaagcctcactctcacagatctgggcaatgatctcggatccaacaccgaacgcggggaaaccaccctcaacggtgatcaatcgaccggtcttcttgacagactcaatgatggtctcgatgtcaagaggtcggatagatcgaaggttaacaacctcaaccttgatgccctccttagcaaggatgtcagcggcctcgatggcgtgtccgaccatcttggagtgtccgacgatggtgacgtcggtaccctctcgctcaatcttggccttaccgatgggcaagacaaagtcgtccttcatggcagcctcgctcatagggaaggtcactccgtacatcaattcgttctccaaaaacacaacagggttctggtctcggatagcggccttcatcaaacccttgcagtcttcggcagagtagggactgacgaccttcaatccagggacggatccgtaccaagcagcgtagcactgactgtgctgcgcggcgacaccggcggcagctccattgggtcctcggaataccacagggcagggaacgtttccaccagacatgtagtaggtctttccagcagagttgacaatctgatcgatagcctgttgggataataatcaaaggaggaacgctgagctttacattcatgacacgattgtaggataaagctaaagattctgtacctgcatggcaaagttgcttcaagaatcaaagaaatcgtgaatgtcggtacaatgtacgaaagaaaaaatgtacaagaactaggccgacttacaaagtcatgaactcgcagacgggcctcaatccagcaagagcggctccaacaacgagaccaccgaatccagactctacagaaaagaaagacagatttgtgatatgagtaaccagagagttatttcaaactttaggcatacgcgtcgtaccagtgataggagtctggaaggaacagtagaagaaaatatataagcttatgcctcttcaatctggaggtcagcaggagatactcacgtcaacaactcgctcctctccgaacttgtccataagtcccttggtgacctaaagtatagggattaagaaaagaaagagaagatacatcagctaggtatctagatatatcacttgtcttttcccaatcggccgtcttgagcgttgggtacactaaatgagaaaggaacaaaccttgtaggcaccgttgtatcgggcgacctcctctccgatgatgaaaaccttgtcatctcggatcatctcctataaaacgagacgaaaccagaaagggaacatgaaaggtaaagaatgggaaaaaagccaagcatcacaagtcgattacaaggtcggagaaagatgagcttggtggttaacgatcggctcaataaagaaacgaaaaaacagagaaacgaggagacaaatagaccaacctcctccatagcaacgttaagagcgtctcggacggtcatcttaatgaggcaacatcagaaaaggaaaaaaaaggtaaccccaacatgtcgataatcacatattaaaaaagaagcgaggagaaaaaaaaggatatcagcgaatcaagcttcgatcaacgtctctgacctccagtagcaaagcataactctcggtcatagaagcagatcgtccgatggatacgacagatcgaacaaatagataaaccggagagagaaagcaaacgacgaacctcgtgtccaccagacgaggcaaatcgcttagaagcccccacaagagcgggagctgcagcgaaccgggcggcaggagaaacaacggccttgaaagctgctggtcgaacgaatgagggagcaagtcgggcgatagtagggaagaccatgaagggcgatgagaaacggaaggagagagacggagagggagacggttgaagatgaggatgggatgtggtgtgtgttggagaaaatggcagtaaaatcggaaacagcgtgggggagaaaacggcgctccgttttttgtttttgaccaaataaaggcggaaatttcatgtattttctcctccagcctgtggcctcaatcgattcttagcactctctttctttttctccctttgctcctttgtccgttctatgtcctctagatttgatctatacatcatcgcatggacatacatctaaggatcttcaggttcacagcctttccatctgtcagagcgcacgctcataggtggatgccatctctgattggggcaactgattacgtaattttcgtagttgacttcaatcttgactatatcgacctaccgatttaatattgtttccgtacgtttgtccgcatgcgcaagaacaaaaaacaggatatacatacgtcgagaactcggaatggatgaacagatggcatacgaatcctaactcacgacaattcaaacatcatctcattcatttttggtaaaacgtttaagaaaagaaagaaaagatagaaaaaaggcgaggagagagaaagaaagaaggggaagagatctacagtaattcatacagcccgatcactccttcagagctttcctgagaacctcaatctgtcgcttgatcatctccctgctcggcccaccgatcgcgttcctcttctctacactcttctcaaagtcgaagacgtcggcgaagaagtccttttcgaacttgggcgagagctcctggtactgctcgtacgttaggtctgcgatcgagcacttctcagcctcggccaacgcgacggctcgaccagagatgtgatgagtctctcggaaaggaacctgtatgaaaaaaaagaccaagtgatacgttgttgtcagcggaaatttcgatggacatgatgtcatctggacaaggaaatactgaccccttttcggacaactgtcaatgtatacaaaagaggagagaagccgttgagcgcattgtacgcatacggacggcatgcgccgagaaaggagaggtatatgctcacggtagtcagccaaatcggtggctagcatatccatggtcaaagcagcttccatcttctcctggttgatctgcgagttttaattgatgaagaaggaagcaggcgaaccaacgtcgcatcagaaacatggccgtttatacagctcgataccttttctacgaagaagactcactgccatcgttccgatgacaccctcgcaaatcctcaagctagcactgatagtatcgacagaatcgaacaaaggctcctggcactcctggagatccttgttatacgtcgagggaagtcccttgagagtcatcatgaatccagacatctgaccgaacactcggccggactttcctcgaaggagctccaaagaactgaaaccatacagataagaacattagtaggccgagcgccgaaaacgacattttcagatgataaagagaaatcgctcactcggggtttttcttttgaggcatgattgacgatccggtgctgtaagcatcgctaagttgaacaaagccaaactcggcggtagaatagatgatcaaatcctcagccatcctcgaaacgtgacccatggtcatagcggcccactgaaggaactcgacgataaagtctcggtctcccgtaccaaagagcgagttctccacgacagaggtgaatccgagctccttggcaaggaaatctcgatcaacatcgaacgggtttccggcgagtgctccacatccgagagaaagcgacgagactcggggaagaagcgaagaaagtcgggcgaggtcggtcgagaaagagaatgcgtgagagaggagcaagtgcgaccatcgaatgggttgagctcgctgatacaagaagttgagcatagtgggtgtatcagatcaagagtgccgagagaaggaacgatgaagatagatttacctgaagatgggtgtatccaggcatgaggacgtcaacctctttctcggatcggtcgaccatgacggcgatgaggtccttgagatagcccttgatcacccgggcctcctccatctacgagtcatcatcgcgtacgacggcaacatcacgatattagctttagaagatttacaagtagccataaataaccaagacagaagaggaaatgaaaactcacaagccaaagtcgaagatctgtcgagacttgatcgtttcgggatcgaccggtgtgaagctttccaccgatatccttaccaatgatctcggaaagccttcgctcattagcagtgtgaatatcctcatcatcaggggcaggggtgaactgtccgtgtaagtcacatagtatgtttccgtttagtttgtcagatacaatatcgtgttgtgagtagcgacaagaaaaaaaacagatcatacccttttctcagcccactccttcttgacctccaagagacctctctcaatttcactctgctcgtgctcattaagaattcccactttgagaagagctttggagtaggcgatggatcccttgacatccacagcgtacattcgctgatcgtatttgaggcattgctatatcatttaagagaacgctcgtccagtttagtccaacttccgcgttgattacagatagagagaaggcttacgttaaactcgtgcatcaaaggatcggtctcgcctataaacccgataaaattcggtttcgtcttcagcactcatagtacgaacgtcaacccaatgcacagaaactaaccagtgaatcgtcctccccatagtttttgcttggtaaaatcctgaaaaaccaacagaggtatatcaagataagagatctgcgagaacagcccgggctcaactctctttacccaacaacttacagtcatattagaatagtggaaaaagatctttctctgtgcttgtagagtttggcagtgggtcaatgttaatagaagaaacagaactcaaacgaaaaggaaagaagagggaaagaaatatgagatgactcttgagcgaaaacgaaaattaggacaaactgataagatcccagccggcctaattgaaatatcggtctgcccgcggcgagatagggctaaatgaggcacgtgatatatctgagtagaagatcacgtgttgtacacagcatggctcaccaactggggctgttgcgtgtccatctcggactccagagtgtcatccagaaactggagcatccctactagacgacctgatcactctggaatctcactttcccactgacttgcatcagttctcattcgtctgtgaagtcataatttagagtcatagcagatcagtaagctagacagctctccacagggagcagagatcaatcgaggagcatataccatgtctacaggtggaaatatcaaagtggtagtcaggtaagtgagccttcatgatctgtcatatcatcctcatcaaagatataaatcacaaatggttccttctgcttcgaacaacagatgtcggccactaaattcgagaggcaagtcacccttatgtcaggtctttttctcttgaactacacgatgaaccatgaagaaactggcacagaggaagaaggactggaagctcggaccttgcccttggaggtgtatagtcgcgtcgctgatgacccttcggtttaacgattcaatcctacgatagaaattgcgcgaggggatacctcaattgtatccatgtctggcgtctctaccactatagagcctccagcggtggagcttggcgcttcctccagagggaccgaaagaaaaccattgtccttctcgttcgtagattcgcgctttcatccttctttggcgccctacccctttcttgtcaatctctgaacttataaatccggataatgatactctactcgaaacatttagattcgaccactcttgtacgtacttgacatatgcaccaccgtcttgtaagtctggactaataggaacgcatacatgcgcatctttggaattgacagattggtcggccggcaagaaatctgatccggaatatgcttctcaagatacgctctatcaagacctaggaataggactgcttgaccactcctttcaaggttttaatacttgtatctttgcatgtacgtaccaactatcgtttttgttcaaatgcttagtgcttgttacttgggctagtcatggcactcatatcatccatgccacttttggtttcagacggacaaactggttctggaaaatcctactcgatgatgggatatggtgtcgagaaagggatcataccgttggtctgcgaagaacttttcaaaagagccgagcaagccaagtcaaagattaaagaggatgatcattatggttactcggtggaagtatcttgtaagtatgctcttgctctttgcatgcttgtgagtattgagatgatcttgattaatgatatgatatctcgctcggaccagatgttgagatctataatgaaaaggttcgagatttactcaatccgaaaaacaaagggtccgtcagtcctatgcgtgcgcaattgcatgatattatatcttcctaatcagcgggtgatctttcctcccttctacttcttcgatacatagaaacttaaaagtccgagagcatccttctttaggaccatacgtggaagatctcagcaagttggtcgtgagtagttacgacgacatcatgaatctgatggacgaaggcaacaaggtaaagcatatctcaaatttgtttcttgcatgtactcacgggttctgagaagcagtttatgctattcgaatatacattgaccgagtataggcaagaacagtagcggctacccagatgaacgagacaagttcgcgatcgcacgctgtcttcactttagtggtaagcgagaaggtttcctgcttgcttcaacagccataatctatgtatgatcgtgctcacacatttctttcggtatttaaaagctcacacaaaagacgtacgataaaatgacggatatgaacatggaaaaagtatcgcgtatatcgttcgtcctcattcacatcatcaccactatttctcgttttctttccgcttgtctaattcatcaaatacatcaataaacgtagtctagttgatctagctggctctgagcgagccaattcgacaggagctacaggggcacgtctcaaagaaggggccaacatcaacaaatccttgacaacactgggaaaggtgatagccgctttggcaagcgctagcgcagagccagaaaaaggaaagaagaagaagaaggcggatgaacacatcccgttcagagattctgtgagtttcattagttgaatacgaatggaaggtttcatttaaaagaagcaatcaattaacacaaagccgctcataggtcttaacatggcttctgaaggactgtttggggggaaactctcggacgactatgatagcagccatcgtgagtgaatgaatacctatctgcttctttatgtcacttggttatttagatagtttcaactattcacaggcaccttcgtcggcatcatatgaagaaactctcagcaccttacgtgagcttgtatcatcccagtgacgctgattttgtatcagaatatcgtattcatcagatccaaacatcaccttcggccatctaggttacgcggatcaagcgaagaagatcaagacccgtgctgtagtcaacgagggttagaaaaaaactgtctgaaaaggcctgatattttgatacaactcattgataactctcttttctacaatgttctggttgctcagatccgaacgcaaagatgatccgagaactgaaagaggaattggagatgctacgaagtaggtcaactgtttatgtagatactaacgtgctgccttccatgtttgctgaagcatctcaatcattcttgcagctcgtgttactggaggaggagctaccgaatcgctcttcgatccatcaattccgtaagctgctccccatgaaatttatcgatttatattttcacgccagactgattgatagtgcgaaacacatacagaccggaacaacagatggtgacttatcaaacgaaagagggtggaatccggacggtctctaaagcggccctgcaggatcagatgcaagaatctgagaagctgctcaagtcggtcaacgagacctgggagcaaaaaattcagaagactgaggaagcaaggaaagaacgagagcgggctttggaggaactaggaattactgtggataaagcaggagttggggtaacaccactcttcacctttctactatccgtcgtaaacctagtaacatgcacttagtcattccgttcatcggggttttgtctttttgtctaggtacatactccgaagttctcgcatttggtcaacctgagtgaagaccctctgatgtcagagtgtctagtgtatcagctcaagcctgggaggacaaccgtaggaaatgttacaagtttgacatcacctgccatccgtttgtccggctctcagatattagatgaccactgcgccttctcgaacgagaacggcgtagtgacgcttgaagcctcaccaaactcattaactgtcagtgtctttgtgaaatcaaaccaaagcttatagacaacggtctattaatctcgctcaactcttcttctcagatcgttaacggaaaacgagtattgtttaacgaggtaaatcttgttgaagaacatcgacatagagtatcgcttgtgtcgttgcgttattgacacatctgccattgatttctcaaatcagccccaacaattacgatcaggatacagagttatattaggcgaccaccatgtgttccgtttcaataatccagaggaagtccgacagcagcgagatcgtttcaacacctcaatgagagatagcatatccgcttcagacctttccggactaggttttgggtcaccaggttagtggcatactatcgcagaataatgattacatgcggaagctaatagctgtcctctagtgacccgccctgattcacctgattcgttggcagaccaagatgccgtggtcgattggacgttcgccaagcgagagttagccttggctcatctcaatggccaagacccaggcctgaacaagcttaacgacgaggaccttgataaactgttcgatgatgtacgtgccatgcttctgtgtttttttccactccatgtgttgttaagatgcgtttggttcggttgttttcaagcttcaaaaagtacgaacgcttcgtcgggataagtcccggcctgatagtcgaatgagcaccaatgaggatttctggagtgataagggatcggtcactcgacatctctctagcaattttaccgaagacacttcaatagatccaccaagcgttacccattcgagttccggtaattttcgtctcaatactagtcatggtagcaacaaagaagaccggccttgggacggctaccagagtcaattatctacgctgggagaaacgccttctgaggcagatagagaggacttcgagatggagagagtccacatgaaaaaggcaatccatctgatgaatcaggagatgaagcgactgaagcagcttcggagccgaggagaggtagacgcgaccatcgagtttgagcctcaaaccttctctgctagagagttgcggctagttactaaggtgctgaaaaggtggaggaacctacaaacactacagatggctgaaacggttcgtgacttaggttcctattgaacttgcttagcgatgtctgcttcattcattcgactcatttcctgtgatcgtttctttcgattttctcagatcttgtctgatactatcaaaatcaaagaggctaacatcatgagtcggagcctaggtcatctaggtttgtctttcatggtttttactgaaccgtactcattcacatactcaactttgtgttttatcaagtttcatacaactggtttattacagacgagggcgccctatctgcttcaaggtcggctttagatgccgaggtaggtatagctggtatagatgatgatccttccggtgaaatctctcggtctcctcgtccgagagtaggggtcaaggtactagatagtgagcataattgtatgtcttattctgggttaccgctgaatctcgttgcagatggaagtctttgggtttgctgataccatgctcggtcgactgcaggcgtctatatctggccatacgacaaatttctgcagcaatacgcacagatgaaaaacgtggctgagttgcgcgaaaatccgtaagtcaagtatttttatgtctggtcctatatctagcataagctgaaaagggtatttttcactgtcactgtctcttcacctctcaggacatattcccaacatttttctctcaaaaatccatttcatgaaatgtccccgatagaacattcttttatcggatcgtcgttgatttccttggcttcactgtaccgaggaatatctgcttcgaacatacatcccatattctgtcaatacacctcgtaggtgctcatccacacttgttttatgtgcttattactcgtcgctgattgtttggccgaaatttcagtgaagcaattggctcctgccgtatctctctcaacatatcatccgttcaagatcaatccatagtcagctccgcgctctcttcttcggcctcttcacatcattcacctgctctgcctccaccaattgccgtcggcaatcaggtcagctttgtgctttgcatcgacgatgtcaaaggaccctcatcccttgacttttcctcacttcactcccaatgtcgcctcacctcatttaccggcccttccatccctgttgaggacaaatatccttcatcggctatcgacttaaacaaccgttctccttcccatctctctttccggcgtcagttttctttaatgattacctcagagatcctacagcattggcgcgaaggttatgcacctatcgagttctttgctatagtgaagccgggctacctggagcgactcttcaactgggacagagctcgagagcgagaggaacaagatgatacaagaaaaacatcgcagataaatcttggtctattatccaaagatgaatcagtgcgacgaccaaaagccgagtcgattcatactcaatcgtacgacatctcggcttacctaactatctgcgagatggactctcttggagactattctcctgtgtccgtgctctcccagtctttcctcgatctgggtgcgttctaccttcaacaaggtctgcaacgacgggtgaagcttcgcctgagttacaactctggccgtaagcttccgtgggtaaaagtgtccagtatgtcgttagggcatgttcggttgctcgatgacaagggccaaactatagagtttcatcaaggatcttccatcgaactgaaacttgattccgatgggactgattcggtggagtgtttgcccgatggttctagctctctttctgtagaaggcttttggaattcctctctgcataattcatcttcgctcaatcgacctacagcctctaaccaacgggtcgttctccgtttcacgttctcaattgagatatcgacatgtgaagagcctgcgacgtttactcaagatatagccgttcgaatactaagacgaggagcatccggcccggggtttttcgatgtcggtttctttagctcagcgcgccttctttcccgatccagctcgatcttcaacctttctctcactccgcccacaacgcgctctgcaaacgacctttggcggctagatacctcggaagcctacgttcgaggggaagagatccttccatctgattggaaacctagaggggttagtatagtccaggggcgattccggctgatggaaacagagaagaatgcggcggacgtgagagtcattaaggcgttactcactgcctatgaggaggagccaatctcgagaacattagactccgcgcaagaggtcgatcttttgcgtcggtcacttggtctttggaacaagtttggatcgaaacaaagagtgaggttctatgctcattcatagatagcctcgtgataagtgctgacgagaccttaacacacctggttgttcttctatagcgcatgctgaatcatcatgcatccgatcccagcctatcgatcttggccaagtatatggacatcaacgatctggtgcccaagcttgttcctcaagtgactttacttccacgatcgtatgtgatatcatcttttgctatcatctataggctttattctgactctatccgatacattcggtgtacatctcatcgatggcaactttacgtttggatcttgtacagagacaaagtcgctaagaagggctggctcaatgtgcgctgtcttgtgtttcatattccaaccttagcagagctgactcgttgactgaccttcttaaatctatcgtctttcaacgtagatcctcaccgacgcgccaaacaacatctgggcgaaaagatactgcattctccgagggtaagtgtgtccggtcaaatatcttgttagagtctgagtacacatctctgaatccgaatggtgcgacctgtttttatttaccctcagatcttacttgcatctatacgagacggcggctgcaggcgatgaggcttcagtaatcagtctcgcttcccagactgctgaagaaggaccaagcgtggtgtcgagtccggaggtcgaagatctgctgggtcggaaatttgcgttcacactgttcacaagctcaaactcatacgtcctccaggccggaagcgagaaggacaagcagagctggaggtcgacattggaaaggaaatactgaacgtcgggtgtctttttctctcttttactgtaaaccctttctttagatatctcctcttacgactttcacgaccctctagatcgttccttatacgccatcatcctctctttgttcagagatcgacaaccttgcctttctctctctctcaagtttagatagtcctctgtagacatacttcttgccaattacgtcataccccttactttatgttacccttgaacgacgtttcaaatttccgggcattgtctattctatcaagtgctttgcctctctcttgggtgatgttttgtcttatcagagacagataaacgtcgatgatcggagaacttttggcttgataaactggatacagtgcagtgggcagattgggtttgaaagtgacgtcaacgacttttgtatctaaagaacagctcaaaacgcatgcatatacccaggataaaattcagagaggttgtaagctgatgggtggagaggaactaagaggtttcatgagaaatataataaagctcaacgcacactttttatcaatctcacttggccttgtactcaggagggggcgtctggaccccggcgggtgaggctcccatggtatcggcagccgaaccagcgggttgagtgcccgctccggaggaagggcttgcaggtctagtgaagataatagcctgttggagatccaaatacaataggaaagcaagaagattatcagataatgaaacacaaagagtaaaccaaatccagacaggacgaaccactaaggaagcagcggcagctccagcgagctagatggccatgcgttcgagaaagaaaccatgaggaagttacataaaaacgaacataagcttcctctgacaaacataatctctcaacagtagatgatcaagtatgcagttcgacgataaggacgagcgaggccaagatcgagagaacggaacgaacgatgaagacagagtacttctcagaaaacgttcggttgtcgtactgagcgtacgatctcttgaccggcttcatgacagccgacctagatgaagatagcctggccgatcggaagactgattgagctgtctgtgaggcaagcatgatgtgtgtgttgtacaagagtgaatgggccgtcaatataaaggagatggtcgatggtcggatgaggacgaggacgaggacaagggtgaaggtaaaatggcgaagcggccgtgtcatcccggtcacgtgagtgatttcttgtttccccatcttcccccatcattcctaacggctcatctttgtagcattcatccagtattcttacattctgtcttccatctgtttctctgtactctctcgcatcttgacagatggtagtcaacgagacagtcaattcctttcatgccagtccatatgggatccctcgtcaacacaggtaagcttttgtctcgatcgacgcgtctgatgtttccgggatctccgaagtcttcttgacaacacctgcttcttttttcttttgatgattccttctttgcttctgattcgctcgccatcatcaactatgttgtttttggacaacacctacagtacattagctgtgtcctctcagaatgtctcagtgttcccatcgacagctcatttaccttcactgaaagcgtatccgctttcttccgggccgagctcctcatcttcctgctctaaagggtcttctcggacaaatggaatctttgatcttcctctccctccctttcctcttcctcactcttcgccgacaaacatatcgttctctccaaactctcgacatcttttagcgttcttccctctactcccttctcctgattccagctccaaatccatcgacttccctcttgttccctcaggtcaaacactatgcgaggacactggaggaaccttggcgctttgggatgtcaaaggaagaggacgaaagaaggaagattggtcggttcgagaatggtgggcgcttggatcaggagaagaggtagttgactttctctggttgggaggagatcggcaatggactgttgcttccccgtcgagtatgaattctatcaagaaagagaatgaatcagttggatcgtcatcgacaatcaaccatccgcacctatcaactacaaatatctcctcatcctcattctaccgtctaccatacgccgggccgccaaccttcccgatgacgtctcacctcgcatcttcctcctcacttccgccgcctccgacatttctcatcctcacatgcactcactctatcgttctctatcatccgcatcaacagcaaagtcaactcaggtttttaaagtgcaagattgacgcacacacagtgagcgtatggggggcagcggatgatggaaacttttcgggtctcgatggcgctggatcggcttcaaactccgggactgcagaaggaagaagacgacgggtgagaagaggtcgactttggattagaggagaaggtacgcgcgctagcttttttccattccgtatcaacacctacccgtgttacctgagtatcatctgatgcagttgacgctctcggcttgatttacatatctgatatcaaagatacctcaatctacctcgccactcactcgacacttctcccttctcatcaagaatccacctctctctctacccagccgtcgaccgcaaacttgctatctgggctgggtctcgatttatcaatccctggtctagagaacccatcaactagaggagcggttgacgagatgggcgatggatcgatacctaatcctattccgcctttggatgctcccttagaacataaaggatcaatcggggaggccgatcaaaaacccaccgatgagagatggattgatttagtggagatcagggtggacttattaggcgaggaagccagtaagtgttgtcttttctcttgtctcttgatataagattgaattgtagtacaacccagctgagtctcctatatgatttcattgtactcgcgctgatgactgggcacgataaggtgtgacaagtaaactactaccacgcgttctatttgatgcgtccgacccatcccaacctccgacttcctcatcctcgactaatgtccaatcaaacgactcaggcctcatcctctcctcttcctttattctcacccacattgccttcactgatcccgaatcaggcagttcgcccattccatatgagacccctgagttaaatccgaaccgagctttcaagcttctctcggtctttcttgacccaacagagacagatatgcacgaaggatttccatcagaagacgggtcgagtatccacatatgggatatcgaaaagaaagagattgaatcctctgatacgttcttgtcgttctcaaatgcatcctccaagggaccaggatctggtgatcagtcaggagctgtaagtctgatgcgctcacagacacttctctccacacctaaactgattgttgctaattctgtttcttgaaatgtgttattttggcaatctttcagaccgcagtatattcaatgtctcgatcttttcagggagcgaccatcattgcattcgagccaatcatcggtttaaatgagcctgttgcgttgatgactgtcattgatacagactctggcgattcacattcgacagagaccgttggattatcacgaggcatcaatctgtaggtcttacaaaccatgtttatcatgtctcttttgtgaagcgagtgacgctaaatattcaaattttcgatatacgtctgtataaagtcgtgatttgtcggaccatccgggatggagtcctatccaaatcaggtcaaaagctggacggttggcctgtgagttcttctctttgctcttccttttgtgtacgcagtgtttgacatctatgatggtcgctggctcctagtccccgtctcggtcgcatacacagccaaccgagctctccttgtcacacttcctcaaacctctttcctagaggctcagccaagtctatctttccatctatgtacaggctcacatccgcctgctttatcacctgacccagaaaaatctagtgcgcatctttcgtcttgctcgaatcgaatcggttttcagctagttctccagtactgatatttctctatgtttgtaggtcaaatgaaagacgaattaatagattcgcttgcttcgagattagccttatcactatatagacgttcaggaccggaagatctcgtcaggctaatcgtcggtttaggttcgtctatcactccgaagggtaaaaagcgatttagggaagactccgcatccggtaagttatcttttcgtcctttagaccgttgaaagtacagacgttgactttcatatcctgacggggcatgagatttataggtgatcggtcagaattcgttctggatgtcttggtgcgcgtatgggtccttttgtctttagacgaactatccgagagaggtggtggcccagccggaaaacttggtgattcaacttggctcttgccacttattgaagttcaagtcgagctgtacaggtttgtcttgacccggttgttcattatgattagcttttcgcggatctaaatcttacgtcgcgttctctcctcggtttcttctttaaagagctgcagcggatgatcgttatatgctggcgcaacaggttttagacctcgccgagtgtaatgccgaattcatccgcgagctcataacagggacagacgggtcgaaagactcatggcctatccgttcgttttttaacttttttttatcgctaggtctgttaaaccatctcgacatctatgcttatcgaatctctttcctgccggtgtgcacatcctgtatagaacatacttgggcgatggttggacgggtgaagagcgcgttagaattggttgatcaggtttactttgatcacgtcgtcgatcatagttggactgagtggaatcgaactgccgacgtccagagtgagtttcctttttctgtgtttggatgcgctcaagtccttcgcggagttgactgacactcgttgaaaataaaaaaacgcgacgtttagatcctccatcccgatcgatcttgatgttccttcatccgaccctccgatctcttctcttatcgatactcactcaactctgtcgattcactgagtttatccaatcccttcctcctgttgtgtaccactacccgaacccttcaaagtcattctcgacaacggcaccgacggtggcagcgggagagaacttgttgtcaggagactcggagggtgattgtgagactttggtgacggaagtgatcaaggtcgcattgaggaaccttttgtacaatagcgctatcggacgaaacctgagccaagttttggaagctttagaatccatggaaggtggtttggctgaaggtttgtctcttctcgtaggacggcatcttctgtcgatcaaagacaagcgttcgaaattagagactccgaactgattgaccgatgtatctatttgtttgcattgtagatacaccacctgatcagtcagacccaatattgctctcgctatcgattgaaccttcactagagaccaaggctagagcaatctctgcgtcgatagctaaacttccggctgatgtatgctccaaattatctttcttcctttcttcccctcttgtggatttccaaccgtcgacttcacccttgaatcgagccactgtttgaggattgttcttccttcttgacctcattttttgcttttatcctctcccttttagttttggattcctcctcttgtatatactttactttgtgcttttcagctctattctgaaaggagcacgtgcctaactttttttcccgcagaactacagaactctcttctcttcttatcgctttgtccctctccccgattgtatcctacagcccgatttaataagtgcgatcgtatgagatcccctccctctcctatttacttcctgtttcaccgaaaaagttgatattgttcccctaaataccgattttactatatttattcctttcgggtcatcatccgagtgcacctctctcttttagtttgatatcagaaaaagatccaagcaaggcagcagagcgatgcaaaagcaaaaaacaaaagcgaagagaaagacagagagacacccaaagaaaaaaggatcatgctacgacttcgattcctagtgttctggccgactccaccaatccagagacgattccatacaacggcacgccctgcaagttatcatccctactcttcaattttgcaatctcgtagatcatcttcaacccgatcttgcccacgatcggctttgctcctttcacgcctgcacctctcgtacccttctcgacgcctgccgccttcttgatgaggtacgaagcattgggtgtcttgatcttgaatgtgaaagacttgtcagggttgatcttgatgacggtcggcagaggagtaccaacgacgtaatcagccgtacgagcgttaaattctttacagaaatccattgatttcactcctttcgctccgagggctggtccgacaggaggagttggggcagctttacccgcctgaacagtgattctctgattattcaaacgaaagaaaatgaaaaaaaaaaaatcaggccaaacactgtagtaggacgaagggaaaggaatcaagaggcaggcagtcttcgaaaaggtgaaacgaaagacaagaaatagacaaggatgtacaacggtggccgcggatactaatttagacatggtggatattgaagaccttcaagaaagagttgaccagagtgtttgtttgacgagaggaggtggtgattatgatatatttaagagtcttcgtgctggtgacagctcttctttgatacaagacaaagacagacggagaatgagtgaatctttgtgttagtttgaggagccatggaatcaacgagaaatcaaaggaaaaagacaagtgaaaggagaagagagtgtttaaaatacaacgacacgaaaagccaaggatataagtgagctaaattgagcctatatcgagctcaacaagcaaaagatgtactgacctggctgatcgataggccgggatcgctcgtgttggtgaggaatgttggattgatgatggtgaggaagagagaatgaacgaaggactaagtcgagatacttaggtaagagccaaggggcgtggattcaaatacactttatgcttacctaaacaggtttgttcttttccttgtcttatctgatttttactccgtccccatttttttccccttaacacacgcacacatcacacacatacaaggatacgtacacgtacacatctcttttccacccatggctagtcgttcaaatgagtatcttcattcgggaagagtgtcggcaccaaaaccagcatcatcaggccgagtgaccgagcgagtccttcttcaacctagaaggcagagccatattcccgacacccacgaattcaccgagtcccagctggaagagtttagggagcaggatcggttgctacctgtcagtttctatcctgctagttttcaatatccatctgaacgtcgaactgaaatgttttgttttcgtttctctctatctgaattttcaaaatcagatcgcgaacgtgagcagattaatgagagaatgcttacctccgtccgccaagattgcgaaagaatccaaagaatgccttcaagtaagtttcttgatgtcttctttttcctcggttgtctgctaactgatattcttcataacatctcctcactaccaggaatgtccgtctcttcatctttggttcccttcgcttgaaggaaaccgatatccgacctgaacggcgctgacgccaagatctgatttgttttggtttgattgatttgtcgatccaaaacggatgaatacggacgattaaccaggcgtttctgagtttatttctttcatcgtatgtctcgttttcgagttttgttaagtgatgatattctttcgtcatcaacctaacgatcgatcgctcttaacggctcttcgaacgcgaacaaacaaaacaaaagacatcagaagcttcggaacgatgtttgcaaaacaaacgaaagacgatgaacggcgagggtaagtgtttccaatatatctttgatttgtatttgatgcagcctgtctaaatcggtgtactgatgcgagtaatctcttcagatatcctggaagcgatgagtgcattgggcaagtcttttttttttcttctttttttctttttttcttttttttcttaatcagatatgtaaaatataaggacggaaaaaagagtcaacatatttgatcttttttgaattcataatctgatttttgaatttgggctgaatttgaatttgattatgaaacttgacaggatttgacaattatgtagaatcattaaggatctacctggcaaagtaccgaattgtaaggccttctcctttcttgtgaatgcactgacggccatggcatacgataatgattttgttacgatttattcctcttctttttattgcacgacttgtaggcgcagagcgaaaagcctagacgaccgacgacaggttccggtttgatgaccacaactgatccatctacgggacttgatgtggtgatgaagaaggaagaagaagatgaagataaggatgatgaagatcgaccgatgaaattctcatcggttgatcttttgggtggtgggatccccggaggagagtattacgggttcacgaatgatgatgaatacacggacgatgaagtgtcggaggatgatgaggaataagaggacttcgtcagggtttgtcaatgggggtttcggtcgctgtcattttttcttcctcctcctccttctcttcttttctccctctccctcttctctttactttttctcttctcggaggcagatctattctctgttttgcgcgactttcacccttgtggagggatcgaaatggagggagaggatatgcgattctagaactacgggtagccttgtgagtgtcgctacttattatttcttatttataacgcaaggtgttgtgctaattctcaagatctatagcggcaagccagaaaacagacaacagaccgagggagagacggaagggacacgacgaaacccatcattgggttcgggaggggtttgacgaaaagactgagagacctctgctcgcctactcgcccgctttgttcggacttgaccaacagtcggcaaaagcacagggaacaagtaccgatatccttattgtcatttcgctctttccttctactcttgcgcatttcctcggctcgcgtgtttctctcgggataagatgaagcagaggatgatgaaagcatgatgaactcaggctcatacgaacggaactgacgaagtgatactaaaaataaagcaagaaagtaacttctagatgtcaatcaaggatccgtgtcaatatccgatcggacatatcggttagagttactacgtcgagttggtgggtaggtgtatgagagtgtcgcgaccacagacaaccgacagcagcacaaagaacacgaggcaaccaaaaaccgcacacacatatgatcaccggctcgataatcttttgaggcgcaagtcgaggcgcaaagagttttccaaaaatagaattcgttcctgttccttggagtcgcgatgcgctgccgctgtctcgcccagagagaagaaagcaaagttggctcaggcaccaggcaccaggcaccaggcaccaggcaccaggcaccaggcaccaggcaccaggcaccaaacccacagagatcaaacccccccgtcgggcgtgcggctggggcagaaagcaagcggaagggaaccgagacaaattgattgaccgatcgaccggaaatatagcgttcctggcctcgcccgtagccttcctccctcccacggacccgcacttaaccgtactctcgttaaccttctcacctccttccatctccgtctcatcggctttcttcgtctcttttcgtttcttatttcatggtctggcctctatcggtctctgtttctgaggactctgtacactgatcggtcctgaccctcttcttaggaaagtttcaatgaccggaccgatatcaccggctgtttgaggatatgtgtatatctgcgtttggatgaggtgctgatttattctataagagtcgccttcatttccttttggtctcactctttcttcccaacattcccactaacctctcactggcgcttgttgttggagcatacgcactctcactcgtcttgttcattctcattctcattcactttcacattctcattcactcatccacctaactacccatcatgggatacttcaagaacctgatcccgacaatcccctcaaaggccgacaggcagaccggagatgacgaagagcaggtggtctacaacccgttcaagatcttcgcgatgatctctccgatcagttgggcgctctacgcctccggttggttcgcctggaccatggacgccttcgacttcttcgctgtctccctctcactcacaagattaagtgaagcgtttgacaagagcacacatgccctggtaagtatatattgtaatgatgatatgaccgaagcacctgctgactctttcccgttcttgttctatctattcgctccaccagactacttcaattactctgacgttgctcttccgatcactcggtgccgttctctttggaatcattgccgtgagtaaccgttttgtatgtgtctcggatgacctctcccactgacgtccttccccactgtctcctcctggactataggatcgatacggtcgaaaatggaccttggtcacaaacttgtgcatcatcgccgcacttcaacttggatccggtttcatccctaacggtggcttcaaaaccttcctcgccgtcaggtcgctctttggagttgccatgggtggtatttggggtacctcggccgccaccgcgcttgagggcttgcccgtccaaaccagaggattgatgtcaggtatccttcagcaaggtaggtcatctttccatctttcttcttctcgacctttggatggcccgtgtcttatttctctcctccatttttgtattttctccactttccttctctttaaacaaaaggttacgccgctggttacctctttgcatgctgcgtcaacttgaccgtcgttcagactagcccccaccactggcgagtgttgttctggatcggatccggtctctctctgcttgccgccatcttccgagctgtccttcccgaatccgccatcttccttcaggcgagggccgaacagagggctgccgaggctgctcccgactacgtccccgtcaacaagactaaggtgttcttccacgagcttggacagatgctgaaggcgaagtggatcaactgcatcctcgccgtcatgctcatggctggcttcaacttcttgtcacacggatcccaggatctctacccgacctaccttcaggtttccaaaggatttaccccacactcggccactcttgccaccattgtcggcaactgtggagccatcactggtggcatgctcgccggttacatctcccagttccttggccgacgattgaccatcatcttgttcatctgcttcatcggttgcatgatcccggtctggatcatcccaacctcattcggaggtctcgccgctggcgccttccttgtccagttcggtgttcagggtgcctggggtgtcattccggtctacctcaacgagctttcgcccccagcgttccgaggaacattccccggtgtggcttaccagctcggtaacatgatctcctctgctgctgctcagatcgagaccacggccggtgagagcctcaaaacggttgtcgagggaaagaccgtaccggattacgccaagatccaaggtattctcatcggtgtcgtggccgcctggaccatcatctttaccatccttaacggagagaaccacggatctcatttcgagtcggccaaggtcggtttccaacagggagctggtgcaggcgagctcgcctctgcccacctcgactctgacgatcgttcgttcgacggcgagaagggtggtgccaaaggagagacctaccaccacgagcgagtttaagtcgcttttgcactttcttttcttttttccctctttcttatctttttggagatcttgggctgtttcttcttcttcttcttcttcttcttcttctttcgattcccttcgactcttatgtttgtaaacactcaagattgtcaaaatccatcaaaaagataattaaaaaaatcattgttgtaacctctatggttcatcttgttgtatcacatatcaccccgtttctgttgtagatgtcatatgaataatgttgttctgtcctattctcttgcttgactcgacctttctctgacaggtcaaatttgttacacttatgattttcgattgagaaaagactcttcaaataatacaaagcaaggcaaacaagggagaacaaagaaactgggaagagtcaaacaaagccacggaagggatcagaacaacgaagacatcgacagtccctttcggacggcagcggaggatccttcgtgatatttatacacaatcctgaacgccttctttgacttccctcctgcacctgcatttgtgcgacatgtaccaagaaaaaagaccgaatcgttgatcagaacaataattcaagggaacaagtaggcagaagcaaaaagaaaaaaagagacggaccagtaggatcaacgataggctcacatccatcagatatgagtccgagcggtctaccgaaaaagtctgttgcggcctatttcatcatcgtttccggttttgttgaaaagttggtgtttgattgaatggcgcgagatgaatcagattgagataaatcaaggtcaagagaataattaaaaattaaaaaaaggacgtgaggacaaagatagttgagaatatcagcttggaaagatgaatagtcaggaagaagaacgttgaggcacgccgagagatcaatgagtggaaacgaaggagaaaggcaaaggacgaactttttctgaaagatcctgttcgaccggaggtggttttctacaattggactcatgtttagatcagttctcgaagatacaacatcgagtacaggaagagagaagaaaaacgtacggtccaaatattgatagcgtgtcatttacaggatacgctgcctgatgtctcttgagtaattccgcctccatctatcatcccaggaaagaaaaacaaaggaagtagacgatagagatcagcttaggccatgaatcaatgtgcaacaagaacggaaggactcctgaatgagatagtgaaggacagacctctcgagtaattagacttcggactgcatatctcgattgaacgatgtctcccgcccgtttgccttcatagttaacaaacacatctatcggtctggtttcccctcgaaaaatcaagaaagacaaaataacataaaaataggtgtcttgtaaatcagcaacaaatgaagaagacacttgcaaagtaaaaaaaatcacttacggatcgagccgacaagagagtttcccatcctctcctttctcctggtgaaacttgagattgtgagtgatcatcagatcaaccaatctcgcaagtttgagccgttcatccggtttgatgacttgtgcattgatctacggattcaatgttcatcttgttagctctctatttgttggccatctaatatagatattgtgaaaaaaaaatcgaaagaccaacgggcttgagattcggagagatgactctcatcaagaggggcgcaaactcggtgacaagcgaggtcgtattgtatatgctcctgatcgagggagggatcgactgggaaagagtcgtgatgacctccatattagcttgtcgatgtgtaaaagactatattcgaagaaagaaaaggtcagtgtaaggtccgcaatttcccttcatagtacggcagaacgagcttacctcgtagtcttgcttaggaaattccgtcttaggtcgaataaataaagagaaagaaaaacgacaaggaatgttaatggtcgcgctttgagaaacgaaacgaacggaatggtttcctcactggatctgtagattacggtcatgaatttagcgaatggcatcagcacacagtcgaaagagggcattcagatatttcaggaaggactgactagaagcattcgcgtgcgacgcgaagtttgtgaaccagggaactaaactgtatgggagataccccattagttcccaattctggtttgagccaatgtcgttcgataatcgatcgaagaagtggacccaatcgtgcatcgcattgactttagtaaattcggtgtcttgccatttgaggttcggataatgctcgaaacagcctgaaggtagaagaaaacagggttccagatcaattttcaaaagaattgctagagaagatagcgaaccaatttacggaccctgcatgactcgttcaaactctccacaagaggatactgcttcaactagtctatttataaactttccttctttctcccctagacctgctttctgtttcttgattgagattggaacaaacagcgtgtcccagaccattcgaggggtcgtgccagaatcttttagcccaacggtcgcttgtcgaatcattggttccgtcagataaacagtcttcgttttgataaactgctcgattgatgggataagaggaaagtttttttttgcattcggtgtcaatcagagcttaggcagagaggataaacgaaaacggacctgaagcgtattcagacaacttcggatatcgcctccagtaacttcggtcaatttgttcaaacttcgagcatcagcctgtagtccttcagcttcgcagatccctcgaagtcgtttgacgagcacggccataggaggtttgttgaaccggacgattcgcgcgaacggtcgtaatgctcggagggaaggcgcatatctgtgggaagacatgttgagcgaaaatcgttccttccttcagatacaaactaaaaattatgtattggatcaagataacgtacaggtcgttgcagatacagatgataggtctcttgagaagtttggcaggaatattcttgcctgctttcttcttagcgggaatatcttggatcaatctaatcagacttctcacaaagctctgagcacaattcagagaaacggattgcggataaagtcagtcagcaaattgataacagagagggtcaaggaaaaggacagaaaagaaggaacaaactgtgtctccaccggtagctccatcgatctcatcgatcactacgcacgtcggttttccctttcccatgattgatgtccctacatctagtgcgctctgaatccgaacagacgctgttgaggccgtccggtcatctgaggcattgatctcgagaacagagtagccagcctgttgagcaacaatctgggctagcgttgttttccccagacctggcggaccagagagaaggaggatctgcgaagcgcgcgcgtgaagaaagcagacgcaagaaacgatgatcagagacgagtgtggcaagatgggaatagtcgagattcgatagtataacttactcgttctttgggccttccgaacgcatcggcgaagtccttttttgcctcgtctatgttcaaaggattatcgaatttggattttcgttgtttcaaatgaggtggtttcctttgaaacacacattgatcccactcttttagccaactcatagtctctctattgactctctataagcataaataaaagtacagaagttgtcaacatctagcatcttcatgtgacaaatatcatcagagaaaaagtttacctcgtctcccaacagatcgctaaacttgacaggtctgtatcgatcgacccacatcctcttctcttccttctcatctccctttgctctctctttccccttcgcattgctcgagatagaactctcctccaagatctccatcggcactcccgtctcagcctctcttgtttttcttcttttcaacaaatcgtcctccctccttagctcttcaatctggtctttcagtctatgaattggagtgtcaagaagtgctagtgatcctagggagtttcggggaaggtctgctggatcagtcgatgcagcagacgatgaaccgaatagagggttcttccggtatcttcggagaataagacgtgaaccactgaaggtagtagcatgaacactaggtagccatgaagatggtggacgatcggcagagttaggtcgatagggaggtaatgttaaggtttcttgaggcggaaggtagtttggtatgatctcggcatgatctgagcggaaaaaatgcaacaagatacatgtggtgatgcgaaatacatgtgagtatattgcgagaggatcgagagaaggtcgaaaaggaggacagacctttcgaagcacctgcaacagacccagacccgacctcgaagttagaaactgccattttactcgggatgtggtgacgggagtgtttaggttgctgagaagctggctcgttcaagatgtcactaatatcaacctcttcttcgtcccaaactccgccagtcctctttgttataagagcagcgggaattggagggagatcatcaagatcgtccgatggaatcaacttgcttggagacacaagggagagaagtccattcgactgatagtcatcgtccatatcaacgagcttttgacgagcgccgggcggacctttgagcttgctctccaaatcataggagagaatcccgttcagctcgaactcgtcccggtcttcttcattgaaggaaggacgagatcttggaggagtcgagtgagacagtgttggaaaggccaatctagatgagttcacaagggttggtagtctagaaggctttgtaggagaagacggtatcaggtcttccatcaactcgaacacctcttcctcagcttcagtcagatttggtgcattgctctttgatccttcgggtagttggttcgggcgaggagatactgatcgctttgctttaggagttaggtcaagatcttcctctgctccagaaccgctaggtgatttattgatatggatctccttcagaaccttcacctcctcttcagctccagtgcgatgatgtagctctgccatcttttcttcttctttgatgaaagaaacggtcggacttgttgggagggagataaaataggaaacgattagtttattgataatcgtcatatagacgcgtcgcgaacacgcgttttcaagacgcgtcatttggacaaacagacgcgtttacctgttccagcgcacgtgattcgagccgccacatgtttcttgcgccctcgtcatacgctcaccgagactgccccaattcaccatttcaactccattataactccattgatcttatctctcggacgtcgagctttcgctgcgatcgtgacattgtttgctcgccaatatgatctgacatatatgttctgataaatcttgaagacagaaagaaattcggtggctagaaagttctacttgatgtcatgtccttggaacctctcgttctattctttccctaaattataaattcctcattggctttctaagaagtcttggctaatggtacgcaaagaaagggcttaactcatggctttgcaacctctatccaagttccatcgtcacctctcatcattgttcgttctgtactttgttccttactacttgtggtgtcttgaaatatcttccgatcatgtgttccgcgcccttcctcttgaatgtgttcgatacgtacatcatttttgtaacatatctcacagtcactatatctatgttttagtctctgccgttgcaattttttttcaagtgtgttgttctatacgactctaaggttggcaatcttcagctcctttgttttgcatagaaatccgtcatcgacttgtagaaataggacaagacatcagaacgtatcgtttataatatcacctatattcggctcatcgtttaacgttacccaaagtccgcccttgacgaaaagcacaaactctgtcgagaacaagacctcttcttttaacgtctcgttgacttttttcgtctgcatgaaaccaaccggatgatgatcttccgacctatcaagatttatcgagaacgatacatcggctgaagaggagggaagggattgaagaaaccggacgagagttaaagaggatagtgtgtaagcgtattgttgacccaaacaaatcctcggtccctgtatttaaatgcagcaaatatcggtttcagtccagcatcgatgcggtacagcagttagaacagatcagtccaacgtatttcagcttcgaaagaagatcacccaacgcttgataaagacaaagtgacaaggaacgaacgacgttaaatggttggaagatgaaagggctcttgagataatattctgcgagcctcggatcactcctcaaccatcgatcaggatcaaagtcaagcgctgtaggaccccagagttccgtagatcgatgaaacgagaaaggagctgaaatgatggatgtctttggacttcgagaagccagcgaagagagagcgaatacatcttcaggaagagtctctgtagcgcagcaagtagggttaagacaaagtagaatgaaacaagaaatgacgtacggcatatacaaaggttctgggctgatcgacgtcgctggcaagatacatgaaccgatcgatctccggatactagatttgtcgaccgagaggtaagaaaaaatatgggtaaactatattgcagatgtccgagaaaagtttctatgaacgtacttaatgggtgcaggtggatataagcgtaagacttcgtccaaaaaggcgcgaactaagatatcaaagaaatcatcaggaatcaagacaaacagatcaggcgagcgttaagattgaaaaagctccttacgatatttgatgtctcctatatggttccgcgtcaacccatcggcttcgcaggatggtaaatctttgatttcatctctaagtctctttagaattttgggattttgggacagaacatagatcgaagatgtgagaagggatgatgtctaccagaaaacaaatcaagcatcggaaaacgggtcaacgaatgtctcaaagacaaggatttttgagaaggtaatgagcatacagtgtctcgagcggctagtagaacattcaacaaatggcacatgatcacatgcccatctggcatatcccaaagcaagaagagcagttggtaagtacacaaacccacaaggcgcgacgataggaatactaaaggatgtcgatccgagcatatgactctactgaccgtcgtagatctctaccaattgatccaataacgatgttcgctccgaatgatcatcttcactcatttccgctggcgacattgtttgatttcttctttctcgctcctgcctccgtcgaattgatctcatgatcggaggcatcaaatatgatcgaattgttgtcattggcttgttggtatgagaaaatggaagctccaagagtggccaaagggttccaactcggatccgtcggagtatggtggcctggaggtgatcgttcgaatgtcgtatgattcaattcagccggctaacctatccaaaggttgatacaagagcaacttacttgagcctcgtcaaaagctgatgaccaaatgcaaaagaaagatgggttgatgctgaccatcagttcgaatggctagattgagcaaacacggaaaagagaagagcgcgaagtgcagagacgtaccttggctgaaagcatccagcatgatttctctctcttcatctggttgatcagactgccaccccatcaggaaaacggttgagctctcaaacgtcagcttctgaaatatgccctgttcaatgaaattccaaaagagatgccaggatgacaaaaaatcaagagcaactgatcagctattggaaagatatctacttgtatggaaacgatttgggtaaggcccggatatcacacctggatattgaatggttctctggaatcacgatgagcgataattcgtttcaccgcgagatcaacttgaggttcaaacaatgataagtcgcctatcttcgctctcgtaaagtgaggccgcatcaaatgcttttatgtaaagaaggtggttggtgatgtatgctgatatgcgtgcatatggagcgagtaaagactcactcgaaactttataagatgggtttcgaaggatgaaacaagggccatcagtctagcatatgctttccatattgaagaaacccaagcgcctcactttggtccagttttctccatcagaattgaagatcccgctaccgaggaacgattcaaggcgctcgaataatttaggacctgggaatattatgcgcagaatcatatcgtatcgtatcatatctcatcagccatgtatatcagcggagtagcacgatcagaacagtctcccaaagttacccttgtgaaaattatcgaatctatcgaccatgatgaacttggccaacatcgggtcagctgtaagaatctaccgtcggaccaagagcgagcaatgcaactcaaaaataaatcagcgctcgtctcgaacccttcttacgccatttgaatggctttcagactccaagattgttcctaccgagttctctcctagtagcctcagattacaggtcttgccccatttgtccattacgtcttgaaacacggccaagcttccaaaaatggtgtcatccgaattaaccaactcattgaccagactccaattgagccaagatccgtattcaacccttggaactggtcgggcgatagattcgtttgaatcttctgctttccgttttttcaaccaagagaagaccacaacgatggagagaacagtccaggcgatagtagaccatgggattgaggaggtcgccagatgaatcaaatacgacagaccaaggacgaatgctaatgggatgatgatcttgctgatgatggattggtataggatatacatctcagcagcggcggtcagattgaaagtatcagcactagcattcgtacgtttccttcagtcggatagaaggaaaggaggttctgtatcgaacagatggctcaagatggtcagtcgcgacgtggcggaacacccatgtggaacggaagagacccgagctaagtgaaatccatgaagggtcgttcaaatcgggataactgaaaaagtataggcgacaagatgcttcgatttgtttatcattcattctctgtttggtctgtttacttgattctttccttgtatggatctagcttctttgtttcggtcgacttttcacggaccgatggcttgttccattgtaagatactatgatcaagaagaatctcacctggccgagagacccaaatgatggaaggtgaaaacaaagcattgatcacgccgattacaataactgaacgttggttcaaacacaaagtttataatgaagaagtaccggaagtagcaaggaaagagtaagggagaaagaagaagaaaaaagcagtcaaaagcttcatgtatgtaggaaaccttgcagctgaagataattatagactttcacagagtaatagagaagcgaatgatcattttatgaagaaccaaggtctgaaaggggtgtggagaagagaaggaaaggtagatgggaaggggaagggggaagaggtctgaacgagggtatctacggaagtgagcacgtagtgagcaaggaagtcgggcttctaatacgacatccgccaattaaatctcatggccagaaaaccaggcgagaaggagctcggatgatgaccatgttgtaagttctggagggatgaagccaagtgaggggtggtatcgaaggagaaaggaagagaggccgaacagagagacgatgtccagtagggaggagaaacaggaatgatggaggattcaacgcgggcagacatagaggcatggctgagagcagaaagtcaatccatatttcgaatgagagggatgaatgttctaaagaagagagtccatgcgcgagaaaacctcgagcacagtagcaacgacctcgaacgaaagatcctcaatggcagccccttcaccgccgcccggtccgtccgaaacctgagcgccagtagacatctcccttttcacctctctgaccatctcagagatgatctccttttggtttgccccggactggctgctctgtttcctccttcctcctccaccagccacgccaccgaccgggactcctgatccgttcgaaccaagccctccaccggtgacacccatcactccaaacggccaagtgcaaaattcggcaaggacatcgtcacaccgggcgaacgcagcctccctagcgtcatagtcaagtctgaggagagcgttctcaagcacgttcgcagcataagcagcacagcacaggcacaccgctcgggttgttcggtacttcacatccgctggtaaccgggattctctcggcaaggcagaggtcttcgtcgtgaggaaatagagcgtccgtcgcatgacatcctccttgactttagcatccgccactggatgggttgccatgtcaaacaacaaaaagtttcgcttctccgttcgaaggactcccttgtcgaccaatcctttggccaatcgttctctaacctgcttaagctggtatccaatcttcatgacgttccaagtctcgcctgaagaacagaagaataaagtgtcgtcagaatatattgttctctctttctgtgaacaaacaaatgaaaagaaaatccggaagacctaccactcatcaagtccacccaggcagccactccatacttttcactagatttcatcatcttcaacgcttcatccaggatggtctcaccggtttgcctgtcatcgatgacctcgatcaacctgtcccccagtgggagtcgccttcggcttgggtctttgaccatagcgatcctacgacgaagagcgagttcaaggatgatacaccctcggagggcatacgaaatgttatctgaggggagaaaatcgtgaaaatggcttgtcagaaatgtcctcagatagacaataggagtgttatggagtagagagaaagaacggaatgcacaggaagcatgccggaaacagttatatacataccattaaaccaagatgtatacccctttgtttatggaacatcacgacagtcaagatgcaagaaggcgaaagaagaaagtttaaatgtcagcttgtcatgtcaacttttcatcgtgtcctcaaggacaagagaaaagatctataggtagtcctatatgaagaaggaagaggagaaggaaaaaaaagcattcccgtgtgacgagaagagagtcagatatcaaagaaacaaagatgctaacctgattgtccttcaacccgagcagcaaaacttcctccagcaatgtcaacttgggaacctccttgctttctccgccatcttcaaagtcccttggatcaaacgcaatctttcctctgccttccattgaacctccggcggttgacgggacgagtctagaggattggttcactcggttgcctccacgctcgtgtaggttagacgaaggcccggttgacgaagacctggaagcgtccgtgggcgatccagcggtcgaatcctcatcgtcgtatgtagacgactggggggcacctctccttcgggacagaccagaggacattttgaggatgatctctaagtttcagaaaagaaaaaagtggtgtactcgttctacacaaaagagaaagtcaggggataccctaggaggatggaatgtgtgacgaagagcttgacaatggatggatgagaggatgtgaaggcgagaaagatgggaggcgaacgaagaacgattgtgagagcgaatagatgagggcgggaaagcaaggagactgtagcgggcgtgttcctgctgcgcatcctcatttgattgacccgtccgctcatatctgacttgaacagtgaagagatggtcgcctactcaccgggtcgatgaataacgagcgtttggaccccggttatgagctctcatcgagcagatgttgagaagtatgggtgctgcttgatcggtttcggcactgatttgacgggcagatgacggacatgtcttgaaatactttgccgatagttgatggtcgtcttattcacatatacatgctcgggaagaaggaacaacgtctgcttctagattgcttgcgatccaatgaggaagagagtgcattcaagcgacatcgccatgtataacatagatatgtatgtgcgcttctgaaggccggctctgcatccggtaatgctgaatgccaccatccttcaaggcatcttgtagataacggattgatacgaggagaagagctatgtgacagtagttcaagcagacaaacgaataggctcgcagacaagcagagcaaaagagggcgcgacagcagaaagactggcaagtaaacacgtagaacgcattgcgaacgtggaacacaaaggtgatcgaatgtaaagactatacgcagacaacctgacgatggagaaggagaaaaagaaacccgatatcgtcagaggggaaaccaacacatgaggacgatctccagcaagatgtgaagcccatcgaaagagtcagcatcggttagtctagctcgattcaggtattgattacctctgcgttcgacaagcagccttctttgactctgtgttatctcatattcactcggaagtccgtcgctaggtaacgttatctttcagtgcatatattcggactcaacggcatgatgaaagtcagtaaggacatcattatcactgcagagaacagaagagaggctcagacaagagcagcaggttagggatgagtagccaggagagagaaagaaaaaaagaaaaagaagcaagggaaggaagcgagagaaaatcaagagcgccagcttgctagccacgctcatatgtatatgaatcatttcaaactctcgcagaagatcttctcttcatatcgtcagatcctcttggtcatcctaaaccagcccgctcaggtctgcagtttgttttgatggtccgtctggcgttgataggtgttctcaagcggaaagtaaccatgaaagcacagctgtgggactgtgcgccaagccgtgtaaccacttatttggtaattccgtaaccaacccacaatgcctttctccggctggtcggctgccgtttacaatcgataatcccaagagggatctcgtttgtcttcttctcatcctttctcttcagctcagcttatctatagagtcctctttcgggttttctctatcaatccttttcttctccaaatctagtagaatagtgggattgtttgggagagaaaataagaagaaaaagaagagaaagcttgcttcaaggtcagtctccaggctgttttgccatagatctctttgttctatgtcgtgctttttgggggtttctttcgtcttctctgtctcttttcttctgcattgtcagaacacctaaaggaagaagcactgagaaagaaggaaaggatatggttgggataaggccagcatggatatttgaaaaggaataatcagaggtgtatgctaccgaaagccaagaccgatatgcaatctcttttcatccaactcattctcttttccgttctggattcaacaccaagtttccgttccaatgcaaaactgctcaacaaccaacgacatttcttcctcactttcactcgccatcataccaaactgactctttctcttcgctttcttcatctagatttagcaatcttctttctcgcccaagagccttcttgcccttcctttcggcatccgtacaaaatctgtcatgtcgctctcgatcacgattcctactagccctcctcctcagccaaggagtcctaccagggtgctccctccatccccaacgaccagctcagagattgaacgtgaaatgacctccgttcggtctatgcgacggaggtctggctcccaggccggacagatggcagggttcgatccggatctgccgccgacacagaacgacctggaaaacgcggcggcactaaggatgggaatgggcattggtggccatgggagcagtgaacaaatccttgctaccagtcctcccttggcccatcggaccatcgccagttctaccagctctgcctttcctgaagaagatgacgaggaggaagatacgtctcacttgttctgggtgcctgcccatctacatcctgagcttgctcctggagagttccgagcgttcctcaaagagcatgcccatgcccacgctcaagaagccgcggcgaccaaagaatcggattctgttgttccccagtccactgagcactcgccaagctctccttttaaccgacaggcttctcatcggtccagcttggcgagaaagaagtcgatgctttccagacaatatactccccggccgaacgacggagtcgagaacgagaaggtaccggtcatccaggatcacctcagaaaacgctcgtcaatctatagttcgccatctgggacagaacaagaacaggaggtttcattgatggatctacagatgctggaagaaatggccgatgaggccgccaagagcgatgatccttcaaaactgagaagtatgcttaggcgaagctggagtatcaattctggtcatggacgtgcgtattgattttgtccagctctttcttttcgaagagacacatacgcgcctcgatctcttcctgtcaggccgctcttgctgatattgtattgattctgccgcttgttttcgcgtgattccctatctagccgacgtcgatggtatcaatgatgccaacttcgacgaaggtgacgctcctgttctagctgttcgaacaggtccttcgttgattcgccgaacggctcgaacaaagattcgtaaagcgggcatggaaggtgacgccgctcatcgattcggtccttccagacgaggacggacggcacatttggtgggcgagaacgctctgaaccagtcggattctacatcaccgccctcttcagagggcgatcaccgaacggatgagagcatatcaagacctcttggtgaagacagcacgtctcctcaagaacgcccgatctcgacctcgtcttcggacccatatgctatctataactcttacgaacgagactctatcctgatcgccgaccgatcagtatctcccgagacgacatccgattctcaccatgatagatctctaagtccgtcgcctcccaatatcccggccatatacactcaccactcctcttcacaatcatctatcaattccgagcccagcgccgaatcgggaaccggagctcactccccagaaccctctcaaatctcaccaacgtcgcctatagtcgcaaacccttactccgaacttggtccagcctcgcaaactgcgcccatgtttgcgcctgtaactacagtcctatccgaaaaatccgagcctgagccgcgcaagcccatcgaggtagagagggttgacagcagagacagttacctgagcgtgaacagctcaaccacatccgtcaacagcttgggctcgaaagaaaaagagaaggaaaagaaaggtggatttttctcaaagaaaggagacaaaaagaaggacaagtccaaggtaaataccccgtttgttagtctcgttctcactttttctcgtactaacaatctagatgggttgtaacaacaaaacaacagggttcgaacgagaaggaaaaaggtttcctttcgttgtttggaagtaagaaaaagaaccacgaggaacctccttcttctgtgaacgcaggggatggccgtcttgctgccgccgctctcctcaaaaccaaagtacctgcttcgccaagctcacctggctcattccctccacagaccaacttttctcggtatcccatcaacgtcgagcgagcggtttaccgactgagtcacattaaacttgcaaatcctcgacggcccctctacgaacaagtcctcatctcgaatctcatgttctggtacctcagcatcattaacaagccaactaacccgataaccccgaaggagagagagagtgacaaagcaggaatggcagcaggaggtgaatctggagagaaggggagggtcgagactgcctctgccgcggcggccgaaaaagcgaatgcgcctgtttcgaaaggaacaccagcaggaaacttggcaaagagcttgatgacaaacagcacatctgcttcgccagctgtgaagcgaacgagtctaactaagaaggaggacctgaagaatccgaatcgacctgctttgcgctcggccgagacaccggtcaagacacctcagtatggtgctcagaaggctcagctcgaaaaggaacaccgaccgatatcgatcccggcggataccatgcaacatcgggacagagcacctccgtctcctatccaacagccggctcctagtgggccatctcgaggaggaccttccggaaatggagaggtgcgagatcgtgaacgatccgagcggggaccccctcctccatcttatgcggcgcctctagctgggatgggaccaaacggtaatcccgttcaagtccaacgtcctctaccaaattcacaacagcaacagcaacaacaacaacaacaaca

SEQ ID NO: 2734 - DNA, 11964 bp, Xanthophyllomyces dendrorhous
aacaacaacaacaacaacaacaacaacaacaacaacaacaacggttgtcgaatacagcccctccacatcatgaatctagaggccctgcacccggccctcatcctgttcgatcgacatctgcaaaccaacttggtccaacttcacctactcaccatgtgtctcatacccaacatctgccacctggcccacaacagcatacacagcagcaacagctacatcaaccacatcctcagcagactcttcgacccggtccacccatcaacaggggcccaccaggtcctcagcccggtcaactgttccaccatccaggaggtggaccccgtcctggcgagcctgccagcggacttcctcagattggtcaggtgttcaatcatccgggataccgaccagctccctaccgaccgaatggcccccctccgcctggacctcgaggccctcttccgccgcctggacagcaaggcccaccaggacagtattatcctcctccaaatagacctggatatccgggaggacaaggagggccgccgcatatgccgaatggaccaggctatccaactgggctgggacgaccaatgggctctatgcagaaacctccgcctccggaacaacagggggccttgcctcagttggcgtatcctcaaggaggaccacccggtccccaacagctacgatcttatccgcctggtcagaattctcctcgtcctcatttacagcagcaaggtcctccgccacccggtggacagcagagggcttattacaaccaccccccatctcagcaacccccaccacagcgcagaccgactagctctgaattgccatatgccgatcgaaaccgatagtgggtctcgtcgtccttggatggtactacagatggtagtcttcatcctgcgctgctctttctttgtgctcgttcatcctcttgttatctatgtcgtctctctttttgctgcttcctcctaaacccgaccgttgagatcaaaattcatctgctgcctttccctgagctgtcccgttttatttccctgtttccgttctttctgtgaccagaatatcagccttcgaccattttctgatatgtagttcttcaatctttgcccccttttgccatactacaatcagcacgcatgtacaacctggcattgcctaacatttattttccgtatcttctccttctcttttcgtttcaaaccattcttcaagaacaatttccatccttcgttgtggtagtcgtacgctggtgatttagaaaaagttcatgattttcaaactccggttagggttagctcagagagcgtcatggacgatttgagagaccgtcccattttcaccctcaacttcggaagtcaacctgaccgacagaacgaacaactagcctgatcggttccagaaagagagaagaaacccagacaaccactgatccatagacgttctaataaacagaaaagatgtctacgactgttcagaagtatgttcttggtcgttatgcagtcttgtttggttttggttgaatcagaaactcaacgtcatttttttttctcgcttggttcttttttcgaataggatcaaggagattgaggaggagatgagtaggactcagaagaataaggtctgtttctctcccacctttttgtgtgcttgatcgagacgtggtttgctgattgttcatcctgctacgggtcatcttttgtggaaactaggctacgtcctaccatctgtaagttttcgtaaggcatggcgtaggataggtaggacctacagtggacgattacaagctgattagttggtcttaccgattgccatcaaaccatcaaggggtcaacttaagggttagtcttcttagctggctgccgatgctcttgatgactgagtctgtttaaactaactgtaattgattcaatctcgatatttctgaacggaaacgatagccaagttggcgaagctgaagcgagagcttatggctcctccttcgtcgggaggaggaggaggaggtgcagggttcgacgttgcccgaacaggagtggctagtgtaggatttattggtgtaagtcaagtcttgatttcttgattgtaatcgagagtgtacgagaagaggattgctgttgatggttctcagctcataccctataaatcgaacgtatctaaattatcccactcgaattgtctttctccatctgtagttcccgtcggttggaaaatctactcttatgtccagtttgacaggaacccactccgaggctgcttcttacgaattcacaactcttacgactggtatgtaataatgatgttcttctgactagctcaatctataaattcaacagctgagtttttgtttcgatatgttagttcctggtaccatgacatgccacggtgcccgaattcgtgagtattctcgctggtatagtatctatgctttgaatgcgctgaaactgactttctcatgcgcttcttgttttaacagaggttttggatcttcgttcgtatacgtttcagccgtggtcaacatgactgaccgtccagctaactgtctgttatcattgatgtgtttgacctcttcgaattagctggtatcattgagggagccaaggtgcgtatctatgagatattacacatgcaacaaacgcattcgttcttactctttcctcgtgaattgtgtcatataggatggtaaaggtcgaggtagacaagttattgcaggtgtgtacaccatattgttatttactcgtatcactatcactgttctctcctgacaacatctctcttgatcgaatcatagttgctcgaacctgtaacgtgcgtcaatgactcacaagcttaaacaggtcgaccgcgagaacattcaagcaagctgacttctatccttgcgtgggcttatagttaattttcatcgtgctcgatgtgctcaagccgctaggagatctcaagatcattctatcagagttggaaggtttcggtattcgtcccaacaagaagccgccgcagatcactgtcaagaggaaggataagggtggtgtaagtcaaggttccttttctcgacttctgcacaccatgcgagttctagttgagctgagcgcgtccatcttttcgtttccttactcaaccatagatctctatcaccaacaccgtccctctgacccatattgacccggacgaaatgcgagccgtgctgttggagtacaagatgaactcttgtgatgtctccatcagagaacctgaagccaccttggaggatctcattgatgtcatcgaaggcaaccggtttgtcttttcttcctcatccatattcaggtcaactctcttggagctattattgatgcgtttcgtgacatcttgtgaacacacagagtttatgtgccggcgctatacgttttgaacaagattgattccatctccatcgaaggtcagtgagcttgtagtctcgaagttgcgcaaacatcggttagaattaacctgttgtgtgatttttctcttcttctcttctctcagagcttgatttgctctacaagatcccgaattcagtcccgatcagttcttctaaggagtggaacttcgacgaactgatagaagttagtgtattgtctgatttgtctgatagaaagagagaagaacattcaactgatgtagacgtccttgtttgggtgttttcatctctgttttcatattaaagtctatgtggaccgcgctcgatcttgtcagagtttacactaagccgaagggaaagatgcccgactactgtatgtgaagctttcctgctctctcaatgcgtaccgtgctgattgctttggtgaaaccatttccatcagcttctcctgtcgtgcttaagaggagcaagtgtaccgtcgaggtgagtatctccttcattcttctatctccagcctgttttagaagcatgaacgcgaagactgacgcacatcccatgggatatactggtctctaggacttctgtaacgctattcatagtatggactgctttcatcatctgtctctgctcattgtagggtatctaactgatcgctgctccctctgtccaaacgcataacagaggagattgtcaagaattttaagtcggcactcgtccatggaacatccgcgaagcactcacgaggacagaaggttggattggatcacgtattggaggatgaagagtaagtcttgctgttcacttttgctgccgaccaaagtttcttccacacactgatgttgcctatttgctatctcggtgaaatagtatcatcaccatctacaagaagtgaacggactgctgcaatttttctttttgtcgagagctggatgttatgtacatttcgcttttaaaaatcttgactcggtacactctcttgtccaaacaaaatcggtcgttgctcagataaaaactcatcttagtctgatcagcccaacgctttctcagataaatgcataatgtcaacatgggaaagcttgagtgggcagaatagatagttgccggcccgtagctatcggcttacttaagcatactgatgggctcaagatgacgagatctttcgacacaagttatcacttgccagtactcacaatcatcatcctaactctcatcccatcgtcctcaacccagctcatctctgtttctgttcatcattcccatccaaaaagctcggactgttagaaacacatcagttatccctatcaaattttcaacatgtacctggtctgtggtcgggcgagcagacttctctacccgacgctcaaccaggcgagccgtcgtccgatccggtcttcacccataagcagtctactgtcctcttcacatcggtcgttctcgcaatctcatcttgtccgaagccaatctcctcctcaaacgcctgcttctttctcattcacatcccccgagtcttcgtccaagccggctagtccggtgtcacctgcgcctccgacaccattaccaccggtgtcgcctaaaaagacgcaaaactcgacggattggtccatcatccggacgcttgtcaagaacatctggccgaagagtaacaatggagtgaaagtcagagttgttctggccttaggtcttttgatcggtggtaaggtcatgaacgttcaagtcccgttcttcttcaaggagattgttgatgggttgaacttgccgatgactgaaagtggaactgtgtggatggtcgctggctggagtattgttggatgtgagcttctcgtgtctttgtcatacgactcccgatcccttacctaacaaagtctacggattactcttccttctatagacggagtggccagggttctctccacactcttttcagaattacggaatgctgtctttgcttccgtcgctcagggggccatcagaaaagtcgcgagggaaaccttccaacatctccttgcgatggacctgaagtttcatctgacgaggcaaactggtggtcttactcgagctatcgatcgcggtacaaagtacttatcttttctttgctcttcgggatctcatctcttcattctcaagagttgactccttgaactgaccatctgaaaattggaacgaaaccaaaggggcatatctttcgtcctgtcgtccgtattgttccatgtgattcctacagcgctagagatctcgatggtgtgtgggatcttgacttggcggtacggatgggattttgctgcggtcacggctgctactatgggcgcatacacctggttcaccgtctcaacaactgcttggaggactcaattccgaaagaaggcaaacgaggcagacaacaagggtgccacgcttgctgttgactcgcttatcaactttgaagctgtcaaggtgggactcttatctgtctttcttgccctttgtccctcgcgcgaacagttggctgatctttgaacgtaattgcctatgaacagcattttaataatgaaaagtttgagatcgctcaatacgataaaacattgggaaactacgaggccgcctctacaaagatagctaccagtctagcatacttgaactctggacaaaatatcatctttactagcgcattgaccatcatgatgggactcgccgcgcaaggtatctctaaaggtaactcgcattcgttcaatagaatggagcaggatcgtccgaaaagtgaacgataggctgacagcggaatgtgctgtataggtacgatgacggtaggcgatttggtgatgatcaatcagctggtattccagctgtcgcttccgttaaactttttgggaaccgtgtaccgagagctcagacagagcttgatcgacatggacgtcttgttcgggatccagaagcttagtgtgcccatcaaggtgagttttggctcatcgtcttaagcaaacaacatagtcattgttcctgatacgacaatctggatctcgattattgtacatacgaaggacacgacgttggcgaagccgttggatctaaaggggggttcgatctcgttcaagaacgtctcgttcagctaccaccctgatcgaccgatcttcaaggatctctcattcactattcccgccggtaaaaaggtggcaatagtaggaacgtcgggttctggaaaatcgacactgttccggctcatctaccggttctacgaaccttcgtccggagaaatctcgattgacggtcaaccaatcgattctattgagttggactccctacgacgggcaattggtgtggtgcctcaagacacgccgttgttccatgcggacattctgcacaatgtcaggtatgggcgtcttgatgcgacggatgaggaagttaaggaagcctgccggaaggctcatgtggaacagacgatagagagtctgccggaaaaatatctaaccaaggtaggagagagagggttgatgatttcgggaggagagaagcagaggtgagggttcccgtcttcttcagttcagcggtgctcatattgcgcgtattgtcgctcattgtgaatgattatttgggttcgcgcgtaaaacagactggctgtcgctcgagtgctcctcaaggatcctcctatcttgttctttgacgaagctgtaaggaaatctcaaattttgaaaacgtcttatattgcgtcgatcccaagtttctgatgttctgttttcatgtccatactactcgtatctagacgtccgcgttggacagcgagactgaacgtgcgttgatggccgatatcaactcgatgttggtcgacaaccgacggacgtctgtgtttattgcccaccggtaagcaaacacgcttgttttttaacgagtgcacagtggaagatgctaatacatatgtcacgttcatttggatgttctatctgacgaaaagattgagaacgatatccgatgcgggtatgtctatcttctgtcttcttctgcttcgtcggaaggcgaaagactattgaactgacaagttccttttttctttctcttcttttctcctccctggcagaccatatcattgttcttcaccaaggagtcgtggctgaggagggaacccacgaggaacttctagcccggtctcccgagaacggtgcgatctacaagggtctgtgggacacacaagcgtcgattgagtctggccaggttgacaaagaatagtagaagaacgtattgggacgttgtacgactaccaccggcttgtccgttggatccatccgcagtctaggatttacccgatcattagctggttctattttaaaacaaggatgaaactttatattgcatatacaattttcataaatttatttgaatcttttcgagccctccgagtttcactcagacacacacacacacacgacaatcttgttctctctccattatacatactcgagacacacaacacaggcaacccatccagatcccatattaaacatgcctccctggagcagagaagcaggtgacgaacgagtgacagaggtcgagctcaagaagaagaatcttacgctttcggacggaggttccgtcgagaagaagggagacagccttcccacatatgaggatactgttgtcattgccagtaagtcttgttgtcttctcttgtttttctttggctctttgggtgatacagtttggtctgttaccgtgtctgaggttatggaaagagaggaggggggttagatcatgtatacacacagaaattcttaactaatcggagatcttcccccgaatttccttgccctttcctctttctaattctccgaacactttggcaacgaagccgcacagcaggcgggatcgtctatcaagaacgagcaaactgttcagcgaaagctgaaggctagacatttgtgagtatcgtctgtctttcgatcgagttgccgttttttcttccttgtctcccttctcttttcttggccgggctgttcttgacgcattttcatggggcgctgcttattggaaatccgtttcggtattattcaggagcatgatcgcgctcggtatgtcgacttttctcctaatttcactcatgtttaaatttctatgtgctatggaagaaagctaatctctacctgttggtcactatggccgtctttcaggtggaacgattggaacaggttcgaaattcctttcttctcttccgcaggttaactgccaatttagactgattcatcgagtttgaaaacctcgtcatgttatgataggtctctttgtcggagctggtggtgctcttgcggccggaggacccgttagttccggatattttcaagagtatcaggctattagctgactcttgttgttgctccgtacgcctaggttggttgtctgcttggttactctattatgggtcttgtcgcttgtaagtagactgtctttgcttggggcatgagtttattcataggagaaccggatcatctttctgatcgattcttgacgtcatccagactcgatgatggttgcacttggtacgttaccaccaaccacttaggccttagaatgacctactgactcgcgtcttaacccgtctgtcattctaaacattccacaggaggttcgtgatcaacatcgatatttactatccacactacaacttcagatgcttacacgcgacgtttacacaatcagaaatggctaccttattccctgactcgggaggattcactcactacactacgtaagtccgtctgttcttcattggtgagaatgcgaacccacctacctggttactaataattcatttcttctttgcagtcggttccttgatcctgctatgggtttcgcccttggtctgtctcttgtcatatccataagccattaacagattggtcttgataacactgaccacgcgcgccgactttcacgcgaaatcccaaatttaggatggaactactggtaaagtcgcgttctaacctccttaagcacatgtatgaaatcgtcagcttattttccctcctgctcggctgaatgaataggttcgagtacggaatcactgtgcccaccgagctcgtcgcctctgctatcgttattcagtattggaatgataaaataaacattgccgtctggatttcgattctcatggttgctatcgtcaccatcaatctattcggtgttgccgcctacggagagatggagttctggttctcagctatgaaagtcttcgctatcgtcggtttgatcatcatgggtattgctctcgactgtggtgctgggcctgcttcggatggatacattggtttcaggtatgaagagaaaatctttcttttttcctttgctttctttttgacaatctgttcttcaacagacactcattcggcttttcttttgttgtcatcgcagatattggaagaatcctggagcattcgcccagtactctcacggaaacgttactgtgtctggcgcttggggtcaattcttagctttctggaatgtcttcatccaaggttcgtatcagtccgatctagacgatcaactttcggcttgaagaatttcaaagatcttactttgaaatcttcacattcaccagccgctttctctttcatcggaaccgagattgttgtcgttgctgttggagaaactcagaaccctcgaaagaatgttagttgaactctttctccatgcctcctaccatcgtttgtccatgcccatgtgaatttcactgatcgataacttgaattcgttctcatctctcgataggttcctaaggctgttaagcgagtgttctggcgaattactatcttctacgtccttgccatcgtgagtagacacccttgattatcctctctgacagatgtcgaatgacagctgatcttatttcttcccctctttcactcacagctcgtcatcggtcttctcgtgccctacaacgatgatcgtctccttaatggagccagcacggtctctacttctcctttcgtaagttttcgtccgctttggataccatcttttgcgcatcaagatccgttcagagcttattcaacttgagcatcgatctcgaatctttaggtcatcgccattgagaatgccgggatcaagggtcttccctcggtcgtgaacgctgtgttgctcatcgctgcttggtctgccggaaactcggacgtgtacgcttccagtcgaacaatctacgccttggccttggagggtaaggcccccaagatcttcaggttcgtgatacttctttaattctcttgaacgtgcatcaccgagagattgacagcatactctctctcccttggttatattcatacaggaaatgtctgaagaacggagtgcctatctggtccatcttggtcacctgtctgttcgggcctttggcttacatgagcttgggtagcggaggtgtcaccaaggctttcaactgggtcagctccatctgctttatttgtgtctgatagagattgatcgtgtttatttacctactttgaatattttctgtccttgcagctttacacactttccgcattgagtggtttgatcgtttggttcatcctgttctgcacatacctcagattcttctacggtaagttgatcgatctcgtcaacattctcgtctcgtttcatcacttgaccttcctaatcgattgattattcattctgtacacttgtttggcaggtatgaagaagcagggtctttctcgagatgatcttccttacaaggctcctttccaaccttacggttcgtctttcttcacatgcattctaccctatccgttataaaagccacgtttgttgatcgctcttgctactattattcttggacttccacagccagttgggcaggcggagctttgacattcttgatctgtatcttcaacggctttggcgtattcttgaaaggaaactttaatgccaacgacttctttgctgcttacggtgcatttctttcattgttcttcttttgagcatatggtgtaattgagttcgatcttcgttcttactcttgttgtctcgatcttggtgaaaacagtgtgcttcggaggttagcctttgtatctttatatctcctccaatgaatacgtacattaatctttccttaacctttcgtcctgtctgttctgcctttttgtgtttagtgttcttcgttttctgggctccttggaaactctggggaggtgagcgaaaggacgctaccaagtggttccagcctaccaggatggtgtctcttgagtcagtatattcttcataccccttacctcttctttgtctatgttgttccttctccgttattgaatattctaaccgatcggattgcgcatttttgatggtcaaatagggaaatggactttgagactggacgaagagagctcgacgagatggacatcatcgagcgagagttacatcccgaaccaaagggtatcgttgccgtcgtttgggactggatgttctaagccacctagaaaaacctttcttttctttcttttaaaataaaagtataaataaaaaatgggaataaatggttccactctctttcttcgatttcccttcatatccgctgcttctttcgcttcgttcttgctttcctcttcctcttccttcgcttttccgtcctatcattttccaaaccacattcgtaatct

SEQ ID NO: 2735 - DNA, 11554 bp, Xanthophyllomyces dendrorhous
ttcgtaatctatcatcgatcttcacactatgtaagggcatcagaagtgcatgtacacctcaataaggggaaggaggtccccaagtctttcctgtcgtctttactccgtcaatatttttgttcctctccatcctttcatccatctttccttcagaggaaccgaaactttagtttagaattaatacattaacaaaaaaccaaaaaaaagggagggaggccgcccggatataaaattaggaatgtttcttcatttgattctaggatgttacacgtccatcgcttggtttcaaacgatcaaggaaacaagaaaacaatctttcagtcgatttgcagagatatcgaagaaaagttcattaatataaacatcaagtcgagagagagagagagagaaacgatcgacgataaggcaagagagaataaatacatttgcaaatgactaagtagaataccaaaaccaaaacaagggtgaggatatacagaaaagagaggaaaaaaggacgggaaggagcgattatgccaaaggtctattcgaagaatttgttgacgactttgcagaaatcgatcatcgtctatgtcgttaaatcaatcaaattaaccaaccacggaaaagtcaacctcagcgtctcttgaacagagagaagagaacgagaagagaggggaaagcaaacaagaggacacacctgtcgcataggggtttcctccaacgtggcaaacgccaacctaaagtgtccgactctcgggtcgacattttcatccccgttactcttgctcgacgaagaagtcaaggaatcatcatcaggcgcgccagtccggagtccgtcgcctgagaacatccaaccaggagcgaccaatacttttttatcagccagcgagacccagatcttttgcatgagctccttggattcttcctggtaagaaaccgaggagaagtccgatcgacctcgaagagaaccatggttctctaagtgaatggctacccagcagaacattccggcggaaggtggaataaacgacaagattttgattcccttcgaggtcttggtcgatccgatcgataatccagccatcttctcgttccacgcattgtctcctgtagaggtgatcgaaggagcctgcttgacgaacgcctcgagtcggacgggcatcatttggtcctccccggtcgatgctgaggtgatggcttggagtttggggactttgatgtcaaaccctttcacaagctcatcaatcatccagtctatggagcgaaagaggaaagtgttttgtgagcaagagaaaaacaagagacaacgacttgggttgatttgatttagccagaagaaaaacgcttacttcgtcgtcgaccgtactctcctcgaagacctcgaagccaccggatccagccacccattccccctgtacacgtttatgcaagcagattagccatcggcatcttttatcatcaaaaccaaggcaagccaataaacgtagacggtcgaatcagtttagacgaacagttcaaaacaacaagctcggcgaccaagagttggacaggtccggagggctgctgagtagatgtctcggacgctcgaaggagcctttcagcaaactgagggttagacgtcgtccatccgagtcgacatccaggagcgatggtctgtttttgttcacattcaacagaagaaaaccacagtctcgtcagcatcttgacttgattcaatatttgacgtcgttagggtgagatataccttggagaaggtatcgattcggatgacacgctaaacgaaagatgatttcaaagagtattggccggagattagcgtgcacatcccttggtatgtgggctgagaagttggaaaagacaagaggcaagcttacgccttgggtatcgttcttgaggtaactctttccgataagtcccaggaacgccttgttcttctcttcctcagacttggacttgtccttctcgatctcggatccaggagggctgatgccgtaaggcccaaagttcaaggcccagtacggatcgtcctcgacctacgtcccagaataacaatgacaactgtcagcggcctgttgtccgattcaaatcaaggaagagcgaagcgataacgttacgcacgataatgaaatcatatttgacggcaagggcgtacacggcagctcgtctctcgtcattgattgtcgatccagtgggattctgaccaataggaacggtatacaacactctaggcctcctcatcttcctttcttcatcgcaccatcctttgaggagagcctcaagcgcttctgggaccagaccgtaatcgtcaataggagtggtcacaggtcggacacccataggccacccggtctcgagggcggaagggtaggtagacgactcgacgagtataccgtctcctttctcacagagaagctcgacgactttgtggaaagcatcggtagatccgtcacagagaagaacttcccagttggcataagccggaggaacagccagctagtgtgagagcgagtgtggcaggtaatcaagttagtgatcgacagagaaacagatggaaaagaagggaggagggagaaaggtattttacctttgtccactctgtaaggaaatcgcttagctgcggcggcatcaacgggaacgacgattgcaaaggtcgtcagtcgatatatttggaaagtagttgaaccaagaagagagactcacgatctggaaacctgttgatcaaataggaattacacgtatccatccatccataagaaaataaagaaaagagactgaactcaacacactcgatctcttatcggcctatcactgaaacatgctgacaaacggcatcccggaaaagagggaaaaaaaatccaacctaccagaggcagctccatattggagtccgttctttagctgaagaccaccctgtttcttcgcatacttgggtacctcgataaagtccaagctcttgccgagcagagatgccagccagctcttagcctttccgggttcgatgcccatcggagcatagatatctggatgcatagtcgtggcggaaagggtctcgaatgggaagtaggcttcatttggtagaccaccggccaaggaccggaccgtaggatcgaactgtaacaaaacagaagatcaggacgagactgttgttgaagaagagaaaagagatcgaaagaggaaagagataagaaaaataccatgtatttagcaaagctcttcaaaggagaagaccttcgctcttttgcaagcgtcgacagatgatgggacatgtccaccgcgttctccaacgaagctgcatgtgactcgagtgctgcagagtgagtgtccatggttctattagtgactgtgtgagttgtatgggagttgatgtctgtggatgaatgtggcgaggatgaatggatggtggatgttgataggttgacggttgaacgatagagagatctcagttttggtcgcacatgtccgattgtcccttcggaggtcgccgggcactcgttccatcttatgctatcagattcttacgagcatcgtttccaatcttcttgcgcttccgtttcgttcagacgagcaaaggataatgtatgcaacaagagagataggatacacatatatacatctgcctcttaggcccggtctcgtaaccatcggagtaagccttcggttccgtctctctcccaggtccgtctgttgggcgaccgaaataagtttcggtcgaccatgaatgtctctaccgagaggaaacctaagactggatccaactgatgaggcataaaccagagcaggttatcgatcagtcgtttgaacagcagctaacagagtgttcactcgcaaaccatcgaatggcagctcaccttttcgatactgttatctctcacatcaacctctctacaagcccacctatcggtctgcccgttcctcaacatcattcccacgtgctccaatccggccaatgatctgacgcccgcctctcgcgccttcaacacctttaggccttggccgatcaacaacctttccagtacctgtttgtttccaaacaacgcgtcccccacgatcgtttccgacaggtcgagctcttccaacccggggaacattgacgggatccactccaccagactggacagcggtaccgagctggaggtgatcgataagatcttgaccgatcggaatatcacgttctcagtcatatttaggaacgacctgaggttcttacctcccaaaatgacggtctgaagagagggactaaaaggctccaaggcaagaagcccaaagtcgaacgatccgccaggcaagattggatctgtcgatcttccctggagagtcagggtgaatcggttgagagcaggcgagtagaattggctgtataatgaatctgtggacggactcagagacgcgcttacagcttgttgggaaccagacggagaagacgagccagggacgggaagagaaggaggtaaaggcgctggcgccggcggcggtgccgatggtttcatcataggcggcgattcatcccaatcgtcaaacacattgggcttagttgaagccttcttggttatcgtttttgttggaagtgtcgtgtgttttgccgtcgtggacgacaacggaagccaaaatggatcttctgcgggtcctgacttggactctgagcacaagttttcatccgtcctgggcctcggcggggatggtaccctaggacctagcacaggagggcttttcaccgagaccttctgtccaaccgattgggttcccgctcgcccgactgttctgggaacttgcaagacaggcggaggcgcctccggtgaaacacccacatatatatgtgtcttttttcttccaggcgtcttgggaaccatgtgtggatccaccaagatctccaatttccagcttgctgacttattgctcgagcccgagttggaacttgaggtagatcctcgatctcggagatgatctcccgactcagtactcttgaactcgacttcccttcctgggccccacccggttcgaaattcttctactctgattaatgattgattgcctttcagttccagtactcttagctcatgaagcacatcccttccgtcattctcgatcgagaccagtccggtgtccgataggccaaggaatctcagcctgtctagaccttcgaacaacctcggatcaagcttggtattgtcacccttgggagaagaaccgcagatcggattacttcccagttgtagggtttccaaacaaggcggccaagataccgggaggccttcactcgtgatcttattgtcattcaacacgagcgtcctcagacgcggacaaggcctcgagggcgggtccctcgatggaggaggggagttcagtaacgaagaaggaggagttcctgggaacaaaggctgaacggtcgacgggatcgataggttgaggatggtaagttcgttatgggacaaatcgagatgttgtaggttcggaagtagtgtcaacaccgacggaaactgagtgaacgcgttgtatcttttccattgagcaaaaatgtagaaaacgtctctgattagagatcgaaaagccagatggaagatacattgaaactctgagcttacgaaagaatgagcgtgttcaattgaaggagattggaggcactgaaaggaactttataaagcttgttatctcgaagctatcgttcgtcaaagtatgccatccataacaagtttaccaatcgtaagcgcgcgcgcgttcactccggcatgacagcaagacgacaagtggtccgagaacaagagcaaggagagcagaaggaagagcaaaagagaaacacttacatctagatgtttcaatccgccaaacaagcccaactctggatccaacgagctcaactcctggttcgtcaccttaagcacttccagatctgttcctccgatgaaccctccgacttctctctccgccggctcctttgtgctcgtgccaaacacatcttccttcgatccttctaatcccaagctagccaaacgatcagacatctcttcgatcgtccttgttcctgtttccgctccggtcgacggccaaagaggtctggaagaagtcacagcagggaccttacgggacaactcgtcgacgggaatcccaagaaggagagtgtagagcgaaagagggagctggtctattggcttttccagagtcgttgggatcaccagttttcctgtcgacatagagacgtgtttactatcgcagatgagcgagcaaataatataaagatgaagagtgaatgaaagaacgaacgaacgaacccgtctctgcggctcgcttgaccaacgatcttatccgatctgcctgagcgactgttcttggcgttcccgacctttcggcagcaggtgttgcctgtgaggctctgagcaatctgatttggtctttaatcgacggtctgttcttgggtgtcattgccattcctcctcccgatcccgctatagcgggggtagaatcgggggtagccgggatgttttcgtgtcgcttcggcgtcccaccgacagcggtcttcgaggtcatcctaggcgtacccggtcggctctgactgaggcggtttgtcgcgcttgataaagaagatgaagaagtggaagaagatccggatgagaaggaaggagatgacgtttgttttcttaacgaagatgtactggtaggttgacgaatccgggttacacccgccggcgagccgggttgattcctctgactatgtcctggctccaggatccgagaaggcgtcgggatcgacatgggcgactgtttggaagagatctgttgtgttgtgcagtgttcttctccttgcttgttggtgttctctcctctgatgttgatggtttaacatgaacgagataaaaagaattaaaaattaaataaaaccccccaacaaaaatcactcgcgtccattttctactttcttccgttttctctttgtcgttcttacaatcgttcatcaacctcattctcatcgatctagaagatcagatctatcaagaactctaagacaaagtaaatctaatccctgcgcacacacaaaaatgcgcgtatacatcgcgcatttagacatacaatccttcagtgttcacaaactcggccactccatccggcacgatatccttccaatcacggggttctctctcggtctccgtctttcgagcgatcaacgatcgaaccagactcgagctgacatccgacctatcttgtccgcctctgatgacagcctgtctgagtgagccgtccgaaagatgaacgtgtggggacgacatgatcggttcttctgtagagaccgggcgaggaaagtggacaaggatcgaaggagtagatgagttgaaaaagggatcaagagcttctcggaggggggccggatagtctgtatttgagagtatattccagagaaaagaggtaggaccttgttcaggaaacgaaagctaatcaacagaacgggtcgcatgcacgcgcacatgcgcatactaagttgaacaattgaagacggagaagacggacacttttgatcgaagaacctgacgactgtgtctgttcctaagagccaggccaaccggacatcatgtatcggctttgctggttcctgccggtttctcaggaattcacgaacgactttatctttgttgacgaacgctggctcgtggagaagaccaatcgcgacgttggaccatgctcgaggaggagcaaccggggaagtacaggttggattcgatttgaagccggaagatcccagttttagaatgtgttgagccatcagatggatcatttctagccgttgtctaggaatatcgacaagaatcaaagtgacctcccaaaaaagacatgagcgcgggaggaaagatgaccagaagcacactgtaagaagaagacttactcaaacgaagcatccccagatttcaataccttgtctacattcctcgccgagagcaacaggagcaatgcgtcgtattcttccgcaccatcttccgcctcaccgttgacgttgccgagatccttatcattcctcctagcaaccggaggaagtccagcaagagccatatcaagatgagcgctggtcggtggattgaacgatgagtctaggcatgagatcgttagtttccgtgaggtctgcgacgaagacagtgatggagaagaagaggaggttgtggagatagaaggcttagaggttggatttggaagaggccattgaggatgggatgcaaagacgagttcgaaattcgccggatttgtaggatggagaatagaattcagacaagatcttgcgtgggatcttgtgaaagatgagctcatcggtctgagggatgtgatagaggcggacaagggatgaacagagagtgttgacggtgatgacggtgatgatggtgatggcgatgatcaagatgatacctgttgctgctgtcgatgatgacgagaagaaagcgattcaaccgccaacgttcatcccttccatcgaccatcatcctcaaagttcacataccatagatacatccttttcatccctctttctcaggtagaacagatacacacacacagatgagttcaataggagtgggcaagatgtcaacatacgacgctgatgtgtgagtatgctatctatccgatctagagacaccctttcgagtcaaactgaattggtcttatcatgtgctaccgtcatctgccacctcatcggtcgaccagccaacggaggacgttgatcaagctggtaatctttgcggtcgcccttgctttcgcaccgatagccacctactttttatccatccggagattctttcctggtacgtcttttcttgctcgttcttggggccgtctttcgtcttgttctcacatgtaccctctcttggcttctttctgtctttcttttcttgctcgattttctggctttcttcccatgcttgggtgataacacaggaaacgctacatacgcagccatcagcgctgtcgtggtcgcaaactgtgtgttggtaggctatgttaccgtcgccttccgagaggagcaggccgagttgaatgagaagaaagcagggaaatctggtgggccagggaagaaacttgagtagtggagcagaagtaataggaagccaaccgaaaaggaagatcgcgaatgatctactatcgaacatgtatacatatatgtatgtgtggactgtgtatgtttatctgtaaaggtgctaggtgtgggttagacgtataaggaccagctctatctcaagctacctagtcaggatgaaggagcgaggtagagaactgaggcgagagccggggatgttggcagtcacatacaggcgaggaggaagagcgactgaaaccgaagattctacgacgagaagaaggagagagaccactctatgctttcctacctcctccgtcgagtttgttgagctctgatgaacctgccgagccatgatgatctgggcattccccaggctgatgatggtgtggtcgtttcgtcttcttcttcttgatcgcactcggaatcccatggtctgattcaccggatgagggacatgacgaagattcatctgaagacgactcatcgaacggtcggggtttgtgatagatacagcacactaccaaggtgacgaagatgacaacaaagagctcaagccatcagcaatggtactacagccctggccaccgaaaggttctcgacacttgtcacacatactcttgcttttctttcggttgagatgttcattgtcgaccgttccctctacccagctgactttacccttcatgaccttcttgactgccttttctgaatgattccctcggagtcggagtgtgccaacctcggtggatggtatgcttgggagatcgatggatgaattatccactaacgtctgcccaccggtctgagtcatcgatgacggctgttgtgtcgacatcacgaatggaaggccaagttgggtggaaggatgaaggtgggatgtaaattggatgaaccttctcgagaaacattctttagcacatttaccatcatcaagccaagtgaatcccgttgactcccactctcgctctcaccctcactttgttcttgatggcggcctatcatcctaggaaggtccctcctcgcccgcgttcacctccgcctacgtcttctgcttcttcttctcatcagaacactgatctcctctttccgtcggctgcctcggcagaactcgcttggtccttggtctatcctcagagacaacggtcggttgccacctcgttctcctccactaccaccaccacatcggacacctcgtctttcgcagagtctcctcgtgtggagaaccgtgaactctcgccatcggaatcagccgttcctcttcctgcctcttattggcatgacctcggtctacccgcccacgacggccatggcaactttccgagtccggggatcaccccacgggcctcgatcgacggccacctcggctttcaccgaccagagacgtttcatcggtctctcagtaaccgaacggccgatacatacagtacgatcgacagcgtagacgacggtctttccgccttggatctcaacgatggatcagactatggctgggatggcatggagagcgttcggaaccggtccgaaggaggaagctttgggggaggcgtcgcggctgaaatagggataggaacgggacagacaacagggttcaccgacagatggagactgagcggagaaaagaggaggagggatagtagtccgtacactgcggtctctgtctcgaccgctctctctgaggaagaagaggaccaagggcgtgaacgggagcaaggaggggttcatcaccatcaacagtcatcctcccgacggatctctccaaccgacctagcatcaactttgtaccgacggcactcgtcactctcctccattaccctggcaggaatacttactgaatcttctgctactccttcttcgtctccggccgggaaagcgatgacggagttgctgacgacttcgctcggctcgctcttccaactggcctcatcctcgattctttcgtttcttccgccgacagaattgtcgtacaagcattcgatcccgcttcgagtgatccgatcggtctggaatatcgacgaggactcattaatgctgatgtttccccctcccttacctcgaccggtcgagcagccggtgtttcatgagttgttcctcaaaccgatatctgcacccgcgatcggtccgcttgaagccgacaaagcgaatgaggatggagtcaaggaagcagagggtgaagcggtcctcgaggcatcgctggaagacggcctgaacgatcacgacgattggcagtttgaaagctccaactcaacgggacaagaacgaatgtttcgaagcccgtggatgccttgggctggttgaggtcaattttctttctatctttctctttctgaaacccctcatcgtatcgaatcaaacacatcgttggaagagtagggtgtatatgcgggtgtgtagattcaactaatgagccgtagggcggctcgttctttcttggccagtttcttctttctgttgttcgatcgtttgtaaatttactagttgtatatcacgttgtagtatgtagagcgcacacacacacacacacacaca

SEQ ID NO: 2736 - DNA, 6042 bp, Xanthophyllomyces dendrorhous
cacacacacacacacacacacacacatgtccatatggccgatgtatgtctctcatgatggtttattctctcctatcttaatagtcccacaggaaacgttcttgccggaaccgactcgagaacaagagaaagaagaaacaaagacacgcccagtgcatacaccatcccataagacacccatagaccgccatgaccgctatgaccactagaaccaagatcgtctgctgcagatattcacaaccaaagcacacatcatacatgtacactcaacctagatcaacccatccatccagtgtcctcaaatctgcactcccatctgttactccacccatcagagttgactgaggattaatccgactgcgcattcccaagccaagatcccgaacactccagagacccacacagtcgagcagcacccgtacgatcacgatcacaaccaccaccaccccccgtctgaccatcaaggcagcacatcgaagcagtatatccttctggaagtcttgagaacttagctttcttattcgtcatggctggatcgactcctagctcgacgggttagtcctctcggctcgtccgatgtatcttaaaccgtgtcgtgttattgctttgggttctgttggagctgactcttgattctgttctggctttcctctcatgcctcttgttctaggtgtcctctttggacggaatcctgcatcgttcgatgtagatgatcctatcgttctctttatcatccaggtctgtctatgacgaatcttcacatcgagcggttctggtttatcttctcgatttcctcgtgcttcttctgaactgacaccctcttgatgttgcggacccaccctgtgggaacatctcgtccttgatggcatccagctcttcatggtcctcgctttcacccagattctctccatattactcactccgttcaggcagcccagggttatcgctgaagtcttggctggcatcgtcctcggtccaaccgtgcttggcagaattcccggtttcacaaagagcatctttccctcggccagtttaagctacctgaaccttgtgtctaccatcggttggtcctctgtgtattctttccctactcatttttgcagggtttcatggtctgacctccgagttcttctttctttcttcaggtttggtactcttccttttcctcgtgggcctggaggtacgtccgactgcttgacttgccgtgcttgtctcagattcccgcttgatctctctttctcgctcatctcaagcgcctcgtctgtgtttgtgattcttcaaaaggttgatgttcagatcatcagaaagaatgctcgagctgcgatatctatctctcttgcaggaatgatcatcccattcggcatgtcttctcatcgtgtttttgaatacaaacgatgtactgtgctgatcgttagattccttcgcgttcatcgatgatataactaggtctcggcgcagcggtgagttcctatagacgggcagctcatctcatctcatcccatcccagcatactcttgactgatctatttgtatctatttctggttcgaacaacagatcgcggtccctatctaccacaactttatcgacccatcggtcaactttagccatttcatcctctttgtcggaaccggtcagttgttcccttggttacggcccttatttcagctcagactaaccttgtagttgattcgaatcaatcttttggaccctttcagccatgtccatcaccgccttccctgttttgtgtcgtgcgtcaaccagaacttgtctcaactctttccataaatgtttcagagtctcacccaagttcatcttaccaatcttcctttctctaggtatcttgaccgagctaaagctccttgataccaccatcggtgtcgtcgtgctctcggccggagtcggaaacgatgtcgtcggttgggttcttctcgcacttacggtggccttggtgaactcgagctccggtaccgggggcggtagctctggagtcaaagccgtttatgtgcttctcaccgccatcggttggacccttgtgagtctttgccgtttcctagtcgagcctttcaaacgagtttgtgttctgtgtgactgaccagccatatctccattacagttcttgctatatcctgttcgatgggctgtcagatggctcgcccgaaagacgggaagtcttgaatccggtcatccaacacccttgatgatgtacgtctttctcgtgcatgtaattcgtggctggctcgttgctaacgaaacatgtctattctttttcaggacggtcatcctcttactggtctttgtttctggattcatgaccgacattatcggtgtccatgtgatctttggtggtttcctatgcgcgtttgccgtcccgagggagattgccattgtcttggtcgaaaagatcgaggatctaatcacaatcatctttttgcctttggtaagtgactaactccgcagaaccagagcaaagcgtttcttgaagctcatcgaagtttttctctcacaatatgtaattcgaacagtatttcacccgtaagccgcctgacaattatcatcatcatgtgggcgaacaaatgtgtggccaaaactgaatcacaatcaaacgctttgtcgcagtttcgggattgaagactaatctgggattactcgacaacggaatcagtaagtttcctctctgtgcgtgagaggcatcgatcagattcaaaacattaatgtcattcttctatcctttgatatcataatagcttggggatacacgtgagtcttagtgtttatagatctctcgtatcatgcgttaatcaatttcaagccctttggttccgatcgagaaagcatcttgctctgcgttgtcgcctttgtcggaaagttcgcaggtatgtgtagatgaccaatgtcggatatgtctcggacaaataacagagactgatggctggtttctggtccgtcgtatggttggttgaactttaggatgttattccgccgccctgctgaacaagtttgacaacagagaagctcttgctgttgggacactcatgtcatgtaaaggtctcgtcgagctcatcgtcctcaacgtcggtcagtctcgtgttctgtttgttttccaaacgtcacctctgcttctaacgaaccgatttggtctctctttttctgcggcattctctcaggtctctccgccggaatcctttcggccagagcgttctcgatgtttgttttcatggccatcgtcttgaccatcatggtaggtctttttcttctcaaggagaactttaatcgatcatagattttaatgctcgaaggtgttaaaccccccttcccccttcttgtatccgcaatcagacgaccccgttgactctctgggtttatcctgcccgtgtccgaaaatctcttgcgtatgtccagggagcttgtcttcttctgtcgaggttgtttctctatctgactagctttatgtttcttcatctacagagctcagcgcagcggaaatgcctcaggcaagtctactggaaccaccacgaccacgtcatcttctacagatctctctatcgccggggttcggcttcacacatcacatctgttcgtcgtgttggccaagatggagcaaatccgtaagtgatcactctgggatcaaaccctgctgaactcgcagacgtgcgttcattcaccatttttttcccactctggtatttaaacacagcttccttgatggccctgatgcagcttttcaagagcgagtccattccgactgaaaaagccccgttgtttgactcgccgtcgccggtgtcggtcgaagcgttccgtcttgtagaactcactcatcgaatgagtgcggtcatgcaggtgaccgagcaggatgatatcctacacagagacatggccatgcaggtcttcaaaacagtcggtcttcttcctttactcaacatccagtagattgtaaccgcacagtgattgttcgaatgctcaatattgacagcgtttggtgttggtggggatctaacttggtgatcatgatagtacggccaactgaacaatatcccagtgattccatcaatgtcgatcgttccattcgagtcgttcaccgatagtatcgtgtctcactcggcccgatcgagactcgtggtgatcccttggtctggacatcctccattctctggctctacggctgaagaagggcaggacaacattcatgcgtccacctcggccagtcacgttgaggctctcctcgggtcgagcgactcagtgtggtgtcaatttttgagaaaaacattggctgagtcacccaaggatgtaaggcagtttaaagtcttgtgatcatggtcgagacagtcttgatccttgtactgacgtttctgtcgtctgggttgatgctccttgcttagatcgccatctatgcccaaagaggcgagtctaactcgctggtcaaacaacatctacttgtcgtattcaccggtggaccggacgaccgactggcgctctccctcgcgtgccagctttgtagtaataacataggaacgagggcaaccgtcatcagacttgtctcgtcctctttccaccttggtggagcgttgctttcaaagtttacgaccaccacgtcttcgaacgcagccaatccgatggaagtggagaagcatgaggcggctatgcttgacagttgtcaaacgttctctcgaaaggtatgttcttggttgtgtaagaatagttgtatagatttcttctatcttaattgagtttgggtttctcttcacttgatgcagtctcacccgagcggattgaaatctgatggatcagacgacgcggacgaaaaagcctggagctacttctcgacgtcttccagcgctcgaatgacgttcgagaccatcagctcatctactccgcttcaatcgatcattgagcgtgccgatcatgccggtccggcccagtctcaactagtggttgtcactggtagaagtcgacattcaaatttgaagactgacaaaacgggtagagaggttgcttcgatcctgtcccagaatggtcaacagcctggtgtgtctttttaaatgttgttctgactgttttccttgtctgccattttatcggtgtggtactgaggtctatgctttttttttcttggtttttgtttgttctttctgatcgattagatgccggtgtggaattgagaaagacagtaggtgacgtagcgacggcattgatggtcagcgttcccaaggcgtctttccttgtcctccaagcgggatcggtggcagacgacgagcttacagcaccggcgttgaccgcttaaggtgtccgttggttgtcttttttctccttcgttttgatcatgtgttgtcctttatcttcatcgtttcctatacttttttgtgcttgtggtggcttttatggggtttcttcttctctttttctttgttctatcctttctcggagccttctgcgctatcgtaatcagttcatatatctcgtccacttatacagttctctatcatcttcattttctctccgctctcatcatattcttcgttgttttcttttgttttttcactcgtttatacttacaactcggtcttgcacgcttggtcttgagtttgtaaagtttgatttttcatgactctggttcttttctcttcgactgaccgatcggtcgactgcttctgggaggcggttgcatttgagttgaatgaacgacacatagagtgaggcaatgggtagaaggtgcatatatgccattattcgtatcaagaaatcgatgattgcgagctatgtaaagatgtaaagcgaaaaagcgaaaaagcgaaaaagcgaaaaagtagaaaggggaaagagaaaaaaaaagtttgaaaagaattcattatcaagagaaaatgatatgtttgaagaaaagtcgctgtcgaacgagcggacagatggaccaaagagcgccctcgagaagatggatgaagtaatgtaagaaaacgtggagaaaagcaaacagaagttccggtcggccaacccgatcgaagcgcgcgagaaagagagagagagggaagaaaactggtcgagaatagactt

SEQ ID NO: 2737 - DNA, 2297 bp, Xanthophyllomyces dendrorhous
agagggaagagtgccttcttcaattgagttctgcaaactttttaagaccttcgagtgcctcacccgtcagctctttgaatttgatgataaagtccgtttgttcaatgattgcttctagtgtgtcatctttaagtttgttcgttcgatgaaccaatctgctatgcctttttttcaagatgaaggaaatcacggtgtttttgtcggtcagtttgctgaatatgtggcaaggtctaaaaggaaagcggaacgtactcaatcttgagtgattcaacgttggattcggccaagaggagcgcttgacggttcgtagcttgcgcttgagcaatctcttcattgattgcttgttgttgtcttgaaaattcagccgattcgcctgccatcgtctttttgtatcggtattgttgttgtttgtttgtttgtttttttcatcccgcaaatgtcacagttgagacaaattgttaggaaagttggaaagaataaagagaggcaaagatggggactaacatttctggcgatttcagtttgatcagacgtgttttttaactgcctggtctgtaggtcgacctcctctttcaattgaacgaccgcctgattgactctatccagctcatcgtccgtttgaatgatcttgccttccaacaaagcagtctcgtccctcatcgctttcaaaaagacatacaatccctgtctggaggtcttcgggttgacgctcaggatagactccggtgttgtccctgcaacgtcaacctcaagcgtgaaatcaaactcgttgaactcgaacggagtctctggtaagaggcccagtctgaaatttgtagaactgtattcttgacagagagcttcgagcatatcaaaatgacgagcgacagccatctctttggagccagcttcgttccgagcgtgagttgacttctcacgaagatcttccaaggacgcggtgagcgttcggtgctcagtattcatctgttggacttcttccatcgagagtccttgcgctcttacccgagcgtccacattggctttccgagctcgaagatcagccagttcattctctattgatgtcgggaggaagaaagtcgcatgtcgtgggtcagaacgtctctacggctttgaggtagctttcgtttggatcagaacttacgagcagccgttatccggtctaaaagcgcaacgttatcttcttctcgtttttcctttcgtttcgaatggtgttgaatacactggataaactttttcttgtctgactcgtacagcagataatcttgttccagcttgaccagtgggctctgaagatagcacgggagtcatgagcaaaatgtttagtgggtgcagatgagaatgattagtattcgtctccgacgtaaggaggtaccgggaaggagacactcaccggcgtggagttcaagatgtcgcgctcttctattaatctcggaagctcgccttctaatcggttcacctcgtcctgccatgcctggtgttttctcgctgaattaccccaaattgtatccagtttagttttcctccaatctaccttcttgagatcgatccatagaccgaacccagggaatattgagctcagggagaactcaccaaagttttcgctcatgatcgcatcctcttcttcaaaatcttctcctccttcgatccatcgagcatattttgcactagcatactcgtagctccataaaagttccagattctctgcgtccagtgggatgcggtccgatggtaatagatctggatcttcatataatgagcattcgacccagctttctttgacctgtgaatcattttcttctccttcgtcagcctggcgttgcatgttttgattacaaagaaggaaagagaaaaggattggtggtattctcggaggtttcacgcacctgtgaaatatcaaccaaccaagctagcatcgccaacaacgtaggccactggggaccacccggcgcggtgatacccgttctactcaatccatctaaacttgggtaccgatgatccttcaaaatcaagatacactcttcctcaaacttcttgcctcctcttccgaacacatagtcttcgtccaacacgttttgaacgaggaatttgaacatttgttggaactctacttgagtaggggaagttaatgatttagttgttatctggggcgctcgggggtttcgatgaaaataggataggatgaggtctctgcaagtttgttggtacgtcttatctttgagcggacgagtgtctcgggtagttagcggtggtggatgagagagtgacgatgtgtgaagacgagcggtattcggtgtgag

SEQ ID NO: 2738 - DNA, 7697 bp, Xanthophyllomyces dendrorhous
ctccaccaccaccaccgccgttgtttgatcctccagccccgccgtagatagaagatcgcttcaatgagctgtacagacacgttttatccattcatagacagttgaaagcaataaaatgaacagtggattagcaattgtgtcagatagtatatgcattctggagcaatcatgcctgaaggacgtttccgagatacgaaaagagagaggaaacgaacctatttccttttctaggagtttgaccggttccaaatccagcatccatccttcctccgccggctagacttcctctgaaaccagaatttcccatctgaccccccatgccgctccctccgttggaactagccatgagctgggtggttgtacgtcttcggttaccttgtgaatttgattgagagctcatttgttgggatgatggattggaggatgatggattggattgcattcgttgtggaggtccagcaagggacatccggtttggattcgacatggccacgcttatggttcttggtagcgagagctctgctagcagattaagtatacaactagaagaggtgggtaagtatatatcgatcgagcggcgatgatggatgagtgattggcgagtagtcaaatccgacgcgtcggatggaaacaaagaaatcaattttcagacgcgtcgtgagaactccaaaatcgtatttacattattgtacattttcattcttgattgattcgtcgacaacaatgtgatctacagacaagccatacatatatagattcatacaacatctatccgtcgcgactgtatgtatacatcgaatagaacgcgatatgctcgttggcattctcggagagaacgtcacattctacttaatcttggcgttcccgtcggcgtgaccattggcgatacctccagaataattgattttttgacggttgacaaatctaaagaacgcgagagctgcccaggctgctccagcatagatcgctcctcgtacgggaagaggcgaaatctagataggtttcaacatggatggtaaacaggagataggcgcgcgtttgagcaaactggttgatacgtcaaaagtaagaagggttacgaatacaacaaaactaacggtgaggaaaggataagggaaaacaccgttgttttgaagggcacaccattccgcccaagacgcatacccggtagcgagaaggatggtagcgtagagcgcaccagtggttgactgaggaggaaggtacggcttctcaaagaagaagaaatcggtaagaagagtagcgcctggggcggcatgaactgtttctcgatagaaggcattttgaagaagaagaaaaagaaagagagaaagagaagaaaagagaagagaagcagatgttcaggttttgagacacatacaccgtgtccaatcataccatgtacagaacaatgcgatactcacgtgccaagtctatgtaaattggaatcttgatgaacgttggcacagtcggatcgaacgaggagacatcctcattgagctctggaaccaacaggaagggtgcaatgagaaccagaggccactaaagtaacccatgtgataggaaaaaaatcgaggaaaacaagtcagtttggcaaacccaacgcaaatcacatatcatgcatgaagtgagcatacgtagaccgcagacaccacagtttctacctgattgatttgagaaccgcgaaaagagaatgagagaacagagagtcaaaaaaaaccgatgcatgaaaattggagtaagttgcacaaggtggacatcacaatacttacgggcaaagatataagtagcaaaacacgcttcgctttcttaagaactgtgttgttgttgagcccggaataaggtattcaggctggtcagcgagaacgatccatcaaacattcacttcgaccgactctcgaactggttccgatcctgtaagggatgatattaccctttgctcccgtcaaatcagccaggattgaggttcccatacagatctggctggcatacaagcctaggatcgtaaggaactgagtcatgccaccgtattgggtgccgaagtattttgcaaacactagcgtggacagcttctggtatccccagctggtgtaactaagcgctgcctacagaccaaaaagaatgtttagataatgactggtcgttggaacaaccatgtgcggtagaatcggagggaagactgttcggatcgagcagcagaggacagactagaagccggactgacgagatgaaggataactctagagataggcatgtttagtagatatgttctctgtacgggcgtatgtatatcagtgcggctacgagtatacgagtgtgtgagtgagtgactgtatgatcgttcgaggttgggaacccaggatgtatggtggccaggatgatctgaagggaatcgatcgatcaaccggcttgaccactagaagatgagatcatcggcggcaggctaggttcggtcacgtgacttgagcccgtggtcgaagcaggttagtctcggtaataacccccggctcccggcttctcgtcacagccgagctcaagcaggaactctccggtggttccttgttttccgagttccttccatcttaacttgcattcatccataaaccttctacacacgaaacatccactcagccgttcatctactctatcgtttcttcgttggctcttgcacttctccaatcacacacttgtacatctatatacacactcgatgtttacttcaatcactcgcccggttctcaggtcgaccgtcagccgatctcttcctagagctcttcctatcttgtcagtagtgccatgggacagtttcttttccacattgttgccaaccgttcagggctcatgtctttttttattgcgtttttttttaaatctgcaactcaaccataggactcgacagttcgctatcagtcagtataagcaaaatgctgagcaaccttatactccggcctctctcttcaccttcaccgaagaggaggagatgctccgagactctggtctgttctccttccttcaaaatttttgaccaacgtgcatcaagggcctctctcatcgtgattctcatcgtccttctccctctctgttctgatataattggtgtagtgaggaagtttgcagaggacgttgtcgctcctaaggtactcgagatggatgaaaaggagatgatggatccagagatcatcaaaggtctatatgagcaaggcgtaggtattcttctttttttttcctaactcaggcgtccgaagtttcttcctgacgatagtcggtctgttattcgatactatctcagctgatgggaattgagaccagtcctgatcacggaggttcgggttgctccttcgtgagtgcaatcatagccatcgaaggtttgtccattgagcatattttcacatcaacggttccttggcctaggcactgatcgatcaaacttgttatctccctcccactgtcgtaaacagagcttgccaaagtggatccaagcgtgtctgttctgctagacgtccacacaactctgtgcaacacaatcttcagaacgtatgcctcgaaagagaaccaggataaatatctacctcaattgtcagaatccaaggtcagcaccttccttcatctatagtcgttatagcctaaacaagcaatcggtataaagaaatcttctgatttggttctgcctctaaaccatctttaaattgttccgctctgttgcatttcttgatcgtagcttggttctttcgctctctctgagccagcgtccggatcggacgcctttgctctcaaaacgacggccaagaaacaaggagatggttatgttttaaacgggtcaaagatgtggatcaccaactcttatgaagcagagatcttccttgtgttcgctacggtagatccatccttaggatacaagggcattacctgctttgtcgtggagaaggatcagggcgtgaaggtggctaagaaagagatcaagctgggaatcagagccagcagcacttggttcgtggttttcatcggagatcttagacaagaatctagttctgtttcacacaaaggacatttttttccctctgacatgcctggacgtttgtatcatggatcgtacagcaccttggacttcgatgatgtctacgttcccgctagcgccgtcattggagaggtaggaaagggttataaggcatgttgttctccttcagagtatgtgatcgagtgagaaactcggatcgaacatctaatcgtcctattttcgtgaacagattgccatcgaaattttgaacgaaggccgaattgggatcgcagctcagatggtaggcttggctcaaggtatgcttgatttatcttaaacgtgcatctatgtgtcctatgcttatctcaaatgatcttttcacactctctcttaggtgcattcgacaagtccgtttcttacgctttacagagaaagcagtttggcaagccagtcggagaattccaaggaatgggtttccaatttgctgaggttagtccgtttacattaaacatcttgtacagatgagcattttgatcatatgttggggtttgaacgtgtgttcttcaattacatcttcttggatcataggtcgccacagagatcgaggctgctcggctcctaacatacaacgctgcccgactgaaagaagagggcaaggtacgttcttacttctactttgctctgtgcttgcgacgtgttgtctcatattctttgggatcctcttcgtattccaatatagtccttctcgaaagaggcagctgtacgttacagtgttcttctatcgcctcatcatatgtatagtctaatgaattgattgtgaatgtatatatcatcattggtattaattcgtagatggccaaatggtactcgtgagtatatgttcttcttagccgcaatgcagctaccaagctcactatgcaacaaaacgtttcctatacagatccgtcgttgctcagaaggcagctggaagcgcaattgaatgggctggaggagtcggtttcactcgagaggttagtctagaatatcataagctatatagagtcgtatatacaatcaaaccttggctcaatctttgaaatcttaatctctcgaatgcagaccggaattgagaagtactggcggttcgtcaaatttctgagctctcgcctatcacagccagattctgtttgatctgattagagtctggttttcctttctctacctgtagagattccaagatcggcgctatctacgagggaacgtccaacattcagctggagacgatcgctaaagctatcaggcgaaagtacagctcgtaaaacaagaaagctgatgtttcgtgttgtaaaagataacctgttcttctgatgtatctttgtccttgcaaactgtgtttctttttgttatctactgtttgccccgatgggaatgaatgtaaattatacaactcgagcgtactctataaacaagagaaaatagacgctggaatggaaaaaaggggtggggggtatcaagacaaaatgatgcaaaaactaaaaactaaagcagagccagagaaaataaggaatgaggacggggacggggacggtgtcaatcggacaacaccaatgggtcgttcatcgtcccaccatgaaaaatgcactccacctctcgatagattgacgtaacctctagatcatcgctgtccgaggtgtctgatacgacaaagtaatctggatcgggtgctaccggtcggatagccgggtagacatcctcaatcgccggaccttcctcgtgttcttccttcttactctctcgcttttcctctcccttgaccgtccaggcatcgccatgatcactaatatcgttgtcgtccttgtcttcgtcaccgtctttctcatcatctccttctcctcctggctcatctccaaacaggtcgcttgttctctcgtcctcgtcctcaccaccatcttcctcgtctccatctctgcttacagaagctgttccttccacggaatcatcaagacatgcggtcatgagttccttgtcagcaggtcgagtcgtccggaacgccgcccataggtcccttgttgatcgaggccgagagtttgtagaaggaagagtaggattggctctatcggagatacggtccttctgaggcgaggcgcgagaatcaccgttgttgaatgggttatctcgaaacatcccacgtttgtctcgaagccgcaaggcagaggcgcccagagaagaagccgtgggatgtctcgtgaatctcacttttgatgaagccttccttccggtcggtttgtgtcgaggatcgggaagcggtgggaaatcgttgaggtccgatccgttgttcaggtctttggtcggtctaggaacaggcctccaaccggatcgaggtcgagatgcggacttcgtcagagattcagaatgagcgggacgttcaaactcgaaagcttcccaaatagggacgtccgaatccgactcggatccggatctattcgaggatgacatcgccactgaagcgacagcttgatgagtggtctcgttgttgattgttggaagtgcaaacaagaacggttcaacggcaatatcgttgttaacgggtggagattcggacgcgtgaaacaatccaggattagagaagtcatcacggcgtgaaaggggagattgcgatcgcgaccgatcaagttctcgtcgacgtcggggtaccgatgtagagtgtgagagggcctgacaatcagatggttgtccaattatggaaatcatgtcagtattggaaagaacatgacttgaagacggcacaattcgtcaagggacatattttaccttgccatttgggctgtccaatgctttacgtttcgacgggaaattcgggtcagatgatgaaggtgctagagcggccggtcttgaagatttgatctttcttcctcccgtggtctttcctatcagaggaaagtgcttttctagccactacaatatcataggaatcatacaggtcagtcatgcagctatgccgatcgaagaaataactcaaatgggtccttcgcgcgaaaagaagaaaaggacttactatcggtaaatgttgatcggatctatctaaatctgaagaatctgacatctcaatcacatcgacatctgtaacaaccggcgccttcgcctctctcggtagcacggagcggctggtctgttgctccatcgaagcttctttggtgtcttcgttaagagtaacttctgggaataaagattgacacagtcgtttaaattcactgtatggaagaagaatctgtgaaagaggatattgtacacctgtcgtaagaagctctttgggtaagtgtttgctttcctcagatgaagtccaaattcttgaactacggaccatagcgttggctgaattgagtggcggttggtagagaaaccctaagaaaccatggaaagttatgggaggaaatgatttagactaagctagaagaggtccggtcaaagagcgatttgaatctgacttaccagacaccctgccacgtagggggtttagaatattctccaggtcgagcactgtaaggatgctttttgccactgtgcagagaagcgaatactttatttatgtttcttttggtgagcccggctagaaacagaatggaatccaactgaatccagctgttgaagcaaagattgcaaagcccaggtcaatgtttggatacagaaatgtctgaacggttgccggcaggcattggatggcatacct

SEQ ID NO: 2739 - DNA, 66860 bp, Xanthophyllomyces dendrorhous
acctagagcaaaaatctcttgatacaacagctgtacggtcttgtatcgttacctctgtttggtgtaattttctctacaaacaccgcggcagtgtgaatatatgtcgaccaaggaaaaggctagagttagtgtggacatctcaaggactcacgttatgatctacgatcacttctcgtattggaggaggatcacaatcgtatggtaattgtacaggcctatcgggaggaaccggacgtcgaggagcatttggatccggtttggggggaacctcgattattcgctcatccagcgcactaatcgaagatggtttgagaaaatcatcaatattgagtcagcgatcaataaatctggaaattgcaaaaattgtaaaaccaccgattacgatgaaagaagaaggagaggcttacaagatgagtggtagacatggatcaatctcatctgtatccgagtcaatctcccctgcccactgaacaaggtcttcagagctcacggccggtagaatacaatctaaagaagaatcctcttccgttgtagtgtttgctttggatagctcctcctgggttgttctctttttgtcttttggtcgttttacagggattggtcggtaaggccaatttagtccaaagatttttctatgccggatacatctataatggaggttgagaacgcaatcaagtgagtcgttattcaatggcacatacgaggacctcagaagaaggcagaacagaagaagaacgaaatctaaccttacgcagtgtagattcaaaatgctcgactctggatcaacttcctctaaagcgcccttacacctcctgcagaaccacgcctcatcattgtcttcttcaaccaaaaaactcacggcatcctctctctcttttcctttacgagatacagagaatcgaacattgggaaacgagttttgctcccggctgtgtgtcgaccgggtcgttcgagtgtgggtgaagaagtcctgatcgtccgctgggggtcgagaggtaaatgctgacgaaagggatcgagtgctagattgtttgctgtaccagcctttcgagtcatattcgcaagatgcacataaacactcatcgttcttcgggccgaagtaatcatctccactgaatagacggtggacgtgtatacacgattagcattaaagtcaactgtctcatgaactgtcaagacggaaggcagggcacgaactagtatgctgtaagctcctctcctggcagaatgtttcgtacggtttcgaacgaaattccgtgttccgtcttacacaggattgtgttgggtcgacaatcgtgctatgaagaacgttacagagagttgcgtgacccgtcagtacagtgttcttccgtctgacataatatctgagcattcgtaaagagactcacgttcaagaatcgagcgggcctgagagacagttcgaacaaagaatgtcaaacacaacaaaaatcaaaatatttgaggaattagcacatggtcaagcttttgattcaattggcgagtttagtcatgcttcacataccccaaaaacaactcattcctcttcaaagcggttgaccaaacgactgagaaatctcgcatcgctcttccggacgccaacgagcttccagatgctttctgagagcccttgccggctctctctttcaacttgatgagtttcttgcccgaacccttaacaggactcgactctggtctatccgttgcttgaccgttgactgtagcaggtaggtctgtaaggtgatggtaaaggtttgaatcaaaccctgacatctcgtcttcttctctccgagagagaggcgcaagcgatccccgaatgtggtatgtgagctttgttcgtttggagatctctttggtagcatagatggccaattcggtcttgccagagacatgtgagtaacgaggtgttcgtccgatatcgatcgccctgtcgacaaacagcatgaaggagagtatgagacggagtgactacatcttgtgagtatcgagtgacatctttgaggtgacatggaacatacgtttcgaaacaatatatcaaaagatagtgctccagatggctacggttagtgtaggtagaaggaagtatcagtgactttgcgcgtcttgtaaaaggaaaacatatagaacacaagttgacgaacgtctgaaactctgtaagcctttttctatcctgcgctactttcggctccaggtactgtctgactccgggaattctatacagatgaaacaaagaatgagagtcaagaatgagcaaccaaaacacttttgatagaagaaatgtacttaccttaggaaagcgccgatggcgctaggaatatcctgatgacctatgatatgctgaaaccatgcaaccaacaaatcagctgtcgattttgtgagccgaatgttaactccaaaactgaaacgagacatgcctccttgacgattgcaagcacagtcctcatgttgaccttaggaggaacgaatccgagctgatcgcatttgtggaccccgactaagaagaccaacaaaccgacgcgatatacgaagtgaacgtgagcaagatggcgagcggatgagcttcttccgtttgaggttcctgtccgcttatctttggacatatgcacacttctcactaaaactacacgtacgtttagtaccaggagctgtcccaaacacgtcctgtatcgtcaaacagatttgaaaacagaagaacgttagggtaggtatatcggacgactagcagaacagcccatgggtcatcgtgattatattcccattaccaaccacaaaaagcacttacaagtaacacatgcgacaaaaagtcatcgtcctccttcagatgggcctgatttctatagacggggaccatcagccggggaggataacacacagaagaagcaaaggaggcgaatctgatggattctagatggatactgagtggacgattgttgacatgtttacctgtatggcggggtgagcggaaagactacaaaaagagactacaaaattagaggaaatccattagaagacgacagtccgaattctagttcgaccaccacgcccatcggcagtctccgtctctttgaacatgctgctaaccatcgagctgttgaatcgtttatccatctctggagctattaccttggtagtatgtaccggctaagactgatagtcatgtttcctttggtcactagctcttctctggctctggacagtaaatggctttcctggtgcgggaaacattaccagcccggttcgccggcagttcctccgttaggaaagatgaacccgcctgagcgatcaagcattcctcttcttgactttagatgcagtgaggataaaatatctctctagtcttgcttgttgttattttctctcctctcttttgtttgacgtgtaggctggctttgactgtttctctgatgtgttgaccacaatgctttggctacccttcggactgaacgccagctcctacaatccaaccatacctctctactgacctatcggcctcgattttactcgatctctacacttcttggacccatggtgtgccactcacctcaacagacatggttcttgaccaagaatcaggaattaactggatacaaactgatggttcttcctatcaagtcttcgtcagcgccaagactgcctcttctcactcggagacatatcccctcttggcttccagcatatctctaaactctaccactgaggcattcttcgacatctctcttctcccccctgcagttgagccttacacaatcacctgttctcttcttccactgcctcaaggactcatcagcgaaaacagacttatcgagacgacgagtttgttaaggatcttaccggaaacgaatccatggggtggtagcacgactaggatagatcgtaggaagggatccatcctagttccagtcaatggaggctgggaaccgatactgcctgtaggcttctacactaactatggagattatttggccaaagatttgagccatctagacgagatgaagaaactagggtttgtcagacgaccagttgcttttaactaatggcggactaaactgtgcagctgatagacgcggcccatacctggcaggttcaacaccgtccacccagtgccgacgtttgatgatattgacatccttaagaaggtccttgaccacgctgaaaagatcggagtatgtgccagaactctttgctctgtcccagtggtttgtttccttgaccaagagtatctttccttatgcgtggcacaatctttttccctagctctggctgatgtacgacatgcgtcatacatacaccgattctgtcaaagtcaaagatcaagtcaagatgatacagagctacaagaacttgcttgtttggtatacagcagatgagtgagaacctcgttgaaaagtcaatcgtatattttaggagttatcatcatgagactgaactctatccaaacggaattataggccagatggaaatgaagattctttatcttctacaaggactgcctatgacttgatctacgacctagataaaggctatcatcccgtttctctcgtgctgaactgcgccgactgcaagtgtctttgtttcaatatctgtcgaacttgctaacataactaataatctcttacatcctctccagactttttcgccgaccatgtctctggagccgatattgtcctgatagacacttactcattcaacgtgaacctcaccttctcttccacatggcatactccatgcaacgagacgtatggatgttgtgggtgtgacaactgctattatggaggcgcgcgagatgtcagcgagcgcctggatcaaatgaacaagtttagaacatggttaggatgggagagaaggatcacgttttggggcgtcccccaagcttttggagggagtgaatactggttagtgtgtaatctgatattttatcattgtgcttcgttctgactagacagagatgtgtatctatcgggcgggcaaccgatacaactacaggacatccgagccgactactcaagagcttcttcttagttctatcttgggtcttatccacggaaccaaggggatcatcccttgggtggctcccacctccgattctctcacctcggcattttccactttatcaaaccatatcaccaacactttgtctcgtgttattctctccccggaacatgttgattctcccatagatacttcgttggctcatcggacatccatcttgctggctggtcaaacgagaacgagactatcgtcttgttggcccatctcgggaacaagatggaacacgtggaagtcttcgtgaatgagaaggctatgagagggcataataacaaggaatgggggatcagggatgtatttgatgcgaagagtgatgtacgactgatcaggggagagaaacacgacgggggtgctctcaggctcaagggggtgttgcaaggcggtgggatcgctgcttggatagtctctcaaagttgattctatcattttcgtagcttgttgaaaagtgatatagtgatctgtaacagtacatccaatgttgtcttctatgtttgtcaatctgcttggagaactcttcgaagcgcaaaggacgaaattcctaaaggcacgctgcggtaatgacgagtcgggacaactcttcataattctcatctcatctcatctcatctcatctcactttccatctcttgaagaccaacaatccttatcccgtagcttgcactcgtcacaaccaactcaaacatatttgtataaacataccgagtatgtccgttccagcttcttcgacgcccaaatgggtccctatcgagagcaatcccgacgtcttcaccgcatacgctcaaagtctttcattccctaccgaggcataccggttctacgatatcttcggtctcgatcctgacctactctcgatggttcctcagcctgttaaagccgtgctcctcctcttcccaaccggtaaagaacaggatgggaagagtgagagactggaggccgaaggcaaggtttggccggcaggaaaggaagaatctgagagaccaggtggagtgctttggattcctcagacggtaagtcaggttgactcttgtcatttctagttatacaatgttattatcctaaacgaacagcgatatattcatttataatgatagattgggaacgcatgtggaaccatgggtctcctacatggtctagccaacgctggggtagacttacctagagactcccctctgggtgcattcttcgccctgtccagaagtaaattcatccttttacaagtacatctcaagaccaaatatcgtatactcacgtctccttcttccactttcctctgaagcgcttcctccaaccgaaagaacagccttgttggcatcgtccacgcttctcgaacgagcgcactctgtggcatcaggaaccgggcaaacgatcctccgagaagaggacaacgacaccaaccttcattttacctgtttcgttcaagctagagcgttcgttccctgttacctgagcacttcatcttgaaagataattctaatcttgatagttgtttgcgcgcataatgcgatttcttccttgtgaacgcgcagtcaagacggacgtgctcacctcattgaattggacggaagacgtaaaggaccaattgaccatggagtatccaccgacctgctaaccgtacgtcttacttgcctacattccgtgaaaccattctcctcctcttctcagcatcttacttaaggctaaccttgttcgagttcgaaacatctctcaggattcagccaaacttgttgagacgtttttcatgtctacctatcccgattcaaacacgtactcattgatggccttgggacctgcctctgacgacttttaatctcagtcttgactgtaattgtgtgaaccctctacccactgcaactaactagttcgaagagaaacttgaaattttgtccggatatatcataggctattttgtaatgattggtacaaattgaatcatccaatagctgaaattgtatgatgcgttaagagagaagagagtgtgcctgtagagctacagatagaaacctgcttgtacatgaatggatctggtgacgggaaagagatcggatatagaagaagacggagaaaaatagtatctaaggcgagaagaaagaagaaagagatctagatctaaattcaggccataaaatccatcaagttctgcacaaaggtatcaaccttgtccttatcctgccttgccatctccaccagattcaacagctttttgattccgacgtttaactttcctgcctgattaaagccggcctgtgccaacaactccaagcattgtctgtgttcctgctcagaagtgaagagttcaacctctcgaaggaccttgtcgagtgcctggagagagtcaatggcaggaacccggatctgggcatcaaacacatcagaaagctccatctcagagagcatcggtcggttggaagttgtgcagatcaccaggagtcggttcccctatgtcgacaaagcacacgccaaaagatacataccagatcagattatataggcagaagttagaatgaagaagagacgaaccttgggaggtcttttggcaatgaggaccaacagcgcttggagcacgctgttagagaatcgaggacccaaaggaacccagtctttttattcgaagattgatcaaagagagacagaaagagaaacgaggtcaacagaaggtaggccaagacgaagagtagtgaccggatcaaacggttcagcctatacttacccaatatcctctcgatgttatccaccacaactacgctcaacggactcttgtagctgtccatgaagatcttgttcagatgagcaatcttttgctgctcgccaaacccaaccatgtcctcaggagaaaccaatttaatgaacgggaagtcagacgccatcgcaattgtagccgccagcgctgtctttccggacgaggcaggacctaaagaggattgaagcgatcaagcgacgcagaatcactcagaagaactcagtggatgaaaagacttcaggcaaagaaacggaaaaggagagcttaccatgtacgagcacactaacaagcggagttcgctgactctttcgaacctgctcaacataaagatttccatctcgtaagatagtctgagaatccgtttcgagacagaacagcataactctggattagcctcctgagtgacaatcgagaggtagatatttagccacttacatcgaccttcttgttaaagtggatgattccgttctgaacgacctgttgaagttctgcttcggaaactccgaatgcagcatggacttcatctaacgcatgcgtgaagtctcctcgcatgacctgcatcgtatcaagatcgttagagattcctgcctgcgttccgacctgaagaatattgaaatatagattccgattccaagaaagagagaacccccagcatatcaatatcaagcaaatccagatgaacggtgaatactggctctggtacgctttttacaaagacgaaccttgatatgtctgttcattgcgaaactggtcgcgctcttgatcaaacctcccaactctgctccactaaagttctttgtcaatcgggcaagttcttctatgtcaacgtcctcacccagaaccttgttgatcttcattttacttgtgtggattctcaggatttggagtcggccgtgctcatccggaagagaaatttccatgtggacctcgagtcgaccgggtcgaaggagagcctcgtcaatcatatctagtcgattggtcattccgataatcaaaatattgttgagctggtccactccatccatctagaattgatgcataccatgtattagataatgagaattcgtttagaatgaaacttgactagatcacttggacaagacgagttacgaaaaatgatcgagacataccttggagagcaactggttgacgactgaatctccgacacctgttcctccaccagtagaacctctctgcttgcagatggcatccagctcatcaaagatgatgatgtgtagaccggattcgtctcccttctccttgtactatgttccccaaccaacagaacgaattaagaaatgaaagatcgtgttttcggaaagcgaaaacgattaatatctgtctaaagaaatctcacgaaaactcaggagatgaatctacgtacctccttctcggcatcagcgaacaattttcggatgttctcttcactttgtcctacgaatttgttaaggatctctggtccgttaacaatcttgggctcccttgcgttaagcatctttccgatctgacgagccatcaacgtctttcccgttccgggaggaccaaatagcaacagacctgtttgcaggagaagaggagaaggacattgaattagcaggaagtgaatgcaaaagtttactgcaaggaaaaaagcgatagatcacctttgacatgctgaattccaagtttctcgaccagtgaaggggggaagatacgggaggcaaatgctcgtcgaaagattgcgctgaactcagtatctaaacctccaattcccatgtcttcaaatttgaagttgggttgcaagatggcgttgggcgcgggtcttcggggtggaagcgatttgattaggaagacaagctaggggtcagcaaaaaagaacagttgacaagatggcagctcttggctatctagagaagataaatatactttttaccactcgctttgatcttgatcttgcttccctcgtcctttcgaacaattacatctgtctgagcagtaagaataccaatcgtagcctgggcgcctgctcctgtcccatcaactgaaagatccacgactgacagcgcacggacaaaggccttaagtggcctgcccttgaaatcaaatacgatgggctgcatcgaagagagagggatgccagagtagagctacgagatattcaagccaccagacgttggatgtggtgtcaatatgtgcgctccagaggaaagtctaaatgcacaacttacctggacgacatgagcagagatatcgtccgcactgaaagtttcatggtcctctgtagttcgggaaaagaatcccacctaacacgaacaaggattttgtcagcctcgagcactcatcaagggtatagcgagcaggagaacagaaatatgtcgccatccgtgggaaatagaaccaacatcaagttctacgctgccaagccagtctccttgaccgcctagctctacaggctctacatcaatctcctcgccgatagaagttcctagccattgtctctgaatattcgacgcccatactgagcctgagggcacgttaggatccattctgtagagatgacaaaggtttcatagtagtatacgtcggtttattcagaagtgattgtcagtcagtatatggtttcttgaactaaaaggtaggaggtttttgaagataaaacaaacagaaggtagacgttcaacatacctcgtactcaggtagaactgtctcttgactctgacgtattgatggtttcctagatctctttcattaacgaccaaacaatttgagagtgccgttgcttctgttcccttctccaaccggtaccttcccttcccacctccaaccagacctctttgcttttcgtctgagtaaccaccgcctccggttccacctccaccataagatccatacgcgccctgagaagcggacgggccacggtagtgaccagagtcataagcggacggcggctgctgatactgatctctacgaggaggcgtaggaggtgctgatggctgggacgatcgagagaagaaggacattgtgtagttgattgtagagaaaggaaagacagtgagcagctattgggggggagagatgggagtggttgctctatgttgtgtggcgtatcgatataaaggctgtgtttattttgccgtgtcttgcatggtaatatcttatcgctcaagcggtcacaccttttcgcgcctgctagccttcatcatcagtccgagccctccgaggattcatgtgtttctcaacagatacttacacaaacacctttctcttgtcccactcacacacacatatatatagactcccgctacttctcagatagatatccctacacagcatgagttttagacttccaagatcactctcgatctgctcttcgatgtttccctcggctgcccgcgcacgccttcctccaactcactacactcgatcgttcttcagccttcctgatctctctccactattgggaaacaagtctccatcggatccgaatcaagagcagcattatcgtgaagagaaagtttttccgttgagttcctgtctcttgtgttgttctttttttactcagcctcaggactcgttagctcggtacaacgactgaacttgacccctcccgtctgctcctgtgtcttcttactgcttaccttctacctaaagctacactcccgaacagctctacacggtcgtcgctcatattccatcctacaaatccttcattcctttttgcacgtcctctcggatcgtgtctggctcgccaggtctgggagacgaaccatttgagatcgaggccgagctcaaagttggcttcatggggttcgaagaagggtatgttagtaaggtcaaaggaatccccttcgagagtgtacaggtttgtccccttctttcttatcctttttctacaacaaagcatcctaaactggttatgtttctctctttctctcccttccctctgattttgggtggagtgtaggcaatagcttcggaaactccgctctttaaaactcttgtgacgacttgtgagttttttctcttattcttctgtctccttcttctggtcttccttcaacctcgatctgaactgtctctcttccttctgatgcttgattctcgaatcttcaacaagggacattccatcctcctgctcgtcttgcgcatcaacgagcttctacctcgactctaccgtcttcccagatgagtccgacgatggtgacgttggatcttcgatactcattcaacaatccatcccatgctacggcttccagcatgtttttcggtggcgtgagtgagatgatggtgaacgcgtttgagaaacggtgtagagatctgtatggacctcgatgaggcttcttgaaagcttccttgttctttgtcttaatcttgctttcgtctgttaccctgtgattccttccgagttgatcggctatcaagaggtgcacatttcgcttactcgattttactggaatagtttggatggtatccagagcagatgaaaagagagaggatatcacaaagtgattcaaaaaaggggagatcacaaaccccaaagtggcgacatacaaaacaagaaactagataatgaagaagataggcaaggaaaaagaaaaagaaaggaaagagacacctctgtttgtttctaatggagcgaagcagaacaaaaaaagaacatcgaggctcatagacctaaagggtgatgttatcgttggtggtggaagaagaatgagaggactcgaaaacactctagtagcccttagctcccggcgcgctctctccctgccttcgaagcttcaacagcacctccttcatccgggccagatcggatcctcccggtgtggactttgccaaggttttcgattctacaggtccataagagaaagatcaacaaatcagctctcttcaagagaacaagaaaggaagaagaggaagaaaaacgcacgagagttctccaaagcgatcatgtcggtgatacgctcccatgtcgtaccctgagagagccgatccgacaagtcggccaagaaagcagcttcgttctccctggttgatagaaagaaagaaagaaagaaagaaagcgaaacatatggaaggataaaacgataagtgagaaaggacgattctaatatagcttcatcttgaatgaaacaagagttggcttctcacttgttctccttgatggccttttctttagaggcgttgtattcttcgtagaactgatcaattgccttttccgctttcaacacggtctcttctctcttttttctgctggcctcatctcggcgcttgatgtcctcctgctgttttgccttccacgcgataagcgcctcggattcaacatcctccgttggcgtacttgactgctgggcgttgcccgggacagaaagagatccagccggctgaggaatcgaagcagagtaaggcgagtcaccatactggtagttctggcctacaacaggggccggctagtgagagaagaaatggtgggaccacaaatgatgttcagctcagagattgtccagtcagtttcagaaagagccattggaaccgacctgaagctcggcagggaggagctcttgcacatctggaaactcgttctggaacttttccatttcttcatcctcgtgagcaccggtgatgttgacgtcgaatccggtcttttgaggggtgagcgaatcgagagaagggaacccaggagcaagagacgatgaagttggttcggggagaggaggaggggtggaggttccgtctatcgtatatgattgaacggcatgattcggaaagaatggattatatggttgcaataaagattaggataagagtttgggacatgttggcgacatcagcagggagatgggtcgtttgatgaaaccgaatagcccgatgaagatagagttagagtcagacagaccgtcaggatcatgaacacagaaactgaataaagaagtgagaaggaggaaaccgtacctcctagatccgggaagtcagtcgttggaagatcgaacgagcccgaggttggcacgtcgtttgatgaaaacaagccggcatcgtttcctgatggaggtcgaaagaataatgagatttttggttgccgggtaggatttgaacaggtattggcgcaaatttaatatttgattgttgaacgacgcgtgaaatcgtgtgcatggacaggagcgagaaagagattgaaggaaagaggaggtaaaaggacgagagaaggtaaaagaaagatggttagagatgcgaaagaaagagatcgaatggaggatggacgtaccgagagcggctcgttctctagccaagaaatcgtcggtggagaactcgtccatggtgttgtttctattaagctttcttgttcttttttagataggagagaggaaatgagctagacagctgagtgaatgaggtggatgtacagaaagagctgactctggacttttggattctatccggtacacaaacagcaggatatctttgggacgcaaggctggacggctcccgccagtaggtggttacagtaggtggccacgcttgtcctgttcattaggtaagcgagatcgccccaacttggggactccttgggtccaatttggggttcaaattctaaccctaacaatgccaaaccgtcctaaggaacgctagttaatcatcattaatctttctggtagaatctcggatggccggaggaagggattgaggtgtgtgtgtgcacatctctgagtgcatctctatgccaccatgtgtcggcgtctctagctgcttgcgcttccgatcttcatgatcttgttctcattcctcatattgtaatcaaatctgattgtgtttttctaatacacagagcccatccgtctcgtctcccttgaaaatctctgctgactatgccatcgtatgatatatcagtcagaccatgtttacctgcgggacaatgttcatcaggatggtataaacatggggtaaggaagcacgggaacgtatcagttaagaaggattaacatccctaacttggattgagactgcacatagaaccaaggacaaaggtaaccggcaacgtcacttgtttgatagatgaattattcatatgaaaatcaaaatcgtcaatcacagacttagatagccaagtttaggttcagtttctaacccagggggctcgtgcggctcgcaggcatttttttcctggccattttttgtcgttggtctcttctattcttccctcacatccaacattcttgtgagtttctttctctcgatcacataccctgtcttgctctttttctctatcatggcgaaaaggctaaagtctttacgtgtgcaatcctgatgcttagcccttttttccctctaaaaacaccgcggaagaagactaagaacaatgtgtatgtcgctctcttctggattcaaaagagatgaaccaaaaattctgacctgaaccttttttgttctctttgcctttttaataacagctgacgctggatctgaacccattgataccgtcgaggaggtcgaggtcgctgaggccgaggctcccaagtctggagctctctccgttgaggaggccctccaggaggtcctcaaggttcgttgacctttttcttcctgtgcatacagccttccttcttactaactgcccaattctatcgaccaaacacaaacagaacgccctcgttcacgacggactcgcccgaggcctccgagagtgtgctaaggccctcgataagggagtcgcccacctttgcgttctcgtcgagacctgcactgaggccgagtacatcaagctcattgaggccctttgcaacgagcacaaggtcaacctcatcaaggtcaccgaccccaaggttctcggaacctgggccggacttgccaagatcgaccgagagggtaacccccgaaaggtcgtcggatgctcttgcgtcgtcgtcaaggattacggacaggagtcccagggtctccaggtcctccttgactacttcaagtcccgataagtttttcacaatgcttctgggctttaacatcaactctttactttcaaggttagtttttctacgtatacgaaaaagcaatcctgctcttcaccttcaacacactccaccccttcccccttcccattctataaaaatttcaatgatgaagtacggtactccctcttccgaaagggcgcaagcccccgacgacattccgacaggaatcgaactcggtggaaacaccaatatctgtcacgtctgagctctccaatttctacagtcctttcctcagccaacgaaatatttatcttgtgtttatgtaactaacctggttcgttggcactgctgctcctgttttagattactttggatttacagagtcgcttcgttttgggttggaagataaatgaaaaaattatttggtcctgactgtcttctcagtgtacaaactataacgctcgcaagaccaaataaaaaaaaactcgctgaaagatcaatgaaaactagagattatacaaaacatttatatatagtgaatgcctgtcaaagtatagactcgcttaggtcatttctacctcgaattatctttttcttgatcatttgctgcttccaaagctcaacatcagtcccttcctctccctctccatctcggccccaccttccgcatcgtcatcctcactatcattctcactatcactatccccatcggcaagcccatcgagcttgctatgcactttgtcaaactcactcaatgagctcgtcctccgcctgatacctccatcacttccagataggtcgttcatcccttcactgaccatcccggctgtcgttctgatcgatgttgaccctgctaaagagccggaggtagcttgacctactcccgagtggacgttggcattgccgttggtactactctgaatggtagggggcgaagctgtcgatctggatcggatggagtcttctggggtggagctggtagggatttgggtgtaacctgatccttgtggatgcgaagaaccggtttcgcctgatggcgaggaatctcggtgaggatgatggtggtggtggtggtgatggtgagaagaggactcgttgtacttgagaatagtatcaatgatagtgaactgaacgacattcatgatgagcgggaagatcgccatcacaaacacgacttggccgtgtggatcaagcctgtttttgaaggggaagaagaaggaggaaaagacgtaaggttaaaacgtatataaaaaggagattctatatcatctgataaagacaaacatcacataccagctcaagatcctaagagtgaagaagcatcaagtctaagaattcagtattgggccttatcttcacttggaaaaaaaaagggcgcatttatcaggataaaaaaaccaaagagaagagtttacgaaccaagatccgaatccaaatatcccaggccagatcgagaaaatgatgacaactacacctttcattcctagtagacagctcacgtagacgaaacattgctttgcctgattcaagcccaagatgatttttattccacgaatagccttagacgtcagctcgagtgtgggatagcgagaggagcagatcttctagacatacccagaatgaatacctaacatccccgtcccgtaatcggtaaatccccatctcccagccgacacctcctagtgtgtcgactaggatccatcttgataatctcagaagaacccagatgatgaagattccaagggtcgtatcgatcaagacttttacaatgtaaataatcccatccggttgatacgcaaaaaaaatgtcagtgacctgatgagcttgattccgagggaagaacagtccaagcttcaccattgaggaagtacaaagagcatggattcggacgatcgaaagaagacttgactgtttcatcgaaggcagtcggcgaaggcgagggaaaggtcgatatgaggatactggattaaggttagataaaggtagtggttagggttaacagtcagagcaatcaagtgctaacagaacaagagagagcatactttgatagatggactatagcctaaccgaagagagagcagagacaaatgagagagtgcagatatcggtctacctgggttctgaagaaaagaggaaaggagaaaaagagagagtcatacgaacctggccaataaattgttctgatcgccattggttcaaggcaaagttgagccggcagacatcagcttttgcgatcggactcgacaatatgatagataccactcacttgatgtatccagtgtcctgataaaacagcccgcaagtaaaagttcagtttacagtcaaggagcgatcaagcctacacacgcgcgcgcgcgccacggatgagagagagtgtgtatgtgtgtaagaaaaccgaccagatctgccatggtcgtttaggtttctcgagatctatggagagataaagagatgtactaatcaacaacatggtcttgacaagtcgaaaagaaggggaacatgcgcacatcgcttcacaaccagagtgaccaacactcccagacccatcaagcctgttgagcagagcgaaagggggcggtgttagctagcttgctggctcgatggcgaaagcagataggatgaacccgccttgaacaatcaatcctgtttgacctctaacaaattgaaccgacagcatgaacgatgatgagagaaggtcaaacccatccaagtacataacaaaaaacactcacaagagatggcagttgttgttctcggttggcaaggagaggatcgagcttgttccagagtacagtgcagaggagggcgaaggagagctggcagagaccgaagaactcattatcggtgaagggatataaggaggagccatatctaggaatatacaacaggccgtccgatatcgacctagataaacaaccgaaacaaagagatagatagagagaaagcgaaaggatgatagccaacgatcagaactaggtcaacccaaccttgctctcggtctctctctctcactcaaggttggatggtgaacacgcgtttaatagatttttgaataatttacttacgtctacttacctctcctcacgagacacacacttgccatccagtcggttcttgttgacgaatctttgacctccatcttgtacatcatcttcttcgtctctctccttgcgttgctcttctgccactctcggatccacaggactgattttagtagcaaggaatacttggataagttgtttctctgactgtgtccgtcgaagaatatcgttggaatatcgatcaagatcagcatcgctcttctcgcgatcctatccctatctctactctgcccttcacctactcaaaccattcatcatcatttccgcctctagcagtccatcacgtccctcttcgaatgaggccctcacagaggtagacctatctgaatcaaacaatcatacatcaaccgacaaaccatcccttgaatccacgtcaacctcagtcgatcctagtaggtcgacaccagacacaaagcatctcgaatcccaaccacagcgcgtcaaaaagccaagatcttctcgaccaccttcttccacttcttcccctctctttgcagcgatcgccggtgaggattctgatctctccggtctagatccaaatctgctcggctcggatcctcagcggacggtctccaagaatccggctgacggaactcgtacagagaacgccaatccttcttcttcaggcgactcttcttcagaagaccacgagatgtatcccctctcttctacaacctccctctccgctctctccacagccacgtcatcttccgatagtaccatagcagctggagagtcccctctcggtcttcccactcagatcaccacaaccggtcagttgaaaaaggtcaaagtatacgaacttcggaatgatgcgtggttcgatcgagggaccggtcacgtccatgggttatacgacgaagggaccgatcaggcgttgttagtcgtcactgccgaggaagtgctagatgagacagtgagagtccggatggcaaaggagaaagaggaagccaagctggcaaagaaggaagaggtcgctgctaccgccgcttctgtcggtggaaacgcagattcagctcaagagggtgagccaggcggcttcgtggtcgaaggagacgagacagaggattcagacgacgtgtggggagatcctgtcgcgctcaagtcactacggatgaaaggagtagagggtagattgatcatgcacacctttatccaggggagagacgcgtactccagacagcaaggtgagctgctgttatcgtctgacgtgtcttgactgacgagttcgtgtctcaaccctgtcgtttgccttgcttatccaccggaccgacccaacagatactctcatatgctggacggaggctgatgggatggatatcgctatgtcttttgccgatccggatgactgcgagaatgtgtgggagtttatccaagatgtagtcaagatgcttgattgtagtaagtaccaagtttcttgtgttgggacaagaacaaataataagtgtgtccgtcgatattaacacgcgtaactaggtatggatgaggaagatgtctttaataacccaccctcagacgatatctcgtttgcatttggctccatgtcgcctatcggaactggaatgggtcagagtagaggatcgttcagagccagtctaataaagccgactattggacatttgaagtaggagtcttttctatcatgtgttttagggaggtttcaagaaataaactaaaacaagcctcattttcccacttcgtttccatctgttatacagggatgcttcagaccaagttaagatcatgtcaaaaagctccgcaggcagagacaccattgtagaagccgttctgaaagaggtaaactctcgtttccctcctcagaagacacaagacgcgtatgaatgcctattaacgcatcaacctaaatcctttctcttcctgtacctcgaccttgtccctctcaggattatctcaaaacaatgatcgagactttcgagcaatctgaagatctcgaggtcttggaggatctgcacatgctgtttacattgatgcagacaattcgtgagtactccagtcaagaaatgagctggcttgaaatctgtggaacactgataggctcttcggaccctttccttcctggattgatagtgtacatcaacgatactagtgtggtagaattaatacttgaagaagacatgtttcctggtgtagtcgggctcctagagtgtgagtttggatcttatgatgcggcaaactcggacaagttgatattgactggttatattcgttgtgtatggtcctgaaactagatgatcctgagtttccaactctcaaggcgtcatatcgagatttcttggcggccacatccaaattccgagaacctgttgccatcaaaaacgaaggcgttcacatcaagatccatcaaacttaccgccttctcttccttaaagacgtcgtcctcgctaggtcactcgaggattcgacgttcaacatgctcaactcattcatattcttcaaccaaaacgatatcgtccaacacatgcagagcaacgataacttgctccaagagatcttcatgccattcgtcggcaaaaccaaagctcagagtataagtacacctgccgataggaaggtgatggaattccgatcggaaggcgatgagatcgtgcccgggctagagccctcgcctgcaggatcgccaacaccaccggaagcgccggacgtccgaacgcataagcgcgagattgttcttctccttcatcagctgttgctcatgtcgaaaaacattccgctaccggctcggacgcagttagtgagaacattgcttgacagaggcctcgtccccgtcctagaatgggcgttctcttttggatcttcagccagtcggcctcagacgaaatcggatatagaatcgaacaagaccacaagttctccttcaccttctgcttctagcttgcccgaagatttagattcagttccgaacgcggcaatcgaaatgttgactcattgtctagatcacgatcctggctcagtccggaatatcattctcaaagaggcagataagttcgaaagaggcgaagcacagacaaccctggtacttgagatcatcaagctcttgttagggaaagatggggcccaaataccgaagggaggcttgagaagtcagctggcagatggactgaggcaacttttagatactggagagtcggatacaggctcggtgagtttgttgtccattccttgttctcggtaacgtgtctcaagcgttctaactctctcttctcgttgtaacttctcttttggttgtcactagatgacaagcagagggcctgtaaaagatggccctgtggcggaggctttcctgacatacttttatgagagctgtgtagagtccttaatgcagcctctatcctcgctaccagattttgaaacactcaaaagtgagttggtgtttcttcttcgaagaaaatctggtttgcatttgttgagaactaactgtctataagtgcttatctctaactatacctgtgtcttcaatagagtcatcattggtcttgacgacagaagagacaccactgttacttcacctgtgtgacctgctgtcattcatggtggagaaccacggacatagaagccaatacttcattctttccggaacgatgaacttcaaagtgggctgcttactgagtgctagagataagcctttacgacatggtaagttaatcctattttcgttcctctgcttcataccgtttcatgtttcattcgagtgagtgttaatcgtctttccacttttattttctctgtcctgtctcagctgcgatcaggttcttccgcgcttgtctaaaggtccacacacatttcatgtatcgatatctcaacaaaggggatgtatttgcacccgtgttggagctatcagcattagagtctccgcgagacaacatgttgagctcggcctgcttagaactgtttgagtacatacgtaaagtaagactatcttctacctatcgaaagcctctcaaagactattgtcccagataattaacgatggcttgtttggtatatactaggaaaatatcaaggtcatccttgatcacttgatgagccgacatggagatagaattcgacttttgtcgtcaagaagggtgttgaggggttgcttcgaaggtttgatacaaaaatgggaagccaataatgagcccccgcctgttttgttggattcacgttcagctcccgaggaatcaaagtacgtcttcaacatgtttctcacatgtctgtttcttgagtcacattcatgtcttcctgtcattcaagctaatatctgcgttcttcttctgaatcaccagacgacgcaccgatcgagaagaggaagactacttccgagaatctgatgaagaaagcggaccctcttcgacttcccctggtctaccagcctctcccttaacccgatcactgtcttcgctagcacctaaacgaaagcgtcaacgcgtccatacaaccgagtcgcaaccgtctatcacattcactcctgcatcatctgaagacacctcagcatctgactcggcctcgaattcttcttcctcatcaactacatcaaaagggaaaggtctcgatcttggatacggcgacgatgattctgatgaagaagtaatcggtcctctggaaccaagggatgcctcgtcttcaacacctcagctagactctccggagaagattgaaggcgttactctgcgaatgagtgagaaacgacggagagaagaggaggaggatgatgggttggacggcttgggcgggcttctagctgggaatgtttcgggtagtaagggtcacaagcgggttggaggaatttcttctatgaagggagagagctcggctgtgacggccaaaaagccaagggatgggaaggagccgacaggggtctcggggtcaagatctgatttggtagaatcgacaatgccagcctcgacaacggctggttcacttgctaaagaggccagtaaggcttcgaacaagctccggttcagtctgaagagttttaaatttggaggggcgggaggagggaagtaggacaattattttaacagggttcatttgaccatcttcttgctcacggagttctttttctctttccctctttttcctataaactgtttatatctacatagttcgctcttccatcgcatgttacctgcattctgtgttcatctgtttgagagaattgtacattatgataatgcggtgatgtctccatagttagtgacgtgttacacagaatatcacaagcaaagaccaaaaataataatacaatattcatctggccgttgacgtttcgcgcgtagccgaccgaatgtcaattttatcaccttacctttctctccctccgtcgtcgacacgccataacctattcatcatcctaacacgttgggcttccggtgctcgttctacgtccaatctgtctcatcttcctttttccctccatagataggaaagttagttgagtgaacttatcccgattcgccatttactccttcgctggctgctcccttggttctcgcctcccccttcccttccttcattgccaatactcctagactcaatggctaccagcgtgtcttcctctcaacatgtaccaagcgtactcttacttggaggtcagtctaacggtacgatagagaacaatggagcactaaaagctctgttggcagagcctgtcgagttcagagagttcgctcaacctacaggagcggatgctgctatcattgaccctaagggaaaaggttggattgaggtgaaccctttgcctgttgcaaacagtgtatgtcgtttgcttcggactctctatcagtaatttggtttccaagcttaagtagccatcagtagagaggctcaactgaaagtgtgttcgacgatgttatgtctcgacggtcaacgtcttatagtccaatggaaacgcaaccgcttctacctctaagttaccttctctcccttccacctcttcggttactcgaccgcataatcctaaatctctctaccagggaatcgtccagctcggattcgttcccggaagcagacctattggccctgggttcaacaatgttgggaatacgtgctatctaaactccgttcttcaatgcgtcatccacacgcctgggttgggaccattgttgtttgaacacgagcctgcacaatgtacgtttgttgactgtcgcaatttctcttctgtagcatacgtatgcccgaatagagtatgccctatattgagcatcagatagtgccagagtcgcagcgaagctaaactgttgaacattttcttccttccctgtgtccatggctactgttcggtatgcaggcccagttaagaggaacccaaagagtgacggattttgtgtagcctgttcgctcaaggccgtgtatcagtactctttccttcgaccaaaccaaggatcgtataacccgtctgtgattacgaagaacttgaaaagtgagcgattccttctcaggttccagggtttacttgctaaagaagagtgcatcgctctagtctcctggttcgaagagggtttccatgatgctaacgtgtcaactcatcactgctcttatccattttgaattctctttcctccaattcaaagaaatcgcccgacatcttcgattgggaaggcaagaagactcgcacgagtttcttcgtttcttggtcgacggtcttcagaacgctgctcttgctccgcatggagaaccaaagtaagctaaatgttggctgtcagtcattagctccctctttctaaactatataacgttttcgactcgcagtaaaatcccggcggagctgaagtacacgacgtccgttcaccagctatttggtggtcgactccggtccagagtgacgtgccacaaatgccatcacaattcggatacgttcgacgcgttcttggatctgagtgtggaggtaaagaactgtgggagcgtacgaaacgcatttgaacgatttatcaagccagatcgattagacggaaacaacaagtacaaatgcgaaaagtttgtccggtcccgcgctatatcttctcttgtattcttcagaccaagtgtcaacaaacgatggtgtctgattggtttgtggctcgtgtctgttcttgctctgtccgaccgataggtgcaagactttagtggttgccagcaaacagttgacgattcagtctactccgaaagcgttggtcgtgcacctcaagcgatttaccccaatgggaggcaagattggagagatgatccagtatgataaatcgttggaccttggtccatatatgagcaaaggagaagttcgtatcatcttccgtctagttcgctttgtctgaactggtttcccgttcaatttgctgacttaggcttattattcttagtctggtgcacgttacaaactgtacggagtagtgtgccattctgggtccggtcctcactctggtcactacactgcccgagtgttgtcgaccgatggatcttcttggcacaacatggacgactcgtatgtgagctctatcggaaaaccaccgcttggtcttcgagacgcatacgtgttgttctacgttcgagagaagggggacgctctgctccagacgattaattcaacttcagccggcggtcccagtaaaaagaggaaggtcgagctcggtcagcgagcattggagaaggaagataccgaaaagtcaatagagaaagatagttctgatgaggatgaggatgaggatcagagtgatggaagcgaagaggtcccgaagcctatctctgcgtctccgaagatcaacggggttttgataaacggaaacggaaatggccacggacaaggcaagaaacacaaccgacattcctcggactctggctcttttcctgcctctgctcgaccttctttcgttggaggaccaaatgaaaacggtcacccagtacgtggaaaaaaacatagaaaaggccatctaaaggacccatatgggctttcccggggagggaaaggatttgctgtacagatgggcggcaagaagttatcaaaagggctgaagggaaagaagtgatataatacatgcttttgtgcccttgtgcttttttctgcttgttcttctctcctccatttttagaccggcagatcatcgttgctgcctacgatcatcaatgctacaagccttcatggtgactggagcagaaagagtctctgatggcgaaagattctggctcgtcatttctactgtgcaccggacaaatccgccaggcgataaaaacatatacacgcggataattctttccacgttgacgaaaactacatcgaaccttatctagtagcacatccgtaccttgtttaaatctccatcttgtcttggttctcatctccaatatcattctcatccccaacaatcgaaacttaggttatctttaccatggcagagatggatcctgccttggtttcttctgattcatccccgatactgtctgacgagttcaggtcgatctacgttcacctcattccctcagtcatcgtgctattcgtcgtgcctttactgctgtcgtttccccgaatacttcctcgattcgcttatcattacctcatcactctgccgcttgaatatgtcggtcgagacctgactctccaagaactttacccggatcagcctaacaaacgaggagttcccatctggaaggctgctattctcgctactggaggccttgcctttgccctcgtttatggatgccgagctggatggaaagccttgagtggccttgatggaggggccttctgggtagatatcgtgctggggtgctgctgggtaagtctagctcaacatgaatttgtgattgtcgagttcgctcaggacagtgccggactgtttcgtctggcttcagtcgctccttctctccttattggctggactgaaagcccagaagactgatcttctctcgttctcgtcgccttcatctctgggtttccatactattcaatcttagctatatgctgcgacttatcctattcttcgacctagaccgactccttacccgacaatcgtcgtcttccatgctctccagctcatcgcgtcgttcgtggtcttctcttctgtgggtgtgtctaggagaccacatcaatgaatgttgatcacttgcctctctttcgacatcctagcttgctcactctgctaacggcgctcttcaaactatcaatacttccacccgtacctcacgagccggtgattgctcggtcgacggagatcttgacagctctatcggcgacgctatcggctgtgctcgtcgcagtatcgctctctcttccagtagaatcagtgccggcatcgtacgaggaagagcgaaaagcagaggccaaccaaacgggtggaatggggagcagtccagaggacgggtgcagtgtatgggactggatcacgttcaattgggtcaagcctttgatcaagcgaggtacgttttcttacatagcgcatatactttcacctatttctctcgcatacaattttgacctgggaccgtctttgaaatgcaggctcgtctggatatctgaaagatgacgatgtttacatgctatctcctactcagcgatctcaacctctgtatgccaagttcaagacgattcgtggatccagcctgttgcagcggcttttgaaggcgcacggattcgatctcttgctagatcttttattaacgttcctgtcaatcatgctcaactagtgagtctggtctctggtttgcgttattgtttcttcgaacttcgccttgtcgagggtgctatcgtccggtcctgaatgcaatattccgttgatctacattcactcttaaagcgcggcaccgttcttcatcaagcgaatcatcgaggcgctcgcggctccaacccctaaaaagctttcttcagcatacgtgtacgccactctggcattgatagccaccatccttaaagctcagtcagacttgaaccatctctggttctcgaggagggcgtcggtcaggataaaaaaccagctagctagtgcaatctatgaaaaggtttgttatcacatatctctctatcatactctttgttccgtatgcctaaaaccctcaatgctctgttctatcgatattaataacgtcacattggacaggctctgaaacgaaaagacaaatctggtgtctctgagagcaaggggtcggctggaactggaaagatcgtcaatctcatgtctggagacacgaacaggtatgtttacctcgcgcattctcgcttctcttcctacctctgacctgagtgcttctttatcgtcgtgcgcttctcatcgaagaattgggaatgctatttccggactttatatgctttacggaggttagttaataacttctacttttcagaggaactctagtctaatagcttgaatgcttgcattcttctcacccagcacctttcgagatcgtcgtatgctgtgctttcttgtataggttcgttagtatttacaactatctccttgatctttacaaattaatcactgatgttttcaatataatctgtcgcttagtatgctctcctggtccgcctttgccggaatgttcgttttggtagcagtcatgcctttaaacacgataatttccaagaggaacgtcgaggttagtcctctctgctttgttgttctcttcttaagaagcttagggatattcaaaacaagaactctaataacaatgttgatatggaatagattaacaaagcacttcttgcggctagagataagcgactgaatgtaatgaagtacgtgctttgtttctctttcctcttcgttcaacctaagctttgacttactatcgccttgtcatggttgtacatgaaaaccagtgagttgattggcgcaatcaagttcatcaagttctttgcttgggagaaacaatggaccaaacgggtgacggatattcgacaagaagagttgaatgtcatggtccgggatcgtgtaaattcaatctacttcactatcctctggaatgtcacacctatgctgtaagtcgttgtttgaatctagttggacaaaacttgagttgagtctgatcaattggctgattggatgatcgatcttgtttgtggtaaaccagggtcacgatcatctccttctgtaagcttgttttcctcatcttctctttcgttctatctggaacattctaaagagtgttgcaaagattcttaaattgggctttgtacgatccgatacagtgtcattcatcaaactcgagaagggtgaattaacgatcggagtcgcctttacttccctttctttgttctcgatgctccgtaagtgtcttccgcctcttgagtcttccatcgtcaataaagctgacaatatgtgaaaactgaatctcaacacaactttctcttgccgttatatgtaactaaaactacaagggggccctttgaatatgtatgtcacatttagtagcgtacgaaggagagacattgttgaaaattgagattgagtaatcgagcattgatgcctggtatcctttcttttgaattagtattcctatgtttgtggtttctctcctacagacgtaagtaaattcatttcctaatatgcttatgtatggaggatgcttccatttgctgaccaaaatttacattctgtatcgaatttagccatgttgcaatcaaacgttcgttctggcctgctcatttatgtctctagttcatcttgtgttgctgacgaattgtccaaatatacgacaggtatcgacgatttccttcaggaagaagaggtccccgattttgtgtcctctctgaagatggccgagaatccgaatttgcgggacccgaaggatgaaaagattggtttcattggaggcaccttccgatggactaccggtgataccactgtatctgatgcttccaagaccgctagtgccgcgcctgccaccgcttctgctgcctctacacctcctacatcggactcctccactgtagtagctactctcgagtcgaccgctgctgagaacgagctcgttcgattcgagctgacggatctgtcattcgtcttcccaaccgggcagcttaccgtcatcactggatcaacgggtgcgggcaagagtgcgctgttgtacgcactattgggtgagatggagatcatcaagggaaacgtacttcttccgaaggatactgcgaccgtcgacaagtacgggcttacaaactcagtcagctatgctggacaaacagcgtggctgcaaaatatgtcgattaaggacaacattctctttggctcaccgctggatgagaaacggtacgccgacgtcgtccaagcgtgctgcctagtacccgatctaaaaatgctagaggacggagacagtactgagattggagcaaaaggtgtcagtctctcaggtgggcagaaagctcgtgttgcactcgcacgtgctatctactctcgagccaagcatgtcctactcgatgatcctcttgccgccgtcgactcccatactgctgcctcgctggttactgactgtcttgcaggaccattgtgcgcaaaccgaacggtgatcatcgtgtctcaccatgtcgagctactacttccgatcgccaactcactggtccgcattgtcgatggtaggatcgaagctcaagggacaatcgatgagctccgggcagcaggacatcttgctgcaatcattgcgaccgagaagacggaagtgctagacgaggccgctgtcgtatccgacgccgagaccgcagagaagccaaccgatgcggctgaagtcgatgagaccactaataaaactgccgagccaaagaaggatgcgcggaaaatggttaaagatgaggaacgggaggtcggaaacgtgcagtggaagacctacaaggtttactttgaggctagctcctacaagatttgggcggtcaacatcgctctactcctggttgccgcaaacgcagccatcattgaaaggtggtggatcaaggaatggacgaacgcgtactctgattctcctaagcgacctcactccgaatttgtcgccagtcatcatgtttctgcggtcgatcatccatccgccttcagcaatggttatgaaatccatacatctcagtcttcattctacctaccggccggattgaatatgtctgcatcccaatcaattgcttacggagcgcttacggctttagctcggccgtcggccgacagccatccactctactatctaggcatctactcaatgattactctcgctactgcggcactctctgttctccaggcgactgtcggatactacggagcttatcgggcatcgaaaattctgcacaacgagatgctgaagagcgtagtacggtcgaccacccgatggtttgacacgaccccttccggaagaattgtcaatcgattctccagagatcaagagactatcgacactcagctagcccaatctctcagagttgttgccagttacagcttgagtttggttggagctctcttcttggttgcgagcattgtccctcccttccttcttccagccgctttcctctcttacgcatactggcgactcagtgtagcttacatccgttgtggtcgcgaccttcgaaggatggaagctacagcgcgatccccaatcttcagtggtttctccgagacacttgaaggtgtggtgactattcgagcgttttcaagtgagattcgattcatggaaggcctccaatcccagtttgacaagtcgcagtcgtgcttctacttcatctggatgctgaatcgatggctgctggttcgatttgactgcctgggtggattgtccgtctttgtgacttctctgctggctttgggaaggggagtctctggtggatggggtggaatggcgatcttgagctctcaaggatttgtgcaggctgtttactggctttgtcgtttctggagtcaactggagatggacctcaattctgttgaacgagtcgaggaatatcttcacctgcctcaggagtcccctgctgtcattgagagcaaccgacctcctgcatattggccgagccattcatccgagacgttgatccacgtggaagatcttgttatttcttatgctccggagctgccgtctgttattcatggtatctcatttgacatcaaaccaagagagaaggtaggtctgatcggccggacagggtctggaaaaccgacgctagggatgtcgctcttgagattctctgaacctacgagcggcaagatcgtgatcgatggtatcgacattgcctcgattggcctagaggacctgcggtctcggatcacgataattcctcaagatgctgttctgttctctggtaagggcctgtccatttgatctagtcggagctcatcaagcaccacgattgaggtgatagtaaagactaatatggcctcctttgctatatgtgtgtattttcaaaatgttgtgtttgaacgtatgtaggtaccatccgagaaaacttggatccgttcaaggagcatgacgactcagctctgcttgatgcgctcgagcgggtgcagcttggaaacaccaagtcggttgcgccgagccgagtgccgtctaattcaaacttggtaaaactcggacagggcaaaggaaaggaaggagatgaagaggcagcgaaagccaacagtattgtgtcaaatactgttcgagccaaaattacgctcgataccgaagtcaggtaagcgactacttcatcgcatgttatattaatatcatcctgtgcacagctagctgacccaattctacccactcctgctgttttgacgccgctgcttcagtgcgggcggcgcaaacttctcccagggccaaaggcagctcttggctatgtgccgagtaagtgatcagttcccgatcgatggctgttgacggtgccaacccgtcattcctgacatttacgttgtttatccggttggcttcgtttccgcttcactttttcaggcgctcttgagaaactcgtcgattatcatcatggacgaggcgactgctaggtaagtttctttcaagttcgacaggatgggtcagaagggcccacggctaacgcctctcaccgatcatcggtgttttctttgtttcttcgcttttatcctttcatctattcactatctttagtgtcgactttgagacggatactatccttcaaaagacgatccgggaggagttcaaagattcgtgtctcattactgtcagtcgacttgatgtgcttttatgtgtgtttgtatttgtgatcagtattaacgtacagcctgatgttggtctacttgtctcgtgctgcactatcagattgcccatcggctatcctcagttattgactatgatcgattgtgagttttacttgtttttcgcctcgcctgcgcctctttgctggctttggacaactctcagcgagttgagaaagccattgaactgacagtgagcattgtcttcatatcatacaaacagacttgttctcgatcatggtcacctaaaggagttgtacgtgttttatcttgtctgtcccgcctatactgcttcggcgcgactgtacctaatatcgtcatttgtttgtgtctgtctgtgtatgtgtagtgcatctccgtatgaattactgcagaagcctgcaggcgaggacgcgatcttccgagggatgtgtgagaagagtggtcggttcgatgagctactggctgctgctacggagaaacacgagagggaggagtgataggttgtgtgccttagggcatggtgagagtgacctcaaccgatggcagtcgatacatggccctttagacttgggcgttctcagagcggaaaccatcaagaccccatgggtcatgtatatgttttgtgttaggggcgtgaactgtgtaggtaattatgtcgttataggatgtgtaaccaacacagggaggagcacagaagtgaaagcccaagctcttagactgagactgatgagaacagaggcgcgaggtgatacgagagatagatctcaagtgcagggatagaggacaaagataacagggagtagtatcgagagaactaacaaaggatccaggctcggtagattatgctatagatgggagaggaagcccatcttatatacgaccctcagactccaacgatactgcacagaagaatagatctcagaacgtgccgagaatatttgcgctgaaagactacatgcttgcaagctgatgcattgggagagcaggagaagatgggaagacgaaacgatctaccagtcgtttgttatcaacatgtaacactcaggtcacatccctggccatgatccatagggttttggtgatatgtggtctgagggcacccaagtcgaaaagcgccatgtatcggccaccatcggttgaggtcactcccaccaagcctaaggcttaataggtatcgagattttatatttgaatattcaagtaaagtacacaaggcacataaatttatcctgaaatttgtccaaaacccacccttgtgtatttttttccacagtttgacagaagggccttgctaggagagaatcttcccttccccgtaggatacctcacagcacctctcaagaaaaatggcgagttcttctttgctcatacagtccctcccttctgctcctcttgaatttggacggaccgctctcgaattcgctctctcgactatgctttttcattctggatggaagggagaaaaagggacatgcggatggagaagtcatgacctttttcttttttctcctgatgttttgaagaagaaaaggaacaacgagatgacctatgcgataggaagcttgaaggcgagcaaaggggaaaagagcagccgaaaaggctcgatttttgggtttagagggagcgagggaaacggagacaaagccaaagccaagaaggaagcggtcgttgatcacccatacagatcccataatccttctcaaacgacatgactctgtctttgcggtaacaccctcgaaacttttgatcaggccgattcgctagtcaacctgtctctgtcttgcagtacggggcagagagaagaaaatgtgtcttgtttactcagaataaacaaaaacttaccttttctctacttctctgatttttcaactctcgatggaaaaaataaacagcctaaggagatcagcgacatcaaggagttcctcaccatcgctaggcgaaaggacgctcggtgtaagttctctttctcataccattctcttctgtcagcacaaaggttaatctactcctatggatgttttgccatgtttgatttgtgatcacagccgcccggatcaagaagactgtttcgacctcgcccaacgctaaggccgtcaccaagttcaagatccgatgcgctacctacctctacactctctccatcgctgatcctgagaaggctgagaagcttaagcagtcccttcccccgggtttgtctccttttcgtctttctttgaaccattggatctcaaacaaatctcattcggcacacgcgatgcttatcatacactgtttgattttataattgcccccttctgtcgcgttggaaatgcgtatatgtgttggtcggccatcttggtgtgtgtctgtggttgggaacattcaataggtcttgatgtccaggagatcggcaagaaggctcttcccaagaagaagtaaatagttatgactgtttcactcttcctatgagattaagacccccttcgagcttgttttgcagaaacacgtctctgccatcttctcgtcacccccacatgttccttatatccgttctatggattattttcgccgttcttggtgtcttaattatcttgtcgatcatcgcccgtgcaaaagtgtctttgttaaccttgaggaaaactaatcgtcattgtgtgaaacaagactcgtgccacgtctaatgttcttgctgatgagaagttgcccgtctagactccttccggtcctcgcatcgttcatccgtcttcctgttctcttcttacttgcttgagagttcatgtgagacgctttcctcaagtgaggaagttctggttgagtagctagaccagttgacgtcttgctcaaagacatgtatacatgtgcactggttcactcatacatatacacatcacaagacgagactttgaaaggagagagaaactagaagaagctagtcctgacatgttaattttttcattgattattcttatttcgttttgaggaagggtagaaaaggcccaaatggggccctgacaattaagctagaggatgccatggtggacctggaatgtcctgtctaggaacgaacggtggttgttggacagcagcagcaggagcaagagggatttgaccggctgcttgttgagcttgttgagctacctctctttcttgtgcttgctgccttgtccatcgactgtttgtttgttcgtcgagatttgttcaaggggatcacacaggagagccattagatggatgagtactcgtcagaaatgtttcgtggcctctgtgacaagttagagagcttggcatgaagaataagagagagaacgtacgcccggagccaggcaaagaatccgacaaggaagcaaagtacgacgaggaggattgtctgttcatttggcccagattatttgaaagctttagtatacgataacgttcggttttctctttcccttggcctttattacgagggaaagaaggaaagaggacgaggaagaataagagaaaacagtcgcacctcgaaccagacttcttcatcgtcttcgacatgttccccgttgggtcgtctctgtcgatgacccatcgcagtccagtcgccttcatcaaagtattcatccgtggcaccatactcatctgtcgcaccccattcactttcggctccgcccggtccatccccttcggcacccgcaccggcggcagcagcggcgtctagctggtctacaagatctgtccatctctgagcgatcgcttcccctatcgatttgatcgaccaagaccctgctccacttcctcctcctccttctcctgctccttcagagcccgtcgtagaggaagctttctttgattcgaccgaactccatgggaagatacctttctcaggcccaccactcaagagtgaccaaagtgatctcacatacagacgagagagagcgaggtgtacagggaaggaagcttcgacgtttgtctcgagcgcaagatcatagtttcgtttggccagatgccaatcctttttaaaacaaaaatagaacaactcgttagtataaagatagaagagcgattgaaagacatgatgggaaacgaacctttggaactcctaacccgttctcgtacatatgtcccaagttaaaaaacgccagagcagaatcttgccgttcggccgctgaacgaacacaaggagatatccaattggaagtatacataaatgggacaagagtcaactgtcaataccatcatattaaactggaagagtagattcaaaatgcatgtgaaagaagtgacgaaccagcctgatagtagccggctgctttctcatattgaggctcgcccgagccatccaagcctttataaaagtaatctccgacctgaaagacgtacgtcaacccgagaatgaaacgatcgtgtttgttaagctaggtcggcaaacaggaaggcgaaaggagtgaaagtctctcgttcttaccttgatgagcgaatcaatctcgccttgagcggcggaccgagtccattggtcgagtgccagttttgctgtcacgttattcgctccgaaggacctccaggggagactgtacagtggaggatctgattttgacgccacgaacaatgcggatgagaacagaaggttggcccaggatcagtgagacaggatcgatcatctgatagagaaagaaaagaaaacgcgaaacgaaccttgatcgagtagataggctagattgttctgagcgctctcataccctcgctcggctgccatccaccatcccaagaactatacataaggcagatagagatagagacttgtcagagaataaagtacatgtgtgggcttcgcgtctgagaaaaccagaagaaagcagacgacaacgaaccgccttgtcggtctctcctctttcccaggcctgatcggcagtgccaacgacattatccttccaacaacctcgttcgaccacaagcttcaggtgggttactgccggaccacaagtctctggccgaaggtttgcttcaacctgcgctttagcactagaagcgtacatcgagcctaggtggtagtaaccctcgaacggggagcccgctcggagagccaattggaggtattttgtggccatgttaggatctccttaaaccatcgatgaaagtttgtgaaaagggaagagtgcaaacgtagttgagttaaattgagggaaatagaggttctgagaggtgaaaagaaagtaccgaccggcaagcagtttggcaaggttgatctgagcctctgcatggtctagggctgatgccgcttcaaaatgagcctttgcttttgccaaatctcgttttactccaagtccatcgcggtagatgattcctaatccgttgtagcattctcgttcgcccttgtaagagaggcaagggagatgaccgggtcaatcactctgatccgcgtttgcgacgaacagaggagaacgtctgagaaatagactcacatagcttgccccacgatcaaaccagagtttcgcctttacatagtcaggcttgcccttcccgccttctcctcggagattcatcctgccgaggaagccggctgcatacgcagccgattcaatggtgacatggtcgaattccatctccttaccattttttgcccgtcgtttgatgatcccgctctgttcagagggccagattggataggctgctttgagaaagtaagaggtcgcgagatcgaacgattgggcgattcggcctgcgccttctgcacccgaggcatgacctccgggagccgtgctgtaatgatgtatgtgagcgaaccagaaaagacagaattgaagtgagcacgcgaaagagagatgatcgagaaggataagggtcgacatactatatggaacccatgtagtaaaacttccctagcttcagagaatatgagtgcgagccacgctcagagtgatactgtcgttgagatgaggtgcacacaagaacgttggcaaaaggatcacttgacagaggaaacgatgcgtagctctaggagactcactttgtaataatccaagatgtcatcccatgtttctcctccacttcgagcgataccagccctgatggcagctttttttatgttaactccggtgctctaagtgtcggccaagaagaagggtgggtaagtttgagatcgtttagacagagttttaggagaatatagagaacgcataggtggacagatgagagagaatgtagagaacgtacagcccagctcgcccccaggccataagctcctccagcgagatcggagagccgagtaggcgtaatgggaagagtgcgaccacctttggggccggtcaaaaagtgactgtacactgagagagagccaaagcctacatgtcagcagggcgcacaaagaaggtaagaaattttaaacagaaagaccaagacgaactttgttcggcagcactctcgtaccagccaagagccatcatgcagtcctctttaacgccaattccagcccagtatttgtaggccaaagactgttctgcacctgggtgattctgaagtgctgcgaaagagtagtagagcaaagcctaagtgaggggaatgatgtgcatttgaggaaatgcgagagagagaagaaataaaaacgaaagaggagaaaactcttgggattagaaacatcgtacgccgatagatgaggataatgcggatttagaagaagacgacgagaccggacgcactttaccctggtcaataggaacaacgtctccgtatcctgtggaatggaagaatcctagcatgtattgcgcggttgagtttccagtaagacgagcatgctcctagattttttcgattgaatacacgccgagtgttatcttctcaagaaatcagaaaaaagaagagagaaggacaaccgaacgtaccgagaacgcgtggtacgcgagcttgaggttctgtctcataggggctggaggaaactgagatgaaagaggagacagtgtcatgcttagtgtgagaaacagtccaacaagagtctttgactgaacgaaccatggcgatatgacccctggttccccaagcgtcgggacagcctccgctgagggctttatcgagctgagtgaggatctctcttgatttctcgagaatgtccgtctcaagtctgcctagtttacctgcctgcttggtttcctttccaccagccggtagcctagtctcatatccttccttccagaagcgctgtctgagggcgtgaacgagctgatggatgcgagagggtcgggaagcagggtctgggttggcggtcgagagcatcatgaatgtctgtggcgggatgagggatcgaggtggattggtgggtagactggccagcagttcgagtgctcgtgtgagatggttacatgctgtgtgagtaaagcagatagataggtgggcagaagaagacaaataagacggaggtgcccagtgttaatcgaagtgtgtgtgtgtgtgtgtgtgtgagggagagacgcgcgcgcgcgcctgtctatcttacctttggcaatgtctacctcggatggaggttctttcggtatcgactgttgggccgaatggtctagttcgagttctgttcctgaagatggaagtgtgtttgtctgatggtggtgtccatttgatggtgtatcagtatcgagcgtgatgactgtctgtggaatctctcgatcatttgcccaagcgaccgagaggaggacacacaggcagagtgcaagtctgatcctgctcttccttttgttcattctgaagagagaagtgagtgggaaaccgaaagagagatggaagaagaagaagaagaaagactgagaggattgacaagaaagaaggcagacgctcgctttctctctcacacagagatctacacacgcacacacggagtttccttctgatggaactgattacgtggcgagatggaaaaacagggcaagggacaggaaccggtaagatcaactgcggatgagtgtaacgttgtaaccagggtgtagggctggtgagtacataaccctaacaaggagagagggaagcttagctaagccgggcggtgtgtcgttccgctttgacattctcactggagttctgacgactgggtcttttaggtaaccgtcggaaggataccatgggtaaccggggttgagtgtctggcgagagacagcaagcagagaaaaaaatattgttccgttggttccatcgagggactcttctgactgattgactgatttctcttcttcttgcctttgctcttgcccgtgttgttctttctttttccttcttcttcatcatcgtcttcatcatcttcatcatcctctctttttttcccgttcgacacaacacacacacactctcttcgcgtatcatacccgtctactcacacgtatcgatcgcattgctcacatcgctcacgccgcttgatacaccgctcatcacattcacctaagaaccgtctaagcgtgcttcctcctgatctgttcattgttcctcctcctgtctctctttcttggaaacgacacacccgatggaggactctccccagccttctccggccgccgtgccgaccggcaagatatttacctgtcactattgtgagcctccgcacgtgttttcaaaggagggcgaacgaaaggtgcgctcggaccccctctctttctcaacgcccagccaggcacacaggcacacaagcattcaggaacagacacacaaaactgactgactatcatctcttcccaggttcaccatcgaatcacccaccaggcctccagtatgatcaaccacccggtcaccggcgagtgtaagtatctctggtcttcttggacgggaacggttactcagatacctgggctcatcttcttcctctcttccgtattcttagcctacgaatgctttcgagacccgacgagcgggacgtttagttgtccacggtgcataagccatgcggatagagacccggtcagactgaaacgacacgtactctcttgtctgagtaaatggccagaaaagtcgtatacctgtgaagattgtgacgactcgatcgagtatcctactatcattcatctcaaggtaaatccttgtttttgttctcatcttgcgttgctcttaccctcgtcataattcaatggttgacctggttttgtttgctcctgctctggtcactcttcttaggaccatcatcgagtcgtccatcaggagacaacgccaatcaatcatccctccggacaaggtcagtcactttcttttctctccctttcctcggcccatcctctgtgaccatcatctcacccctgtagactctcttacgaacgaacagtcctcgatgtcccccggtcacctggttctcacacgttcacttgtccccggtgcgtaggattttcacacaaagacccggacaggctcacctggcactgcactacttcatgtacctcggtcttccccccgctctcggcctatccgcccacattcttcaaaggctacgcctcacacgcacctacctctccaggcgcccaatcggatcctgaaccgacgttcgtcgccgctaccctgcccgtgtccgctagtccgcttcctagaataggctccttctccgcagacggttccccggttgcttccgccaacggcggatcggtattgatcaaatatcgtcagaaacggttctactgtagactgtgcactcctcaggtctcattcgataacgcggatacaaaagaggctcacgtccaggcccttcacccggacgtcaagaagaagaaaagacggccgaccgaaacttggagcgttgccggtggtgggtccggactcaggaacgagatcggtgaggacgaaccggagggcgagccggatggacaggaagaagagacacaagagccagccgtcaaaagaaggatcaagccgagaaagagcagggcaaaaccgaagaatcttgatctcgaaggtgcacaccccaccggtctttcattcgatagtcctggtggacccgatcaaggccttctcagtccaggaggcatcatgttccatcagtctcctgctcccggctcaaatcaggcgaatcaattctatccacacgccggctggccctcagcctatcttccaccacctcctcgccctggggcaggaccccactcgacctcaacctctccctcgctctcggccacgtcaacatcttacccaggtcaatcgatcattcaatctcagccaaatcggctgttcggacagattccgtcttttgatgcattccgtgcccagtacccggcgcagcagcaacagcagtactatcagcaacaccaagagcagcagttgtaccagcagatgctacagcaacaacaacatcagcaacaacagcagcaacaaccaccttctcggtctacctccacgcccggtccaactagtcaaccaaaaattccacctcgacagccctcaccgaaacttccaacgcccccacctgatgacagaccaagctgtccgttctgcatcgtctatccgtccgtccggtttgactcgccggacgagcaggctgagcacgaaaaacgcctacatcgctggcctctaaagaggaagcgagcgatcttggatctagtccatgtccggatcacccggccgtgggcggcctcccagctggagaaaaatcaccaagaatcaaacgaagcaacgggcgaggacaagaccaagactgacgggaagaacgatgagcgggatgaaaaagagagagagcaagagcagctacataaagataagcagacagaccaggatgaggacggcgagaaggaagagaaaggtcgatgggaatgcacagaatgtatccctcacatcaacttccagactgaaagcacaaaggaattccatcggagagtctcccacttgaccactgttgatgtcatccttccaaccggagagtctgtccaggttgtccggtccgccgtccgaggtgggttcccttgtccagtgtgtaacccggaagaagaaccgacagaggaaccgtcgatagaggagatacagcatacgccagagacggatgggaatgttgataaggacgtaagtgatgatgtcggcaaggatacgaacgaggacaagatggacgtagaagtagacacagttactaccgagaaggaagaaaaggacgagaaggatgagaatgacgagaaggacaaggaaggcaaggaggataaagagagcaaggaggatgaagaaagcaaggaggacagagaggataaggaagacaaggaggacaaaaaggaaaaagaggagggcaaggaagaggaaggagaagaaaagaagaagaccggatacgtatcttgggatccagagcgactcaaagcccatctaaaggaatgtacgctagtacgagaaccatcgccggccggatcacctctccccaaccagtctatccttacatcacttccctctccaaaaaacaacgacgatgcagctgccgccgcccccgtcgtcgaaaactccatcaccaaaccaccttcggatccaaaggagccagccgagcatatacccgtccctacatctcttgaaaccacggccgagaccggatttgttcgatcggttacccaggatctcccttctcattcatcccctctcaagctgatcgagaaaaatctgatgtcgaccgaatcaaggctaagcatgtcgcctcctcttacatcggccgtcccggcctctgcctccacctccgtctcgaccgaacatcagcccgtgcaagccaacgggcaactagaatcgtcccctgatggacaaaaagctattggtgggacggaaccatctagacgaccgctatcaacctcaacttcaaaatactcactttcgagtttgttgaacaactaagaatgaaaaacgggttgacgtgccattaggatgaatgttgaatttgttcttgtttcttacaatcttctggtctctttgcctttcttttttcttttttcttcgttcttgaccaacatgaccgttcgtttttaatctcaatttcaaacaagaatttgcctttcctgccttctgtcttccatcatttcctcattctaaaaaatatctttcttgacgggttgttgcttctcagagaaatcttgtcttttctcacctggatctatcatgttgtatctttttttattatggacatcgtttcttattaaacagtcgtaaatctatatgtatgcacgcatcgcatcacgttttactgtttcctcttacatgaaaaaaagaaggagcaaatgagaagagaaaatagtaaagaggatccaaatctactcatcctcttcttcctcctgattgacggtcggcaaattcacagcctgccagagtatgaccagatcgagcaagaatctcaggacatcgctcattctgagagggttcgtctcttggaatttaccgaatacagaatggaagaccgttggcgtccacaagactatgaagaggaccaagagcgtcataagaaacaacgacaaccggaagcaggaatagcgaaccaaattagaaagagagagagagagggggaacaagagagacatatcaacgtacgaacggtgcccactacttgagtccatgcaagagccggaaacgaccctgcgaacgttcccaacctccaattcagcaaagcctgcgccgacaccgccattatcgataacgacgtcctgagagacgctccgtattccaacagccgaagctttgttgaccaggtagagaccgtgtggaagaagacggaagatccgtgacgatcataatagctaggagggacctgaaggtaccttgggctaatgtgataggtgagtccaggtaggtatgttaggatgatcgtaaggatgactacaagctaaagcggaggtcagaattagtgatcttctcgtatgacatccctagtgttgagccgatgaccgtgcaagaataaaaaaagggacataccacgcttctttgaacccacgtaagcttttggtctgctctcctgctcgtcctctccgagtgtgttcgcccaaatctttcaagtcccacagggattgagccactccggccgttccatctgaagccgatgccccaccaaagacaagcccatcgccagatggaaacaatgttgatcacctgtactgtggccaacatccatgcagagctgtcataatgataccgatgtcggtgataagagatcgcttcgtacagactactgaaacacaggtaaaggatggtcgatcgaagactgaggcctgtgcttaatgatcgggaaagagataatacatctggaggatgcacccgagggggtattggatcaagccgccgataatgaagaagacggagcgaaggacgggtcgtttagagtacgtatggctgttcccaaagatagcatctaggggtggtgaatgcgaacgcataacagatagacagacagttggtcagagaacttctgagaccagaaagatgagaaccgaattctttgacatcaaaggaagaaagaaaatcctacttatgaaatccatcatctgcagtgtgagggcctccgaataaccgtcgcccccaaatgggttgtatggtatataacgatcaagccatctagaattgtccttgttgatcttatcgacagcaattatcttcgattttgatgagagatcaaaggtaatgtgccagggaacgatgaacggatctataaggacgtcggagcgaaggataaatgagaggttgatgagcgcgcagaagtcagaagagtggattcgtcctctttctgtccctgactactgcttaccagcttgggtgttggaggacttatcgatacgaggcaaggggatccaatcctcagatccagctgcatggtcacctatgaaagaggttacatttcgagggagagaacgagagtgtttaaggaatagaagggtcatcatggtgtcgaccaaacctatacctccaaatgagaagaacacgttgaaaagaatacgtacgtagagtcatatagggtccgtagaaagatgtttcttcagacctgtgagaccattgttcttcagtaggtccacgagaactgctcctgtcaaagtgctggatgattagagaccgataatgacctatgcccctgaaaggaacgtggcggaggtcgatccacgtgttgaggtggtctgtctgaaatgtcgtcttcataaggaaaccacaagtcaaaccgacaaaaggatccaaaagtcaaagatagtgagcgcccatatgtcttacactttgaactcttatgacgcaaaccacaataagggatgaccaacatgtctaaaattcacatcacgtcgctttctatcatattcgacacgatcatactttggtgtttccttaaccatagaaagccagctcctggatttgatcttgaggttggcatcccgcttgtaagctataaaatggctttcatgcatagcattttccatctcttcggtttggccaggctgggaatcgacttcatcaaaccagttcgaccggtcccagacaacccgttcatcgatgacgggccgcaaggcgaactctttaacagccccagaatcataaaaggcattgagcgaccgtgaagcattctccagacgtaagttatcttgaggtgggccaaggataggatccatagggcgagcgaggtgttgaataccatttttagtcagtgaggcggggttcggcgtataaaaagaggggcgccatggtacgaattccaccatctccactcgaggtgggttgggagagttcaagataggatcgggatcagatggaacaatgacgaaggtgttaacgatttcgggaaagaaggtatggggctcgtaaaatcgagatctatctttccagcaggacggagtaggggaggtcaggagttgaactcaggaagacaaaggagatacgggcaagagtcaatcaaactgacagaacatccaaagggatgggcaagtcgatcgtctttgtgaagatcgtgtcggtggagttgaggctaattcgagaaaagacggcctggctatagagtggttgccaatcttcgaagctccatgtctctggagggaaatccacatagaggtcactatcgttgatactcggaaactttttttccaaatctgataaaaacgctggctacgacatcaaactcaggaatattctcgccatagtagctagccacggcatcataagggtaggacgttgtagtttcccaatgagggtcaaaggccagacgccagaaatacctagccaccgagaagacaaggcagatagctccaccagagatgccgaggataaccagaatggcaatcagaatgagaagacgacgacgagtcagaacgggtttcctacgtgttcggagggacaggcggtcgtcggctgaatccaagatggaatctgtagacgcatgctctcggttgagaggggtgagcaagtgtttctccatgatggaggatgatgttgaaggaacgaaggcatcattctcatcttgtttgacttgtcgttgactctcacttgtccttggcaagatgatcaaacgaacaaggtttggaggtgataggttcaactcggaaaacgagtgatgcgcgaaaatttactgcgctttcgcccgtaatgggtccggtcttccggtcaaacgttcaagtttcacccgacctaatcttccgtagatgtgttgtgtcgataacagaagaaacaaccaacaggacatagtgtaaaggatgtcgatgtaattgatgaaccaactatggggtgcatttaatatgaataaggaaagtgcggcgaacgtaagtgttcatcacaaacggagcgtcacaagattaaacaagacaaagaagcagagacaaaaagaagtagatggagaggaaataaggatgtattgagagacagaagagaggtcacatatgcaagtaataataaaaaagttctgggattcggtctcttttatgggcgtgccagaattttaatcctcgtagataagcttgaagacaacgttggtaagaacagagactgtacgtagaacgcaaacacgagcgcgcgcgaaacaagcattggtggaagaggcgagcaaaaggagaaaggtaagtgatcaaccttccgagaggcataactatcagcaaacagacatacggatgagcacgatgcaaaggattgtctgttgaatgggtggaattgaggttgaaacgcgtcgagtcaagagagatcagtttagtatcagtcttgtagatctgactgggtccaaaggaaaaaaccacacgaaccggtccgacccggtcatcgtaggcctgagccttctttcggatggcctgagctcgctggtgatacctgaagagagcgtaggtcatcatggccatagcttttggaaagaaagtgtttaaaaagagtttgagtatatgactacaagtgaagctgtctattttggtcgtttgattaaacgaaagaagaggcattaccaataagggtgtagatagctccaaagattttcgaaagctgcaagcgtcagatttgagtagcatgcggttcagcttcaagcccaagaacgttcacgcatgaatcatcaagaaagcggaccttgtctccaaagttgagcaatccaacggccaaacctccgaggacgaccgagaagtgcatcctaatcacagtcggaattgaaagagaacgttcagaaaaagaaaggagaacaaggctgccatagccgctctaggttgtagaaccagaaacagagcggcgagataagaaagaccggtcgtaccaactcaggtacgttcgctcgttagcgaagtagacctagtacgttcgaatccagtcgatcaacaaagaggcggacgagatcagcacaaaggcgaaggaaagaaacgaaaaaagaggggaaagtgagaaaaaagaaagaagaacaccgaaaataggtcaactggtctgaaagttcacggaaacaccaaccttgggttcctgtcggacgggaagagcgattcgcttagccgccgttcgctgaagtaaaggctgggtggacatcttgttctaatacctgtctgcggatagtgttcaggaagagagacgaaagaacctaagagataggagagtagggatatgggtggatggaaggttgaggagagatgcaaaaaaaccagtctgctcagttcattatgttctctctacctttgaaaaaatccgaaaacgtcaggctgccgccagccgagagggaagcgaagtatagcgatcggcgggcagaggagaaggtgagccacccacgttcgtcgaacaattacgtaactagtcacgtgctagggtctcacatatatgaggtcgatcacactcggggtttttgatatctatttttgataacttaaacaaacctttgcacgcgtaacccaccgaattctggtaaccattcagggcaatgacctttcctgccaacgccagactagttctgtgccttcatcgtcattccctccaccaacaccatcacgaccacgaccacgaccaccgacaatgccgccactgtcagtaaccgatctgctggcaaaacagaaggcagaaaaggaagcagcttccagagtgagttgtccaaatagtcacgtcgttcttctgtcagaccatctcgttgacctcttcttctgtcgtgatccgttacagccaaagtttctgacgaaagcagaacgagcggcgatcgctctagagaaacgagcaaaggaaatagaggatcaaaaatccgtgtccgatcgagctaggaaagaaagagaagagcttgaacaaagaatagaagaagagagaaggagaaacgcgccgtctgactaccgtggatcagactatggatcagccggggggagatatggagcacggggaggagcaggagcaaacgggcacaatggcaacagcagaggaagctacagcggaggtcagtcctatagctatcatacttctatcagattgcgtagccagactcatgcgaaacattgttggcatacaggtcacaacgagagataccaggacagggaccgagaagggtcttcattcatgggtcccccacctgttccatccggtccgagaggcttggcaccctctggtccgcgttccaattcgtcctacgcgccacctaccggtcccaaatcctccaaatccattcctccatcgagcactccctcacaagtgcaagacatcgacccggcaattgatctagagtcaatcaaggcgcgctacctcggtatcccgactgaggcgagcaagaagcgaaaggctagaaagattagcgacaagaagtttgtgtttgattgggaccaggaagaggatatcgcgttagacacagcagaattcggaggaggcggagtcatgctcggtgggtcagttgcaggaatagcaagtggaggttggggacgagccccagaaggttccgcggagggaaagcccggcaaaggaccagatcagtacgttgatcctctcatctgtggatgcaaacacaaaggaagaagaagcgccaagctaatttctgttctttgtttttctcaacttctaggtttgctgacgcattggagcgaagatctgcattgaaatctggtggggacgacagacactggacagataagtcgttggaagagatgaaggatcgagattggcgtatctttagagaagacttcagcattgctgccagaggtatgttcataggtttcatctctaatacacctagacgctgcacgtaagctactgacatgtcttcggcgtctttctttctttcccttatcaaggtggatcaatccctcttcccatgcgaaactgggccgaatccaacatccctcctcaaattttggacgttatccaacaagttggctatgttgaacctagtccaattcaaagacaggctattcctatcggtttgcagaatagggatttaatcggaattgccgagacaggtttgttgaccttctttcttaggttgataaaatatcgggttccctcttgcatactaactctttcttctctgtttttcttaatctacaggatccggaaagacagcggcgtttgtgattcctatgttgacctatattggtcgactgcctcctctatctgaccagaatcgacatatgggaccatacgcaatgatccttgcgcccacgcgagaactggcccaacagatcgaggttgaaaccaagaagtttgctgccccaatgggttacacttgtgtgtccattgtcggaggtcgatcggtcgacgaacagcagtataaccttcgagatggagcagagatcatcatcgccacgcccggtcgattgaaagatgtgatcgactctcacgtgcttgttttatcccagtgttcgtatgtcgtaatggacgaagccgacagaatggtcgatcttggattcgaagaacagttgacgttcattctagagagattaccggcggcgaacgtcaagccagaaggtgtcgatgttgccgatctaatggggaccagagaggatggtcagccctggagggtgaccacgttgttctcagctaccatgccgccgcctgtcgagagattgacgaggaaatatttgaggaaaccggcggttgtcacgatcggtgtggctggtcaggtccgtgctttgttctcctcatctctattgttgtcagctctcgccggaggaacttactaactcttggttcatctttgtgcttataacacgaatttcaacaggctgtcgatacagtcgaacaacgtgtggagtttgttcagggagacgagaagaaaaagtcagcacttttttacttttcaagcttccctggcgctttgctctggtatgcgcctgtgatattatgcttactatacactgttgcttgaaccatcagacaacgaatgatccaaattctccgaacggtcggcttgccgccacctatgatcatcttctgcaatcagaagaagacggcggatatggtcctcaaggatattcagcgagcaggggttcgtattcatttcccgagccctgtcttcttctctcatcgaaatcatctctcacacgaggctttactgactcaccttttctctttatttgattctagttttcggctacgacacttcattcaggcaaaaaccaggagcaacgagaagctgctttgcaaagtctcagggatggaacgcacgatattctcatcgcgaccgatttggtatgtgtattttgttctttgtttatgttcaatggacccgcacgactcatgacttacactgtcgcttaattttctgggtttcgtcacataggctggacgaggtatcgatgttcctgatgtctctctcgtcatcaactggcagatgtcaaatacgatcgaggcttacgttcatcgaattggttcgttcttttctttcgtattcatacctgcttttaaatttagcctgcggccagacgagagcgttttttcctaacgaattttctcttctctttttaaattccatcttttatcaggacgaaccggtcgagctggaaagacaggtcttgcaatcacgttcttgggtcacgaagatgaagaagtcatgtcagtcctaccgtttcttgtttcttttctctttcgagaacgaccaaagttggacaacaaccaaactgacatgactcgtgttggctcgaatcacttcgcgcctttctttgacaggtatgacctcaagaacgagatttccaaatcggagaggagtaagatggaacctgaactcgctcgacacccagccgctcaacaaagaattgtcgctgctgacaagtacaagcggaagcgaactgaggctgaggattaaacgtctcaaatctagtcgattgaatgtatccttccttcatatatgatcctctcgatcgcgatgtatctggtttgatggaaggagaagttatgtggtacacagtctaccccggtggacgagtgacagatgaaacacccatgtggatcttttttggtacacaaacagacaaatagagcaaatgactttgtgacggaataagcaatcgagagggcagagatcgaaacaaaggattttgaataagaggaaagatgtagactatgaaaacacaacgagattggatcattacgacaactgataaacagtattaagtacgaataaagcaggaaggtagacagaaagcgatataggaaagagaggggaaagccacgccggccaaaggatcgaccgggagggaaatacaagagacgtattcagtcgcttaagcagttttggcgagaatcatagccgttcgagatggcgcgtacacctgaagcctgatgatcagaagatcccggaaagataacgaatgaacaaaaagtaaccaggtttagtatttaccatgctaaggttgcgcaggtgaggttttgagaatagatgaatggacggaccagttctttctgttgttccactccatgggtgtagtaaagtgcttggtatccaacgcaattcgatcgaacccgccaaatcgcttctcgtctgaggacaacacaacattatatgtgcctgcttcctcgacaccaactcgatagtccacgaaggattggggtccaaagttgaagatgaagagcaagccggcacgctcgaagacgatcactttgtcctgttggttcttcagagacacgtatgcctataaagaatgtagaagacatttcagacatcagcatattgagtgttgcaatcctggacgctgagacaacagaaatacatacttgaggagcttcaagccatcggtacttgcgctctacattgttcatctctgcatcaaagttgtacaagtatttgtatcgcaacaaatcatcctcaatgagattgaattgtcgacgagcatagtggaaggagtttccgtttccctctcgagggaaatcaagccactagaccatcaaatgaaaaaaagcagacaaaagttagtttaataaatgtagacgttcatatacggagtaacaggccacaaacctctgggtgtccaaactcgtttccttcaaagttaagatatccctctcctcccaaagtatggacgatgagtctgttcggaataacgacaagatggcagattagcttgagtagaaacgcctagtccacgaacgagacgaaccgaatgagcttgtggaatcccaatccacgctcgataacaggagtcatttccgtcaggtctgacatgtgggtgtctggtccaaccaacataacgtgttagatgatcgccaattgtctatgataaacgcagtcaattgaatcgactgcttttgcttaaactactaacacatttctttgtccatcaaccagaaagcgagcgtcttgtcaccgaccaatgcttgatcgtgactctccgcgtacgcaatactcttctctccgtgtcttcggttgatcagcgtgaacacgatgtttccaatatcccactgatcgtcggacttctctttgagcagtttgatccacatatctggcacggccatagcaagtcggtagtcaaacccgactcctccatctgctacaggtacgcaaagcgcgggcatgcctgacacatcctcggcgatggtaattgaggatgggtaaagagatcggatcattgagtttgcctagttcaacagaaaaaatgagatatgctgttggcgtcatcatacttcttttaagccatacgatctgaactcactagcatcatgtagacaacggcttcgtcgtcgacattgggtccgaaatactcatggtatccacctggttaagcaaaagcgcaataaaacatcaggtctattgttcttaacgatgagatggacatgaagggcgactgaccagaaaaacccgttccgattccgtgatgggtatacatcatgctcgtaactccatcaaacctgaacccatcaaactgatactcctccatgtagaatcgaaggtttgagagtaagaatctcagcacttcgtggctaccgtagttgaataatcgcctgcatgaaaggtaagagagatagttgacagagagcaagtcgcatgatcagacatgagctaggccaggtgtcttgctataggagaataaacgagaacgaacgagtcccaaagctcatgctttcctttaggtccagagtgaaagtactgatgatctgtaccatcgaactcattgattctataaggcgtgaagacaatcgcaggacgttacacgaaaggtgctcagcgcgttagcatggatcaagtgacgtcgtactagcctatagctactggtttgaatttactgacccatccaagatatttttgcaagcatgactgtgcaccatatctaacagcacagtgagccccatcccgtgggccgtatcgatcagactcttgagatcttcgggagttccgtatctggatgaaacggagaagaacgaggtaacctggtatccgaatgaagcgtagtaagggtgctccataattgccatcctgatcaaagaagcccgaagatgttggtacattgactatacacaaagaaaagcagcagtctacgaagaggttctcacatttggatagtattgtagcctagagccttgatcctcgggagcatgtccctttcaaactccttgtaggttccaactctaccctcgggagtagagattccgactagaatgggtgacgagcagtacagagtaaagatttagaatatggcgtaaggaaagctggtgcgttacaccagtccagaaagagagtattttaccatgagcctcatagatcttgattcctccattctcagcaattcgcttcatctcggcgacaggtcgtgggtttttgaattggtatttctggggagggttccagaatcgggcatcgtatacaggtgaaacagagagatcttgtgtaacgcgagtgctgtacgaaagatggtacaaatcgtcagaccgaaagtgtttatgagcgcatctttcatagcactgtcgagatattgcttacatccaagcaggcaaccgatctccctcgcctccagacttgaatttgagatgaatctgtacggacgaacgccccgtgacaagcgcaagaacaaagtcaattttgaaacaaagtcttcccaaattcatccggggctccacaaaccttgacttttgaatcatgtgcaatagccggctgtccgccagatgtagcggggattcgaacctcgaacgttccgaatgggtttcgcgtcattgggtgtgaggtcttgtcccaattgtctaaaggaagacaaggaagagtaacatcgagtatcatggtaaatgagtgaccgtcagatagagaagatgacatgaaagacgtactgaagtctccgattaatgaagcctgagaagctccaggagcccattctcggtaaaggatactgttgtccggaagaatttgcagaccctgcgaccaagatataccaagcgcgcattggagtgtttgagattcaaaatctgatgccatcaaaacgaccaatttgtactcaccaatccgttgggaccctcccaacctttggagaacttgtcgattcctccttcgttctcgttgatggtcttgacccaattaagataggtatcgaatcgtttcttgaagaagggggcgaacggttccaggctggtgtttcaacgttagattgaatgaacgatataggtgatgatcagtgttcgagacttaaccgcttctcagatatcgactagaggatcgggagatgagccagggccttactagggatcggtctggacgacggcggttctgaaagtcagaacggcaaacgagatggagatggttatcagcgatgggtggagatgacgacagaaaagagagttactcacccatccgtgggacgcgatgcgacactgctggacatggttgaagggagactgatggatgtgtttctggatgtgttgtatgcggtctctttggaaaacggagaaggagaataaggacaagaaaggagaaaggagagatgagagatgagatgggagatggaagtaagaaggagaaaaggagatggggatttgaacactttccgttctctttaagagttctcagaactcaaacagaaaagagatggagcgtcttttgtgggcagaggggtccgagagcgcgtaccagatttaaattacgtaagcgggatacccgcctaggtaaaagcctcgaaccccggtctctggggaagtcggaggattcagttggtacaccattctgagcattcggatcggagagagtagctttcggtcttggtcgtaattcttctggcccagatgtcttgttacggatcccctttgtattcgacgtcgtcttgttttccgttggtttctgatgcgctgggactcgctcaatcgcattctccgcataatctctctgtgcagtctgatttgaaatcgccatcagcaactctgcacaccacacctcccctacccatgcagtcgatgtcggatgagaaatatcctcctttgacgcatcagtcaagaatcatagtagttggaggtggaggtaccatcgggtcctcgaccgcactccatctggccaggagaggatacgtaaacgtggtcgtgttggacgagttcgagatcccttcggctcagtcggctggatttgatcttaataaggtatatctatcgttccttttcgacgtttttgcacacaataattaacgctgatgccatcattgctgatcattctgcatcgaatcggtcggaggtagattgccggaggagccgttaaagagggatggaggggtcagctcagcggcgagatcatgaaaggatggagagaggacccagtgtttagtccctactaccatgagacaggcagggtaaagtctgttttcacaaagcctaccactctactctgtgttttgatctgtttgtttgaacgccaataggtaacaggtgcgcatagattccccgaaaagatcgcaaagctgagagcggcatacgattcggctaaggccgatgggtatggcaaaaactacgagtggcttgactcgggagaggcgatcgtgtccaagatcccacaacttgccaaaggcaatctcaaggtcaggagtggttttaatttatgagctctacacaaaccttaagtgattcacgtccatactctacattctaaaggattggaaaggactttgggtgcccgactcgggttgggtagcagctaaagataccatctcgtccgtcggtagagagctctctcggctgggtgtccagatgatctttggaccgtgagcaaggatatctattcatcaaatcatctcttccctgctcttatatctagtcaggcccttccgctcttcttattctgacatgtctctctgatagataggtctgggaaattcaaacgacccgtcctctcagcttccggtaaggtctgcgttggagtggagacagctgatgggaccatacacaaagccgacagagtgatcatggcttgtggagcatggactccaagtctgatcgatcttaaaggacaatgcattagtaaagtacgttcagtttaatctttggcttgaaaacagtctcttttttctgatcagaacgaatattcatctcgcgcgctcatagtgttgggtgctagctcatatacagttaacttcagaggaagtgaaatcatttaagaacataccggtgctgtacgatgaccaactaggattcttcatcgagcctgacgaggagactggtctattgaaagtacgtgcatcctcctgtcattgaaggtttcgagtagtcactgacagacctttgctttctcgatgattagctttgcaatgagttttctggatatgtatgtcatcctctaccgataatcactttcctcctcagctctccttttacagatcaggttctcctctctcgttgtgactctgtgtagactcggattcttcattcgcaaactccctttgggacttctcatcctcaagatatatccgttccgcgatcccatgccgtacaccctactggtttgtccactgctcattttcaccttttctaaacactctcagtctgaacttctgcttcttgtactcttcgtacagacactattcctaccgaaggattggatgatattaaatacctcatttctacccttcttcctgacttccaagaccgtcctctcgttggcgccaagatgtgttggtgcacggatacggctgatgccgaatggctctttaccgaagatccaaggtggcgagggttgtttttgactacaggagatagtggacactcgtttcatacgatcccgtacgtagggtctgaagtggcagatttgttggaaggaaaggttcgttcctctttcttctgtacctgtctctttcggtttctcaagacgaggaacgagctcatgaatgacctctctgtttctacccaatttcttactctggataaatagatgtcggctgaaaagcagaaggcctggggctggagaaaacctaccgatccaaacgggaccggtcgtggaggtccaccgcctaaagatctgacagatgtccttgggtggacgaacggagatgacgaggaggaagtatgagtagaaggtttgtattctagcacgggcacaaagttgttgaacttctttccagaataacgcagtgtatgttgtatggttatggatcagtattattctgggttagcttgagaaccaacacgagtcagaagggcaaaaagaaatcttgtgtaaagtaggggtgccgcaacgaaagaaagtttgagaaggaaataccagaagaagcgtctgaaggatgtttgacaaacagatgaactatgtaagaaacgacatcgatgccaatagcagatgcgaaaggacagcaaagcagaggagagacgagacgagacgagacaagacaagacaagacaaaaaaagaagaatcagagtgctatcagatacaacagaggaaagaaataatgaagaaatcctatgaacaccggtcgcatatgaagaaccttgatataaggcgcgcagagaacgagggtagacagaagctgagagaagcaggatgaaaagtaggataatgtgtatatagctacgtttgaccatagggtccaattaaaggaggaagaaagaaagaaattggaatagaatatagagacggagaaagaaagacagagccttaccccctttcagcaacacgcacacaatggtcacataaccacacaacccgaatttttcttctttccccaaccaccacctttcagcttttcaacaacacctccgccaccacctagatgaagatggtctcccgtcaagcccgtggatcctcctcctctaggtcttgcggtcaatgctacggaagctgtcatatcgaatgcttctaccacacctcggttatgtttcgccgagcattctgttgaacacataaaagaagaagaagaagaagaagaggagatataccatgtcagtcagaaagtctcggatctgacattacctggagtaaaaataaacgagaagtcgatagaaagtgacagaaagaccacctacctagatacctagccgcgcggatgcgcttagctacttccaaaccttcatcgtacgtgataacatctccatctgtcttctgaagatatgcctcgtcctctcgcagatcacacttgagggctagtcgggtttgttgtagaccgtggtaatttattagatgggattcgtttccgtagagcatacttcatttgaaagacagggtcagcaaaaggtatagctcaccaacgagaacgatcttgacattcgggcaatgctcagcaacttccggaatccatttcgattcgactggtaggtgatagatataatacaagacgaagttaagacacggatatgaatatatccagagtagagatcatttcacgcactgttttctagtgaaactctagagttgacctgtggatgcattatgtaagagtgatgttcatcgagcagtatgattgagaatctggatgttgaaatggttgagcagtagaatgaaattggaactaagtcttacagcgaagcatgccatgacaatctgtattatattaacaggtccgggtttacgtgatcagattctacgttctcgtgcagcggataagaagatgcgagacaaactcacatgtgtatcagcataacttaggcttctcagcctatcgaattcctcttgacctatagaatgagacagtcgtacaagcactggatcagatcatcgcaagaaagctgaggtgcagagatgcttgaacggatgctcacccgcggtgtcccacaaggataattccatcaatttgccctccactcgaacctcacaaacataattttcgaatctgtgattgaagatcgagaacgaaaaggtcaacttcctactttaacaatgattgttctccgtaaaagacgcgagaaggagctgaaaagagtaagcttacacggtaggttcgtatccggttggaaagtaccctctgctcctaacagtcaacatagatgtcttgcccgtcgcacctatattaatcaacacagaaagcttctgatatgagtcttttggtagccaaatcaaacgccttgtttctggaactaaccatctccgagaacgaccagctttcgatgtatctaagattcgaatgacatgttgattgaaagtctgttagcttgaccaactctgtttgccgatacgtctagctcatcaagaggataaaggaaagacagactggcgatgatgtacaaggagcaaattgggaacgggtagaggatgaagcgaagcaattcatgcctgaactatcggaaggatgatatatgtgttggatggggtggtgaaggtaggtggattgtattcggacgcgtatgaacgcgacttgattgagaaatcagtcacgtccgaaagcgcgcagttcaactacgtcagaaaacttccaagcatttcttgatctcattctccctctcttctcttaattttaactcttttctgtatagagggctcttgatctcgaatgccatcatcggaggctccttatcaagcaatccatcgtacagcacacgcttctgtcccatcacgcctccgcacttccctccgttctcgtctccctacaaggcctactttacttggacttttagcctgtctcttggcactcttagcgatcgtccgctcgtcttacattcaacctttctttgaacacggtcacatgcgtcttccgtggaagaacaacagttcaccgaaccaactaaatctctcaacgcctcctactctatctcctcatccttatcaaagtgggacggcatcagtagtcccaagtcaagtaacaggacgaaggagtgtaggttactttgtgaattggtaagacctccaaggacagttcggttctgcaagtgtagagatttgacaacgatccctgacctgttgagcacctacaaccatgctatccatacttgatcggttctgtggacttaaaggggaatatatgatcgacaatgtaatattgctcaccttcctgcccttgcggtgcgactgtaaagctgacatcaaccctgccatctagatcttccgcaacagctgcctgcagacaaccttactcatatactgtgttagttcctcttattcgatccgatccaaaccatgcaagggagggggtagaacttcaactaataattcattcttataaatcctgtcttttttcaacacagatgcctttgccaacgttcgacccgaaacaggggaggtccacttgactgattcatgggccgacgaacaggtgagactaaactcaacgtcttgatcaatgaaacagagattttacaatcacaatttcgcttgctgtttcaaacttcttttcttccaaagattcattgggaaggtgactcgtgggatgatcaaggaaacaatctatatggatgcctcaagcaactctatctcctcaaaaagagatatcggtacgactcaatcttgacagctcgtttcttaatcgttcctgaatacacaaagctaagcgcatgaatccccaacagccatcttcgagtgatgctatctatcgtacgctctctagttttttttgttcaccctatatgtactacagaatctaaaattcgtttcatgtcataacttttcgaattccagggaggatggagcttttcagctaattttaccaacttgaccaacgcgactcatcgtcaaactttcgctcgaaccgccgttcagctaattgaggattatggattagatggtcttgatatcgacgtgagtatacaccgcttttcgtgatctactgttgtcttcttttgtacgagctgaatcagatcgctgtttgtagtgggagtacccaaagaatgcaacacaagcctccgcttacaccgacttgctccgactgactcgagaagagctggatagacaccaagttagacgggacggaactagagtcacctttgatcttagtgtgagtcttccctcgaagtctgaatttaatatcatattatcccaacggtgctgatatttgttcaagaatgtctatgaacctctcatacacatgttcttcatctaaagatcgcagctccttgtggtccggaacaaatgaaacaattagaagtacgcgcgatggatcaataccttaccttctggaatctgatggtaagctccttcctctgactgtgtgtgcattattcagaatacgtacatgcctatactcagtcatcttgtcgccctgggatctcaatggcgggtatataggcgtatgacttctctggatcatggtctcccgaagtcagccatcagtcccaattgtacggtccctcgaacgaagcttcggcccatgggagcgtatcttggtatctctctcagggaattagatctgacaagattgttcttggtgagccaaacaataagaaataattgagcttttcgcaagctacagaagacacgtttattaacttggaatatgaataggtatgcctctgtatggaagatcgtttgccaacaccactgggttaggagccaacttttcaggagtggctccaggtacctgggaagcagtacgtccatatagcttctacattatcgttgtctcggttttctgtcttccttcttgccccgttggttcagaaaagcttatttgtttcatggatatgtagggaatgtatgattacagagctctacctagaccaggcgctatcgtcggtgaagacataagcagaggagctagttggacatacgacccgttcgtatttctctacactctaacgtcactcctgacttgattttgaccgcctaaatgaattttgatttgttacttgtgctctctccatcttttctttcaccgagatagatctttgagagagtttgtctcgtacgatacaccgaatgtagccgccatcaaggcacgatatgttcgagaccagaaccttggcggactgatgtggtgggagatggacgctgatcttcggcccgaagatcaactggcagcgcacgctctggtaccactcgccactcgagagatgggcgggattggaaaggaagaatggaactgtctggattatggcagcagcaagtgggacaatctgaagcttggtaggatatagataagcggttagaaagacgatcgaaagggaatatttcattgagacgacgatgacgtctttccgacgagctttgcttatatcttgaagaactgactcgtagtcatcaatctcaattgaaaagtttcgtaaacacgacacagtgataaatcggaaggaagcgatgaaaggtacacaaggaagccattagaaagagaaaggacatttctatcgtcgtctcctcttcttcttcccctccgcatctgctccttttccattggactgtgcagatccagccttgcgcttgacagacgcgacaaggctctcaagctcggtatccttgttggatgagctgaccggtttggaggcagccccaggaacagtctctgaggggacttgcgtggctcgaaggttgttacgctcctcaagaagcttggacattgccttagtcttcttgaacctaaacagcgagaataggataaaatatagagttgttagtgaatgtacatggcttgacaagggctatgaaaaagacaaaagaagagagaggacaaggaaaaaaaaacatactggggatggctagggtcaatagcaaatcggtggtcaacgttcaatttgttgaatcgctcatccttgacgttgatctcgaatccggtgtctcccaactccttgtccttctctctcatttctgcagtctttgtcttcttgtggggtgcacgcttacgcttcatgccggccccagcgttc

SEQ ID NO: 2740 - DNA, 16473 bp, Xanthophyllomyces dendrorhous
cttacgcttcttgccggccccagcgttcttctcctccttgataatatcggtcatggagaagtgctttgagtcgtcgattgcaagcgggttggttgagggcgtaggaagtgtcaataggtccagatgagcagcagtcgtttcagtcggctgatcgtcctcagtcgatcgggtagacggcttcttcccattcttcttgtctccctttgaagccttcttaggagcttcttcttcatcactggatcctccgaagaattcatcctccgactccttgtcctcatcctcctttgaaccgccattcttctccgcacgcgccttctctcgcttttccttctcagcctttcttcggtctcgcattttccgcttgtaggcttcgagcgaggtctcgttagggtcaatctccgcgcttgtcctttctgacagtccaggagcgaaggttatttccattcctcctgcaccctttccttcctcgtcatcatcgctcgctcccccgaatccatcggcggtatctcgatcgagagagccaatgttaccaagcaggagttgtcgaaggttcgacctagcgtcctcatcctcggattcagaatccgaagcaaggaaggctgagaagtcttgctcgtcaatttcttttcgagagagcttccgtctggtcaccgccactctcgacggcgcgtcgtcgtcccaagtgagcttgacggaggagtttcgaagagcctatggtggcagtgacgggtcaaaagaagaaaaagtcaacggaggacctggagactatatgaagtgaatggaactaatagcctacgtcagtaacaaagtccaaacccttgtagatcttgggatcttcattggcctcgtctctatcgaaatcgacgcagaggtagaacagaaatatcaaaacataatacgatcagtttcagccatcaagcgcgagacttaaaaaaagagtacacataggaaaacataccgtggctcatcatcgaaagtcatctcgtccggaacatatctcaaatcaaggatgttggctgtcctctcgaactctgttccgtcacattcagaatgaatgtatccagcggcatcaggagacgagaaggtggcgaccgcataataatatctgcatacatcaaacatttaatgcattcggtattcaatagaatcgccacagcgcagagaaaaaatatgaaggcttaccgaagtctctccaattgatagctcctgagcttgtcttgatcaacatcctccccctcatcttcctctacgagggaggatgcatcatcaaactcttgatcatcctctaactcgtctacttcttcttcgtctgaaacctcaagatcgccttctccatcaacgctctccgtatccgcaccctcttcgtcaacaccatcatcttccatgctctccatatcctccatttcttccatctcatcctcaataacttccctcttcttagacttaaactttctcttgttactcataaacaactctggcggcggtccctcaattgcctctcgctccattctctcctttccaaactcggatggatacaccttgacgtctacaatcttgcccctcgcggtatttccatccctgccagccaggacagaggagaagaccttgtaaagatcggtggcgtgaacgtgatcccaatccaagttgaccactgctagtcggttcgtcttctccgttgtcgttggctctgcgttttcatattcttcctcctcttgagcgtatttagccgcctgagcctcgagccgagcgagagctgcaggatccgtctcgtcttcatcctcattcaggtcgacttctaagtcagaagatgacattgagtctgatctcttcttttttggtttggatcgaccggctccaagctctacaaacgcctcttcttcctcttcttcttcgtcatccgaggaagcatcagaatcttcgtcgccagaggattcgagaagaccttctcctcgggcataatcgatgaagggagcatcagaaccggacggcacaccagcctcagacttctcctcgagtttatcgtcctggcctaatcggtagaactttcgaagttgatctcggttgtgcgtcgcagtaacctttcgaccgtacttatcggttttggctagtgagtatgattgagtaaaaaagtcaagcccccatatgtcaactttcatatagctcaagtcatgccaaatgaaacaacatagaagcaaccgccaacattatcttccacgcctgctattaattttactcacctttatctcctttaccaccgaccttcccgtcgtcaagtattgacttgaatctgtcgtccaattcaaccttgagcttgctctgcttcggtttcctgaatcttggatccgactgaaccgaggcaaatcgagcatccttaggggccatgttgcacttgtgattgataccgtgtgttctttgtgttattggtgatgttataatgaaagagagggacagaaggtttgaaaagcagaggatttctttgagtggtttgctggattgagcgtagaacgagtataagaaattggtttggttgaaattgtggtggtaaacacagcctggcaatatcacgtgtcatgtcaattattttcctggtcaaggacctgattagattatggtctttgttatatcagcctttgaccaagcttagcttggtttcttgggtatgtcttgataagaccaaatttggtctgacggtgtacgccctctgagactcctagttgaggcatctttgaaagtcatgtctatagcgaggttggacactccctccatccaaagctagtcatcatggcgttgtggattgagatcccacaagaccaaatacgatttctcccccgacgtcactgctgttgtcccagaactgaagctcagatgattgacgtctgatacggaagaggcgccctgtggctggttgaactacgtttcgttgtatgtgtgatctgtatagtttgctatttggattagatactttcttaattgttgactttcttctccaagcattgctttatttctgtttcatcttatctttcctctctatccatctactttttccattcagtatggacgcatctctatatactcacacgaaatatggatataactgatatgcaggagagtagacgatcgctatgacttctttccgttgaagatcgacgagctcgtgtgaaaacgcttgaaaattatcatacacatgggcaacaaaagtgcgaacaaagtctggatgcggacacacacttgcgagggggctggttgaatccttcctcttcagaggagattgtccgcttagggaagagaaaaaccgatcaagaggaaaacaacaagcaaaacagccagcccatgacataacgcgcagtgagggatgggcaaggacccattgttgtgaatttatgttcctgactgcgcgtcatcatcacaggcaccagacggcgagagatagaacgaacaggcactctggatcttttagcccaggccttttccgattgtttgcaagttttcttcctcttgttttccttttttcttcttctctcttctcccctttctcctcttcgcttccttccttttctcccttttgcccgtcgtctacgaataccgacgattagcctttcctcgttttgactgtcgactctcgtcacgtcgtcgtctttcgtctacgacacgtcccacatcggttccttcccttttcctttctctcttccctttctccttcctcttccaagtcctgcgaaatcaaggacatccatccatccacttccatctaggtctcgcccaaaccgagtcgaacgcggtattggaaccttcttcgatcccaggaacgactctcaactctatccaaatcagacgggcaggtacctgacaactccatccagtcttcatctatccttacttccagccagcaggcaagcaagttctacgaccttctgtgtctcgtctccgttctctttcccccaaacctttccgcatctctctagaattgattttcattcaggattcgcattcaaggtaggtggtgtaccttggtttcttaacactcactctttcaactaggcccgtccgtcctgtatcccttcaccttcccatcctctcatgccggtcgcgactgcctctgtcgtccttttctacttgacgcgtgctaacgttttacttgacctatcctccacatagagacatcaccgacgctatcgctactcgccggcctctttctatctagtccggtcccgcatctcgcgtttcggtcgatattcaatctatcgcgttgatctatcaagatgttctccacatctgttcccaactcggttactacacttccgtctcctcgcgagctaaacgcgtctgaggtatccaagaacgccgctttatcatcccgattcgatacagagtctggaccagaacgggtgaaaaggtaggtctcgacgtgctacgatattgagtaagaatgcgtattcttttcggatttacttacggtcctgtttctcttcctcttcctcttcttctatctcagcagatttctcaccacccagtcaagcgagcatctcatacaccaacctaccccctcttcggcctcttgcaacgttagcaggccttccccacttcttcagtctcgatccatcagtcaaatgccggattcaagccctttccccatttctcagtctgcagccaattacttggatggtcaccagacgcggtctgtagatgggttgttttcttcgtcttcaacctcgctcgctgcacctgtacctatacacttccaaggcgaggcacctcctcgaaacttttcatctcctctatccaggaaccgtccgtccttagagcaggtcatggctcgttcctctagcgttcttaaacagaggcctaccatcggagagctttcctcacctccgcccgctcgctcagaaggcaacacagacaagaagcaggaagagccaaagagtgagagtcaaatgaatgatgggattgaaatggcgagcgaggtcgatcagaaggcactagagcaacaaagctttgaacagttcaaccggtcaaaccaggaaggagaggacaacggcggggatgaagagctgacgcctccaccgttgatggattaccagttcagtgacacaagctctgagcctgaaacggaacctcagtcgttcgagattgatgaagaatctgataagggagggatgctggacaatctcctcaacggaagcgttctcgctcgggaggaggaacagaggaggtggcggtctaggcgagactcatcggccagtgctcttttgtcgctacatcaaggaagcccctcaacggaccaacatgagttcgatcagcctgtccctcatcctcaatctccatcccggccctgttcacgttctgccaataattcgtccaatccatcgggctccaaccatgccctggtttccacctcacagttcagttcgcatcgctaccctcgacctcccgcctatccagattatcagcgtggactgccgattacaccgctcgacggccgatatctccctaattccaagctcaacatgattgagcgaacactttctgatccattcatccccagtcctcacgtcccagccgctccgttttttgcgagcccgcttccatcgcttctgccttcgtaccgggctcctgctgaacttacccgacatcagttgacccatcgtcgagagctgtcacggacagagccagagtgctactggcattcatcgccttccaatccgtccacagctggccctctctccgtccattctgcttcgacgtcacctaaggaagatctagaggtcgtgatccgatcgtcaagcgaggttgaggaaggattgctctcacctgggcaatctagtcgggaggaaagcacaagcttgccagcacacatcgaggggtctgagacatcatcgacccctcgagaggcttcaatgattccgaactcctcagacataccttcgaacgcttgggcaagtccgtcgttcgtcctaccaagtgcaatgggaagcttgatacaggctggcctgctggcagcagaaagagagggaacgactaagaatccgatacctcgttccaaccaatgggatgaggatgacgacgaacagagacagagggttctacaggatgagatggaagatccggaagaggaaccagcggcggaagaggaatccaatttccagaagggaaaagacagacttcaacctgtctcggagaataagaaatcaaagaagaagaagggcggtctgattaacagcactagcaacaacaacaataataacataaccaccaacaaccataccctcaacgacaacgaaatcggtacgtcttcttatccaaaaaagattgttgtcagagtggtgcttggtcttggaaactaaccgatactttcatctttcttgtcatgtgtatgcatatagccgtcgatatgagccatattcaagagtgcgatctcctacctcaaggagtcccatccgatccacgacccctggataagccttcatactcgtatgcagctatgattggtcaatcgatcttggcccatccccgtcaacggctctcactcgctgagatctacacctggatctcgactgcatatccgttctataagaagggtgatccaggatggatgaattcaatcagacacaacttgagcttgaacaagtgtttcatcaaggtcgagagggaaaagggagggcctcaagggaaaggtatgctctgggccatacaaccaggaacagaacaacagtttgaaggcggaggattcagaaaaaagttagtgtgcaacctagttcttcatgtctgtattctagaaagattctagttcttttgcttatatgtcgactattgttgctgttttctcttcaggactttgcctccttcaggcaagggttccaaaggaaaagctggctctcctgctggtcctacatctaaaggctcgaagagcaaacgaggtttgcccgagcctgaggtgttctatgagcaagacccaggcctcatgggtccgcctcggcctcccgcgtttgccccggttccaccaggaaagaaggcacgattggacttccagaatggatggcccaccaatcccaccagttctcgggctcatgaggtctttgtctcatccccttccacctcatcacccgctcttggctttggacactcctttgagtcgaatatgagcagttactccgatcactcaaacggtctttatccttcgcaccgatcgaattcgaccatgaaggagaagctctctaaggtgcacgatcaggatctagatgactttacaacccctcgaagggcgttatctcggggaccttctggaaacccttctctcgctgaaagcaacgagccgattggatccagtggccaacccatcctgcctcctagtgctctgtcgggtcttcctcacttgaccccttcaatatctagtccggtgtcttcaagtcctggaccggcaacattgcctcggccaagtttgattcaagctcatcgcgctcttctcaagagctcgcagagagatccggagaacgtcaccgttattgagggagaagaatcaaccccactacgaatcatgatccctgctcaggaagatcttgaaggagaaggtttgcagcccggattcgagttcgatcaagtccggttgacaccccaggatcaatctcaatcgtcgcattatcaatctcagcaccaacaccatcatcaacatcaacacgagcagcaaacgtatcatcatcagcagcagcttcagtctcacccgccaccatcaccgtctcctcattttgctacttcaacctcaattaaccatagcgtctactctccaatctcttctttacgagcaaccgcaaacgatgaggaatctcaggaaccctcggtatggaccacatcgatgatgcataatccgcttcatagctcgatccatcataacccgatgcctgcatttgcgcacatgagtccgctgcagagtcgaaaagcttctgccgctggcggtggaggatccggtcacaggcgaggactcaatgcgaccggcgagctgatcgctcatgctatgaatcccccgtcgtcttccgcctacaagacgccagggatgcaaccaatgatgtccagccctaggcgacctctctccaagccgtacagcttcccttacaaccacggttctctttctcccgcctcggcacggaaggcacccccaccgttctcttctactccaaaatcggcctcgattctcacatcgtcagctaattcgagtaatatccgaacacccgcctcacagacgacatacggactgactagtcagtctccggcaggggcggccatgcttcagcatcgagccgagatgggtatcctcggtttcggtcttggatttggcgattgtggaaattatggagactttcaacccggtactccacggttggaagatccatatgattccagcagagcagtagaggacgagctgatccacctgaacgcgagaaacacaggtagtccggcgagccattggggtggaatggggactcctcgtatgggccttggtatcggtggtggttggtcgttctcacctgggatcggcttcggagatcgtctgagaaatagctccaactaggtagtcgatttcataagagttttccaacctttttttttctttttttctttttccttcagtcgtctctttccgatagtacatcctgtgcctgtcttttcataaatatctactcggagggctctcaaccttcttttgcttcctatccattttcgctagtcatttttctttctatgtctgtcttacatcaagtaagcgtgtgttcatccatcatttttcttttttcttgactgtatacttcacttctgcttcttctgttctcatcgactcctctttcttctcttcttattctatcttgatctcttagtatattctcatttatctatacattagtagtacatctctcttgtcgacaccttttcccgtagattccttcattgtttcccttttggctcacttgccttctcctctgtgtgtgtctctatactgcgtgatggatctctggtcgtccgtctttttttcctcctcttatccttagtcatgttgtgctatatgttatcttgtcccgtgcgtttgactctctttcttcagataaaaggactggaggagtcagtgaaagtgcaagatattaaatagaacaccatgtgaatcacatcaaactagacatcgaagaagaaacaactaaacacaagtaaaaagagaattgaaaaaaagagttaagagtaaaccagtctacgtctatcttttcgttcgccttacgatgacatggcggtcatctcctccaacacatctaggagtgtcgatgcactccaggcttgggtccggcatgaatcatggcaatgtcctccattcgaattggtgagctcgggtaaaccagcccaagcgtcggttgccacatgccttcggtgctctaacaagatctctgaaacgtagtgcaaactctctgacgggtctttcttgccgagtccgactttagagtcgtacatcagataagccttgaggaaccaccccatggggaatacccattcaggtccttggtggtagttccatcctttggccacagattggtcgtcggagtcattcgagttgtcataatcgccccggtattgagaatctccgggatcgagcgtcttcataccgagaggacctcgaagaagcttgtcggccatttgaagcgcaccaagtgctttctctggagtgaacaactcgggggcgacaatcgtggcgataggaaaattagatcggaactggtaatcagaccattctcgtccttcgccagagcctacgacgtccttgtagatacctcgtcggttgacaatactcgggttgatgttgtattcagagtcctcagcgggatctgaagagttgaaaggtcagtctgtctgtgtcgttaaggaatatcatctggtggcaacgacttacccgatggaacgtagtaattgtattcaaacgactcttggatgagatcggaccatgtttcataggtaacaaaggttttctttccagcaactgtgaaataatatcactcgttgtcagttcgatacacaggaatttactttcggttcactatagaaaaagttatttactctcagcgtcaacacccttaaaagggaactttccagccttggaaagggaagcgacccatcgaagggaactcttcagcaaagcggtaatctcgacaggggcaccatctcggggagtagcggggaggcccttgttgccagccttggcggactctcccatcttgtcttgccatgttccacagttgtatcggtttccgccgtggatgaatccggttttccaatcagtatagatctcttgatcgaaacctcgatcatccatctgcatatcaaggttgggtccggcgttgtactccctaaacttgatcccagatgcatgccgttgcaatatctcctgaatcaactcggcgaccgtactggaccaagagtaggccctaggatcgtcccaagcgacccaggtgtcgtcggccgggaaacgtcgcttaactgtatctgagaggatggcgattccattgggggccttctggacatagtcttggatgttttcgatgaaccaccaaggtccatctcgacagttgtatcggggagttcggcaggaatccagaaggttgggcaccaaacctgacgccaacaagaaaatcattgagaaccaagacacataagaacgagccgtatgtgtcaactaaccatgttttagaacagatccaaaggctaagatatgatctcgagcggctgggaatgcgcctgtggttaggaagagaccccggagggagatgaatacctaacaaatgagcgataccagcacttggtaagttcttcggtaggggttatatacaaagagtggaggagaggaacacgaacatctcgtccccagcacctagcccagttggtcgagaaatgaggaagccccgcagcgagcgacggaactggcgttcccgggtcgatggatgcactatgtactaggccgtacatttgaacggcacaaagcgccagatcatgagtaaatgagtggccggacgagatgaaattggtgcattggtcgatgacggctcttctggcagccttgtaggcctcgtacatcacaattgcaaagtacttaggtcggaggaacgacggaactgtgttcttgatgacgtcgaatcgatgcttaaaccaagcggccggcttggatagatgaggcaaggctgatacttgcctgaacatgagtagtatatagagcaagccacgatgagtatagtacggtttatccaataatcgattagaaatgatactcacctttctagtcgctcaacaacgtaatcaagcgcccaagccccgtgtcgtaggtgattgcagataggagctccgagatcctataacgatataatggtacaacgatgaagtcaaaatgatgaagcagaagacggactggtaaacctaagattacatacgttgtatcgaataactggcttgaggggcgccatccagccttgcagaccacaataaaccagagtaccatagtctgggatagtgtatgcaccatctccatctagatcaaggagcagtcggtggtatacgccaaaagcatgacaagctagtcaatttattgtcaatttaagattagattctatcctaacttactggttgcatcacgctcctcgccatcagttctatgaaggatcacattcagatcaacaagatccaattcgctcattgcttcgtccgctccttccaagcacaccgcgtcgaggtttcccgatagtcctggcatgtcggttgcgaacaccataatcgatcctgctgggaactcatccgggacgatgatctcagtgaacgcgccctgatcatcatacccatctctttgatgaggtgcgggaacctcgttcaacgtggaaggcatccctttaagggtcttgggatccttgggatcctcatatgaatggattttgatagaagcaccggtaatgtactttgtggtggtacgagaaagcttgatggggttgacttcggatagtgacacaaagaacagtgagcaatagggaataatttttacagaggcatgatggagaaaaaaccaaccatatcctcttgattgcaagtcattcttattgaacgcagtatgagcaatgagaagatatcctttatgagtcttaggatgaactctatgaatgacgatgtactttcgttcgaaatacccccggataaatcgtcagcattgcaagcttaccccactcattgcaagagaagataaagacagaataaggaggagacatacatcattttcttgatggacgtgtccttctgagaatccatccagagtcatttctgtatgcagatgattcaataaccttttgatctttccgattcctcggttgacaccctctcctccaacatcgtacaacctcgtgtccgtcacgagattcaaaagctttgggtacagatcgtcaaaccctttgttggagccaatagcagcagccgcaaatgtagcgagcgctccggtactcagcgcatcttcacccgatcgcttgtcaagaggagactcattatcatgggtgacatccatgattagcgcgtggggattggaaccaaagatgggggacacaacgcagggtcgagagggacccttgccggtgggagatggaagcattgcaggagaactgaggcacactccatccatagaaccgataggcttatcgataccaaaccggtagagtagtcgagattgttctttgggatggaacccgttcatcatctctcgaatcaacgagttgattccgagctgcttgataaacaacaggtccagatcttcacttccagtgaacagttccgcgaccacatagaggttgggatttctctttcgggcagcgtcaatcatgtggactccgacttccaatggagtcgaatggcagttgtccaatcgaaacccatcaaacattcccgcaagcagctcgcagtactgcgtgatgaatttccagaggaacgggttgtcctcgggagactttccgtatcgcaatttgacacaatctccccaaacaatgacttctcgtcggaggtatgccttggaaggttgctcagcaaagttagcaagggggtcagcatcccaaatccaaccgttgttggcgagcgcaagagaagcaggatcgtgcttcttggtcgtatcgtttaagggaagacgggtgaaatacgatccgacaataggcgatctgtgggaagagaatcattgtcattggaaacaattcatcaaggaggactaatttcaaaagactgacctagtagagatctctcccattcgaggtccgttactctccaaccgctcgtactttgccctcgacacgatgttatccttctgggcggtcttgtcagagttgtattcttggtaaagatcgacgttggccacgttcaatacattggcccatcgatcaactctgtctccagcgtctccaaaggccgcctgaacaaacccaagagcaacctccaccggaaccctcacgccgtttctcttagcaaactttccaagtccctcgactgccccttttactgatttgagaattgaggcaagctcctctatggactttccctggagcgaaggaccctcccaagtttggggttttacagactcgagcgcttgagcgagctcctccttatgggatgcaacgtggaacacatagtactcgtataatttgagatcagagatcaccctgtctacagcggaagcaagtgcattgagatcagattccgagtttatgattgtagggattcccagggaagcgagacgtccagagagttcgatgatggcagtatccagctcaagagcaggtgcgagatggggagagttgaccacgttgtaacctagtaatcatggaaaatggtgtcaatcagtaccatgatagaaagcaagtctattgcagataatcttaccagactctgggtgatcctccaaccaaggactgtcatttgcggtgtggttcaacactacatctgtcagactcaacaacccatacttttctctgcattcggtgatcatcttgccaatctcctggacaccatcgcctggctggccctttccttcaaagaagagtgctgggtcaaacttgagctgatctcggatagagtacggactaccactctctccccttaattggagaggtgtgaagtgaagcatgttgtaaccccttttggaagcctcatcaaggtaaggtccccatttcttaatgtttccctgccacttggcgatcacgctaaggacagcaagcccatccaacgggcataactgggcgttcgaaggaggcggaacagcgccgccgtcaggctcgacaatgaactctttcgataggatagggcttcgtcggggaagaagaataattggatcaaccgaaaagaatcctttcgtagattggattcgctttcgaggggccgaaggctcgttctcgtcaatcggtccgtcatgttcgataaagtaggcaaacgaccccgaatgggagattggaactgttgagtgagttagtatgcgtttggccacagcctaccatggaagacatcgtatggaatacaaaaagcaactaacgatctatctgaacgggcttagaaaagtcgatgggaagccttttgtcccaagtgtagaaaaagtggtaaggtgtgctgatcgcatagactgacgaatggtatccaaatagaacgtcgaatgacttacttccgctcagcccacctgcttcgctcaaaccgaccaccatctaggggaaagtcagacttgatgactccgttcctagtagcaggcgttccaggctcaagagagatcctaagcacgtagggcttggggtaagggggaggaagtcgaatgtactggaggccgtacgaggaaacagatgaggagaccaaacgcagagcaatcgattaagttccacgcgcatacaatacatggagaatggggtgctgaaggcgacagggctacgcggacgaaaggtacttacagacttctcctttgaggggcttccgtcaggctcgagggccaactcccaaacctgaatgtcaccctcatccttgccgacacctccttcgaagaaggaaatcccttcgtctgctggggttctgaccgagatggactctttggtgactactggaacagtcggctctgggatcgagattgactgaggcttggcctgtgcacgagtggatgatctggtcgtttcttcgacagaaacagccttcagggcagatgtagcagagatggcttcgccaggtgaagaagcgacctgggcgggggcggcctgcacggtgttgacagtcggaggagcgactgtgacaggaagggatggtgcaaccttgggagatactttcttagaaactttcttggccatgttgtgaagattgctcgaggaagaagaaagagtggttggtgaaaggtatcaaagattagagtagagatgggaagggacaggtaaagaagtgaaacaacaagtatacaatgaaaagtgacacaacagcgagggatacacgacttgtgatcagaggaaagagtgagaagggaactgtgggtgaggatgaagatgaggatgggagtagaaaagaagaggaagaagaagaaggagaagagagagttgtaaagtcgagatgagaacgttcaactcaggatggaatcgagccgagaccaggttaggaggagagctgagaaaagggcagagtgacgttgtatgagtatcgtctcggtccgatcgggcctagaccaggatcgcttacgtcaggagccgagtgactacccaagttcctggttcgttaatgacgcttctgtcggcagttttatcgtcttcacgcgtggttgtgactttttctttctttgtgttttcttatttttcttttctttcttctaatttttcttcttctatattcccgaacgatggcttgctacaaagcaagttttttagaatcgatacacgttctgtcattttgagcaccttatcaaactatcggttgtctacccttcattcggatacaaccgagtaaagatacagagaacaatgaacttgataaagataccaaactagaggacagaggattcaaagatatgaatagatcacaagttgagaggagagaataagaatgacgagttcaagtaattgagaaagagagagaaagaaatgcagagggtaggaagcagagggcaaagaggacttcagcccttgcagtgagtggagagatcgtttggcgacgcgagaaacatagattcagccagggccaaccagaaaattgatttgatgctgcggaaggacctgatcggagacttggctacccggggtcagtacacgacattcactggggacgccagcgacggaggagagtgaagcacgaaacaaggggcagatctttctttcctgtgcacacgcacccgcaggatagacggatctgcttctggcccctcttgctcgccgggggaaaaggaaaagaaagaaaaaaacaatatcatcttattatatcccgttaggc

SEQ ID NO: 2741 - DNA, 74316 bp, Xanthophyllomyces dendrorhous
ccttactccgatcagactaacttaggaacgctcgataaaccttctcagacacacgcatttacttattctcatacacgcacatcgatcaattcacttccaccctagccctgcctccatcttctgagtaagtctcgttcagttgtttccatctcaaccgatcgatgaagatccttcttttcgtatcattagttgtcaacatcgtttttctctatttccgtctcaagaatctctacatttttctggagcgtaatgaatagaaattgatcctaattttcatttgctctttctcagtcgtctctttcacacacatcttcttctatacattgttgatttgtgtgcctcggtcgacagtttgatcggacactgtagcttcagttgttgttctcacccaaacgtctcaacaacccaaagttctcgtagcagtatcacttggtgagtatctggtttgaaggagagactcattgtctcaattggatttagaccattgaatgctcaacgatctagaagcatcctcttgcctcttctcgatctctagacgtacactcgccctccggtgatcacttttgtggttgaccgtatgctcctttttgtccttcccactcctcttgatctggattatcactaacaacatctggttcctcatagtttcctaatatttgcataccctcgaccgacatattctgaaatttaaattccgtaacgccacgttgttcgaaaagaagacgcctgtttaaacacacctcaccgacggtaatcaaaagcttctcattaatcatataacactaagtgtatcgtgactgatcttgcctctactcttctgtatgtgcctgaacgcatggtgtgtcatacgtatctgcacacataaactgggtaacatctaaatccgtgtttctttgttcctcccccagccaatgtcaatcaccaccttgtcaaactctgcaaccatgtcgactccccaaggacttgtctcgaacgtttcttcggctatcagtgcactccctaatattctcgtcccgtcatcctcaccacacgactctgtacatcctcatcctcacgactctctccgagaggatcttccaagatcacctagcccgctctcctcgccatccagaaaagtcagacaggctgacatcgtccaggttcccatcagaatacatccaaagccctttgcacagaacgggcaacaaggcatcagactgatgttcaagcctgaacgtgtccagacagacacaggaaaaattcatcaggtatctcattctgatacagaaactgcctctcgactggatgtttccgatggaacagatcaagactccgaggaagaagatgaagatgatgatgaggacgaagacgacgaagattatacagagcatgaataccaaccgacgaggccaatgtctgtttccacccgaaagtcgctcgccccgccggggaccgaaccggctgctgcgcccggtgaaacaattcctgcattcgcgcctgtgcctaccactcgcaaaaacgctctcccactgcctcgtggtcgtgccaattcaccgagaggtcgtcttccctctcccacaccatccataccttctacccgacagcgctcacgttcacgttcacacactctcacttcgcctcttcctgtgtcatgttcagcttcggttgatcatgagctgtctcctgctattgaatcaaattcagcatcagtgttgacgtcagcagctgtagcgtcatcgccatcgtcatcttcttcaccttcatcgtcatcatcgtcgaccagcaaaagatctgtcccactatccgaattcaatatcgactccttttctggatcaaaacgaactcgaagaatatctcactctccaatacaaccgacctccgctcaaggccctaatcgccggagtcgatctagttcaccaggagcctccgtcgattcgtcgtcgacttcctccaacaacactgggccacgatcgacttctcctgtaaaggttgatcgtcggaggaagggaaatggaggtggtagatggccgtcgggagcgcctcgttcatccactgtctctctaaataacagcggtccgagtctctcggatggtcagtcggaagtgaatcaaccgaatggagtgttggacgttaaaatggaggagcagtcaactgaattgttactgaacgtagggaaaccaaaaaccttggtagacggcgctcaaaacgacgagggaaaagaatatgtatcagaattgaggacaaacgcagaaagggcgagcattattagtccgataaaagcaacggatgtgccttcatcggcccctcccccaccatcatcagaatcaccgtcatcattatcaaagattgactcagttgaatcctcctttaatccgctcaaaagaattgttccaaagattgtactggttcagccgaattcgttttcagatggttagtttgtttgtgtttctcgtcgagtcttcgagggtacgcctctcgactcttctgtaaggtgttctgacaaaaagcatcctcgtatcttgatgtcgcccctggtgatcccataatcattgatccttgtggccttcagggtcacatacgtccactcccgcgttgttaaccaacgggtcaaccaaacctgctcccacgtcagtcgtaccatcgaagccaaaagcgtcaagagagacaacgccggcaggacagccgtcgaagaaagctctacatgcggcagagatgaaactgttgagggcgcggaagaggcaagaaaggttggagcttgtcgagatgttcgtcctcattacttccctccggcattgcctcatctcctcttcgttttcactgaccttctgaacccatttaactgttctgcttttgaattgatctaaatggaactctgatagtgaactcaagatgttggacgagctctacgagtctgtggcgaacaatactgatcagtccctggtggagtgctgggcagatcttcaaagacgatacactggggcctctacattgattgaaaatcgaaaacggtatgggcacctctattatattctgtagttttctcctgtctggactttgaagtttgaaatctgattaggtctacacatttttctctttcatctcatcagacaggccgaagcagagttaatgagggtgtatgatgctgatatcagtttcacttggagctggtggaacgtaagctgttttctctgtgtgtttggccatatccggtaatcaagatttattctgatgttatcttttgtacttcaaatcaacactttccaataaaccaacagatatcccggttcgatacgcttaacaaggagaaggccgagctgtccatgaaacttcaaaagcttggccgggaacatcgacaaatccagactgccgctcttcctccgtccgagcggtttttgcctgtaggaagccgagcgccgttggtaccaaatcctcgatatgttgttcatactcccgagtaccgactttcaaacgataatctggaaaaacaagaaaaaaagagaaagaagaggaggctcgtggaacccgaatcgagcgacgatgaatccatcggggttaaaggacttagaccagacgatatagagtctgatttgaacaaactcggattgggtagagctgaaaaagagaaagaacgacttcggttgatcggagctagacaggaagaggaaagaatgaagcgggaagaggaagaacggattcgagcccagctagagtgggaggccaaggaggctaaggaagccgagagaaagctagaggagcaggaatgggagagacagcgagcgatgagcgttttagaggctcaaaggctcgaagccgagaagagagagcaagacgcggtggattatcgatcgaaccgggactccggctcatacccactacccatggcgaaaccttcaaggacaagggatccatctggaaaaccaaaatcgaaagcgggaaaatctacttctacttccaagccaccctcacggtctgctggtatgccagctccacctcccccttctgcgcctactcttccttcttcctcgtcatcctcttcggatatcaggcctatccgacctgtcaagatggaaccctcgtctggcccgatctttccatccaacgctcctctttctcctgtcatacccccctcagctcacccttggaatgaccctcattctcgtgagccggcctcttattacttaggaggaggatcgtctcatctaccttacccgtcgcctcactatggtccaagttcctatccaaacatgtctctcccgggtggctatccccagcatttctttccttcacctttgaactggattccgggtcagtcagctaaccaagaatctacacaccaatcggtcggtccacagggtggctcgtcggggtcatctggatcatcaaggaatgtgaccctctcgacgcaggaccatccaagtgttcatccgtttcacttgaacccgtacgtgagcttctccagtatgggtgataatcggagtttgttgtcgcatgttccccagcagcagcagcaacaacagcgaccaaaccaacacccctatcagcatcaaccttaccaatctcaacaccaacagcagcagccatactcgatcagtccgtcgcatcacgaacatattctgagcactcagtcgcatccacaccaccatcatgttgcccatcgtcatcaccaacagccttcacatacaccgtctggctcccaatcaggtcttctggtcgaccctccccatcgtccactctctacgtccgtatcgtcatcgacaacttggcgccccgccggaggaagtaaaccaatcgaacccgttcgatccaactatctcccccattcatttctaaatcctctaccttccgttccccctaaccaggcacaccatccacatgcttcacagcagcagcaactaccgcctcttccattcggttcctccaaccaccaacttcatcctttaacaggtcctggacatccactttggggaacgaattacggggtcggtaactctaggtaaatcatcgattttcaagacctgagatgaatgaggacgtagaaaggaccccaaatgaacgagagacggatgggtggaacgaaacgatctttatgatctgtacctctatttcgctaagcgtgatgattcgattggtttttcttgtctgtttctcatgtgtaacaaaacttatgttgtatctagactgtcgttcgttaatgagatgaattatcaccatttctaaactcattgtcctttattatattaatttcgtcccgatttgtaaaaacgtaaagaagggataataacaattcattatatacaatgatggacgaaggatctcttctcttctgcacggatagagaataaaaaatccgccttcatgaaaactaagatctacagggtgaagaatcgttgtttggttcatactattttcgatcggcgtttctcaggtcaaccgctttgacgcaacagtacagtgtttccaaaatcggaacggacatgcccagtcgtttcgcctctcggagaggtgttccgaggatgactgtgagtgttaatatttgcgacaaatccaaataatcagtttcagggctagtctatacttcttcaaatgagataagattggagggaaaacgagagggaaatattttatacggaccttcaacttcggtttgggatccgttggcgacgtcggccatcatcgaagaatttaatccctctttgtgagctttgcctatagtgttgtaggcaattgatagggtcgattattgaggcaaatatcaacaagaaggtgatcagcacattcaaaccacgacagtatcggtcaagatgaaaataacgcgtacatcgattcatcagaacgtccacctccgagtcgggaaccttatgtcctagcgcctgggccacagctaccacttccttcactgtaaatgaagtcgacggcaaagatatttcagtgcacacttttccgaagagggaaggtgagaatagagcccaacatacttaggtttcggcagagatcctccgagtaaggcgtagcggccatgaatttggctgtgttgtactgcacgagggcggtggtactgttccaagctgcattcctataaaacccatccgatccgacacagaaaattgcaatccaactcatgagtgttctcattccttctcttgagcaggataaactgaataattagagacgaaccagatgactttcttccatctctctgtctgcatatctaccacaacctcagcccctatgccatcgacggcttccagcgcatcttgcagtattttcgcgctttcaagctctccgatgtcttctccattgtccccatagaaaggaccgaattgcatacatggtgagggtaagttgttgtgattgatgagtcctgctgacggttgggaagctccaatccaagtgacagctgtaaggattgggttggtcgggaaggccttcttcagggctaagagttccgattgcgaacgtttagaggcgttgggttagtatatatgtatatctgggcataggcacaaacatacaggaagctacgaacgactctcggcgcctacgccgttttgaacgatcatcacggcagtatgatcgggagtgaccgccggctgaatgatctcctcgagagaaggcgtagccgatagttgcgctttgttgcagcctagagcagatcgaaagttgggtaagcagtcatgacagagaagatacagtatcagtaggactagagagggtgcatacagatgacatagtcaaacttaggtacagccgtgtgagcttcttcgggtgttctataagctggtcacatcatccccaggagaaagaaagagtgaacacaccggatcaactcaacgtcgactcaacagaaaattttgaattaaaacgcgaacaaacctccagcaaatttaagacctttgacagtaccgaacttgatgctctcatagtctaatccctgatcctggatatgctcgaggtttgatcgagcgaccacatgaactcggcatacgtccttgagttctggttgagaaaggatgagcgcgtagacggctccgataccgccaagaccaaagatgagaatttccagaggcgccattgtatttatgtgtttgatacgggtatcagagtagagaagaacgagaatagatgaacgataagtatacggagatggcgactgtgagatgtatgagtactccctaagcccaggcagtggatgtggtcggatatctttaagtagagatgagacgccgcctatagccgaatcacgtgatgagtttcggttagaccggaccggccgcccggacgggtcgttgatatgccgagtgtacaagctcttaagaagcgtctagcccgtcctcgctttctttcttttctctctgcactcttccccatccttagacttcttctctcattcatctcttgatcttaagtaaaaacacccactgtaccaaattacaagtaacaatggtttctcgagcatttactcctggtgtaagtctatcgaacaatcatcttcttcatcgcatggtactcctacatgagtggatcaatttgacttgaaagagtcgaagagatgcgtggacagcaactgatcactggcatttccgatcgtccattttttctgtgtataaaggttttggttccccttaccacccctttcaagcctgaaaatagtgacgtcgatatcgaggccttgaaggctggtgtcgttcgaatcgccaaggctggaatgggcattgtgagtctttttatcgacctatccgttttatacttttcttcttttgcacgtttctccatcgggagctagactcggccatgactaacctgtatgcgcaactctattactcaggtcttgatgggaaccaacggagaaggtacgctttaccgtctatcacatactaagttcaatacagatcatcatctataacaacttgttgtttcttttgatccattgtgacacagcttcccatctaaactcggaagagcgaatggagattatctcttctgcccgtagcgcgctagatgaggctgggttgaacagcattcctctcttggtcggaaccggagccggttcggcccgggcatccatcaaactcgctgaggatgctaagaaggctggagccgacttcacgttcgtatcttgatctatcacttgaccgtctcaaggctatcacaaaatctagccggggcactgactttttatttcccttgcacatgctgcttccaatgcatatagtatcgtcattgctccaggatacttttccttcgtgatgggcaaggatcgacaggctctccacgacttcttcactgaggttgctgacaagtcgcctctgcccgtgatgatctacaactttcctggagcggctgctgggatcgaccttgactcggatctgattatcgcattatctgagcatcagaacatcattggtgtcaagctgacgtgtgcaggtattggcaaaggtaagcagcgcttgcgtttattttgaaggcaaaagttcgaaaccatagtctgtatgtgggactgaagactgattgtttcttatcgttgtcaccgttaataaaaactgggcaatctcacacttaggtgctagaatttcaaagtacgttcagacggaagagtacaagaagcggcacccaactcctttccttgttatgcctgggttcacggactaccttcttccttcgctcgttgcccgaggagatggatgtatcaccggaacgtatgtcctcagctacttttgtgattgagagagtacctccatctttgacttctttcgctgactaatccgcttgttcatcatcagtggtaacatcattcccaagacgatcgccaagctataccagctttccactaaggctctctcctccggtaaggttgaggatcttcgagctgctcaggagcttcaggatttggtcagccaagcggattggatcatcgttaaagctgttcgtctctttcctattcttcagtcagttggcctgcatctgacaagtcgattgctcattatgtatctgcaaaattaaatctcgcaaataattagggtattcccggaacaaaatacgcgcttgatcagtttgcgaccgacccgacgggtaagaacctgaagttgggaggtgccgttcgatcccctttgactcaggtgtcggatgccacacggaaattgattaacgagggaatgcgggagtcagtcgaatatgagaagagcttaccttagaatttgttaggattttctgtactgttcttgatgtgtatttttgttcttttatcgttccctctgggtctaatgttgtaaagcacaagtaacgtcttctgacggccgccttgaacttccttttttcctaaatcatatttcttcttgatccaatcctacgctctatctatattgtaagatgaatgagcgtgtacaataacaaacgggcagaatgatgaccaagcggtaggttgaaacgccaaacggaagacggcaagaaaacggagccgaggccgggcaggagtcctggtctgggagagtcctgcagagctgacgtaatatattagtagatattgagaactaattcctcaaaattcaggattaacacacacaccttatacacacgtacactaagtggatcgactctcttccttaggacctctcattgatttatctacctcgatcgtccgttccaaccatattgacaggctctgatcactcttgaatcgttcagactactcttttcctatcctccaccaggaatgccaacaatttccaagacctcctcagcagccgatcatcttctcagcggagcggtctccggtctggcttcttccgtcctattgcagcccttggacctgctgaagactcggattcaacagcaaggacatagttctaggtgagttttcggaatgtcgtagacgttcttagttccttctccgatacctttctgtggtgatcgatcgtatcccgtagaaatgtacgactttacaaacgcactctcctctttgtcgtttcttcatgttcgcttttctctacttcgacaacctcgatcgcgcgtccgaactttatgtgtctgggtctcgaccatgctgggtccacgttctgctagaaagacatgggaagtgactaaaaacgtcatccgagatggaggcgtcttgggactgtggagaggaaccgcgccgaccatcgtaaggtgagttctttagttccctacgcacgtccgattgcgtatcttcgacttattcgaggctcatacgactgtctcctttcttctcaatcgcccgatcgttgtgccgttgtctgctgctccttctttcctctgtcgtgctcctgaaggaacgttcccggtgtggctgtctacttttacaccctttcagagattcgagccggtctctccacccttggctatttttctgtctcgacaccacatgtgcagtcctcttcgtcgacagcgacaacaacatcatcaccgaaatcatcatcaagcttggtaaagctatcaagagaagggaacctgctagcgggcgcaatagctagagctggagttgggttcgtgctgaatcccgtaacggtgttgaaagcaagatacgaggttcgtccaactgtcgttcttccattactttagtcatcggaggaaacgcgttctctttactctcttcttcgagtataagacctgtttccattcatacaccgtgcgcgcgctcacctgaagaaacttcttggtatatgttttttacttcttcatcattcttacgatgataccaatccgatcagagcaatctatacaactactcgtctatgctgcaagctttccggtcgatatatgccgaatcgggtatccctggtctcttcagaggtttcaccgcaacggccataagagacgctccctatgcgggcttgtatgttttgttttatgaagaagcaaaaatgatagcaggtacgacgttccgcttcttctcacttttgtcctttaagatgatttcttcatgcccggatctattagttgttgttgttttcgtttcttcttttctttaggtcttcgtgtattttactgacaaactctgtgtctgtctacgtgtttctctctcttcccggggatgggaacactatacagatacattgattgcttcaagaccagaactagggatccccgctccaataatccacagtttgtcaggttagcccaatgttctgctcctggctctgatgaatcgactccgtttctctgcgttgttctcactcttttcctcttctattcgccttctgctttccgtttcggatatctaggcgtgtcggccgcaacattagccaccctggcgactgcccctgccgactgtatcaaagtgagtttcaaaccaccctatcatcctttatattcatctttgcagtctgatggaagaaaggcatacaacggatcctgctgatctaaccgacgatgttttgttcatctttttctactcagacaaaaatgcaagtcttaccagatctgcatccgacagttcgcaaatcgtcctcgttaatctacaaagtacgtctcttcagttcaccttgttgtatactcaacgagcaaaacctgactgaatcgtattctacgtaaccaaccccgactgaaacgaaaaaggaacacggcatcaacggtttcttctctggtgtgagtttacgtatagcccgaaaaggagctagttcagcaatcgtttggacagtctacgaaggtctccttctcggcttccaaagtagacaacagcgatcgacaagcttaaaggcggatggagcatgaacggaccaagcatacaggggattggaaggaactcatatatctcaaagacagatgtttatgtatttatctaactctagtttgtcgatgtttgatttagaggttttctctggttttcttgttgtgctctaccattccatttgcaagccggatgaaagcaaggtcaggagctggcagctgaagcagtcagcgagagacatgtttctttcttcttttttttttagcacgttcaatgtatctcgaaaggttgttagagtagaaacaaaatcagaattggtacagtcggatattcaaatgtgagtttccgtgtcgaccaatagagaatctggtagatctagtaaggacgctttcctagtgtgtatgtattcatgtcaaacttaaatgtgtcgattgaaagagatgtaaatcttctgaaagaaatgaatgtgcaaggtatttgttcttttttttgttctttgtattgattgccatgaatcttgacactccatcatccaaaggacccagcaagctacagaacttaatcctgcttggtggttcctcggataagaccagtccttcgggcggcaataagaccagccttctgaccggcaacggcacctcgggagatagtggaagcctttccaatgtgctggtggtttcctcctccgtggggatggtcgacggggttcatagcaacaccacgagttcggggccaggagtttcgcttggccttgaacttgaagtaagctcgtccggccttgagcaagggcttgtcaactcgtcctcctccggcaacgataccaacggtggctcgggcagatccagagacggtcttcttggcaccagagggcaatcgaagtcgggtcttgttctcgtcaggggagtgtccgatgacggtggcgtagtttccagaggttcgggccatagctcctcggtctccaactcgctcctctacgttgcagacaacggttccctcagggcaggaggagaggggaaggacgtttccaacgttgagggaagccttcttaccgcagtagacgaaggatccagtggtcaaaccctcggtggcgatgaaagtctcctttcggagcttgtatcggtaggggtctcggaagacgacctgggcaaggggagcacctctgtaattttgcgggaggaaaaaagcaatggtcgtaaggagcagtgatttttgagatcgagatcggttgtggagagcggatgaacgatcggattcagtgtcgaaaagtcagacagagagcgatagggaaaggtcgaaggaagagaatagtacgatcaaagtagagtaaacacgatcagaatgaatcctttcatgtgtaaagtaaagcatggtaaccccatcggagactttggaaaaatgacacgaaccgtccagagtcgtggatgatgtccttcacgattcctcggacgtatccgttcttctcggcgaagtcgagagctcggagtctagccggctccttgttgtggtgagtgtgagacttgaagatccctccggactttcgctggttaaggatgactcgctgagaagaggcaaagacagaaagtatataccggtcagcgttttcgcctactagaggaaatctatcgaccgctcgattggagctttttagggcgaagagaaatttactcactcccatggctttagatcagatccgatgttcagaaggaaaagtcgaaagttagtcctgtgggctacttggagtttctcaatgtcaccttctcctttcgtccttctccttgtcccgccgccagatttgcagtccgtcttcgtattgcacctgttttatttcatcccaacagtttcccacgtgtcctccattctttcgggccctctgtatctgccacaccctactcgtccacattcgagaaacatgtccggcaggatgcaatcgttcaagaaatatggattgtgtcgaaaagaagttgctttctttctaaggagggaaggacaaggtgggacgaaagggaatttgctgcctgtaaagaaatccgtgagcttacctgtgatcaacaaaaaagaagaaaattcccaaagaaacaaaggacattcgttagaacatatgtactatccacccgagcaaagaacatgctttgtatctcatccaaccagataaactggcttacgcacctgattagtcttgagtggaagtatcgcctacacaaaattagcgcaacggtcacttgttcgcttgcttgtcgcttggtcggtcaagaatgcgaggagaaaccaaagtcagatcggatttcacaaaagtcatacgctgaatttgccacgcgacgcgacgcgtcttccggtgacgcgtctttcaaagacgcgcgtcaggatgattgttcatgaactgttcgctttcttcagaagtcgctgttgagtccgatgtgctcttatcgctgatgtttctcggtcatacagtcgccttgtcgttctgtctctctgtctctttatatgctcatgtctttgcgtgtggactgtagagccagcactgatggacgtcgttaggccgttcacaatggccgacagccagtcgaaccgaccagaagggattccttgcaaagaaggaggcatcaatctcaacagctgacaagacacagagaattcggggtgatagggacaatcttctgcgtcaggatactcatcggttgttcttacttggagaagttctgctcgcctgggtcgctcgacggccgcaggaaggctggagacgtctctggacaacggcggtctggctgagcacgacacgcagtggtcgctctctctctctctctcaagtcatggaagcaccttgcggggatgaaccaagacgttcggaaacagtggctgtggatgaagaacgatacggaagggtcaaccaccctccgtggcgagtgccgcttacgctcacactcacgctcaagctaactgtgcaaacagcctttctcacctcgcaaactgccttaccctcctcggtgtcgttcttcggcttctttcttcggtgtcttcgttcagatttgccagtctcgattgtctccacgctgctatcgtctccgcgctaccagtccttctcttcgccgctcggcggtggagacgtcttcgctggggcgcgcacatcagccgcgagcaagcgtaccgcaaggtggcggcgctccgtctgtcagcaggacgtccacgcactttcctggccttcggcgacggcgccttctcatcaacttctcgtgggcatgctcctggtcctgtcaagatgctgtttgccaagctgagggcctctccgctgcttcaggtccgcaaagtctgggagtttcggacatcgagggtgtgctccaagtgccatggcgagttctctggaaggagcaaagcgtgggcgctcaaggagtgtcgaggcgcctgtcgagtaagtgacgtgtgttacatatcttatggtagtgtctcgatgactgatcgttccccatgcttgttcattgtgtgctatgcttgctcttggacttggtggaacagagatggcaatgcgccgcgcaacttgctgtatctagcctttcaccaggaggagaacgagggggcaagaatgctgggctttaacgctgtcgctagtgaggctgaggccgacgttgagactgccataactgctgaggctggggctggcacaaattaaacccatgaccaatgggatcttggtggtttatggtctaaggacactcaagtccaagtccaaaagggccatgtatcgaccaccatcggctgaggtaactctcaccatactttttgcatataggtttctaaaattatgtattctatctctctacacgccgtgtcttacaatcagatgatcgaataccccctccccccaaaaaatagaccgtcttagacttcccttatcctgatttcttccctaatcctgtagacttccataagctctctcctctatctttcagactagggacatacgccggcttcagcggagttgccttataatctctaggtccgttcaactctgctccggtgctggtatcgagagagctagcgccgcgcgtaggcggcggtctcgtcgtcgagtttgagtttgctctaggaagggtgggaggtaacttataagacgggggagaaatcgccgtagcgttggctgatggagttctagaaggtagacgaggttgaggctgattggtctggacaggaggataaggcagaatcttgacatagttgtgcggctatgtgagtgattgagaaggcaagagatcaacacaaaaacaaacgagaaggtttctttctgtgtcagtacaagcagctaagacgaaagaaggcatagaaagaagaagaggggacgaacgaagagtccggtcgtaccatcctctctcatccctgtccaccattcgccatctcgtttgagaataacaatcgatgcatcctctgaaaatgtgatttcgtcctaaaattcaagacgcatagagttgaagattgagttctctgtttgtctttgcctatgtatgaaattgagcattcccgtccaacggagacatccgtgtggttcgaatctgagaggaatggggttcaaatacgtactgccgctctagcatcccaagccctatatcagaatggaaagcccctatcgatcgattaacaatcaaacgagagcatagctactctctcttctcttcacgacggatgctgtctagacaaacatgtctgagcagcatccgattgtacataccaattcgcttgacctagtattggtagactctcgatgatcacatctacctttgccttatccaagaaacccatctgttgtagatcctgtagatccgcggctaccctagcggatttctctatgacacttccagacatgttttatgttgttgttgttttttcccagttcacagatttaggagtaacagacacgtcttggtctttaggatgtttgtaagagtgcgtggtcttatttggcaaggtagatgcgattggtagttggatctgaaggcggtgtagcgggcgaagccgggccggagctattgcagaatctttatcctcggatcaactctagtctgtttataaccttgctttgtgctcgatgaacttcactctacacgaaaatatcatgtatcccatccttcagccttctgacgttcgctctcggcctgggcagcacccggcttagacttcccaagttccaatgacagcttaggatcaattccggctgaaggatcccatagtcgacctgcgttagaccagatctgcttgacgttgatgatctgttcctcgagccactcatcccatttgagccaatctgtattaaaatgaaaaaggattcaacagaataggatttagtgcggtccgcttgagtggatacgaatctgcaagagaggaagcgcctgcgcgcgagaggatgagttccaagacgtacgcaacgcgacggtttccaccccgatgtctagctggttaaaatcgcccatcatccatccgtagtcgacgacatgaagaggatctaccgacgggtccaacatccgaagccactgcccggttcgggcatcttcatctttgatgatgtgagcagttgcactgtaggtcagtcgagtaacaaacgctaggtgattagtcttggcgagttggaagagaaacccacaacgaatcagagaaaaccacccatctccaaacttacatgtttgccgatccgatccacgaaacctatatgtgtgcaacctgactgtcagtcatcacttcagagtaatatttcgctctgtaaccagagtagaagcaaactgcataccagaggccaactcatggcatatccgagtcctcgaagatagaattgatagtagtagctaattccggcagaggttccccagtagatattctcagagcagtccagagactcgaagctagcgatgacattaggcatggcgaaaaaggtctgcacgaacaagacgaaaggaagaaactcatgagtacgcaggtggcacagcattctcaagaaaaggagtctaactcacatcttcgtcggttttcctgcggcaagataaggagaggagaggaaccaaaggagacagaaagagcgacaagcagacgcattgcaaacagacggagatcagaatcaaaaggcaggacatagggtagccacgaagaaaaccagcgcaagccaacttacatcacaaactttgggttctctccttgtctttgagttgcagcccacttgaagaatgcatgagtctttccagagttaattgcctcaaccccatcgacgacgacgatatcgccatactgttcttgctcggctgatattatacttctgatctcctccgtccgaggagtaccaaagataaatttgatctcgaccttcgatggccagtccggaatgattttgtctctgatgatgtttcgtctgttgagccttttgatgtggttcgatgtgtgatcatcgggtgcggtaaaaatgccaagaacgagaaggggtgcggttgatgagttcttttgtgggcaacctatgctagaaggttgacggctggagagaagggaaaagtcgggttcttcgaatgaacgcgagatttcgtccttgggggtttgtccaactgagtaaaggtccagtggtgggagttgtagtgtgaaatttttgggagacagaccgtggacgatgatagtggtgagagcgatggtgacaaagatgatgataagcgaaagaacagtccggacctttgaccgaggtagaatgactgagaggactctatgcctgtagcttcgtacacggcttgacagagaggaaatatatgaggtcaacgggattggcggaagagaatcgttaggggtagcgacaacgctagggcttgtgagctccggggaagaacgaggttgatcagcagcgtccattatatggaagagatctatggatctcagagtgacctagtcagatggagattctttgagagggtgatgttgctgctatctatctactacacgaaggccaagctgtttctgcttgtagtaactctattgttgtttcttctctgatatttgattatagaccccggagcgtttagattccaaggcccgtgcgcacatgcggcaaagggcaggcacaaagagcgccgagcgcacggtatacacaaaattgacccgtcgtcatccatcctggtcaaaattccttcggtccggagcttgtagtctcggcaccggcgcatacatcggcattggtatcggcttatccgaaaatttgattattttgtacgatcttgaataaggtttaacccttatctaacaaattctcttacttctctctcttggctttctaggttgaagtacgtatccacgtttcaacatatacacgccttcacgcaagagccatggacgtcgactctgctccttcagcctacgctccgttcttggcctttctcgcctctgccaatattgagctttctgacaaatgtgagctcgcgccctacccagccatgggcaacggtctccgcgcggtcactgacatccctgcccataccgagttattctccgtgccaaaggtttcggtccttagcacccagacgagcgagctgaagaacagattgtcatcagcagaatgggaaggtcttaaaggtggatggggacggttgattctttgtttgatgtgggagcaaggtcgtggcgagcagagcccttgggccggataccttggtcagtctcaccctttcctcgtctcctcccgttactctcgttcagagagctgaatagatagtctcctttgtcgacttcgaacggcaacgaaaagctaccatgccgaatgagttctacacacctatgttctggtcggaatccgaacttcaagaactcaagggcacgtccatctttgacaagatcggtgtagaagaagcagaaaacgaatacaactctagattgttgcctatcattaaagcccatgaggatttgttcccaccaacgaagtttgaggaatgtttctcaatcaaatggtttcatatccagggcagtcggattctctccagaagttttcacatagaaggtccaaaaggtgggtttgcttctttcttttctcttgaaaaatttcatctgccgttcatttcctttctctctcgcgcgcttcaacattcagtgtgccgtcgcctaatctttcctcctccccttttcctcctttagacgaacaagaggaagacgacgagtttgaggaggacgatgaggacaacggaggtgaagacgtggacactgttgggatggttcccatggcggacatgttaaatgccatgtggggtgaagaaaatgtaagctgatggtcttgttcgctttccctctttcgagtgtgagcccatcaagctgatatcctgttgcttgcggaatttttctataggcaaaattgttctatacagaaacccatctgtcgatgataaccactgaagctattccctctggcgctcagatcgttggttctcttctttctctttttcttctctttcttcggaacgatccttaactaagaaccttattctattccttcttttctggaaactttagttcaatacttatgctcgtccgccgaattctgacctactccgacgatacggtcatgttgatgtgattccaccttccttggtcggtaatgaagaagatgaggtcgagattcgatgtgatcttgcggtcaacgttgctagagatttcctaattgccaggtctttgatcaagcctttagagaaagaggagacggctgtcacccgaggtgaagaggaaaaccaggacgagtggaagttcgagggaagagtcgagttttggttggaagaaggaggagacgagtaggttttccactctccgtataactcttctcatctggaatcaactattctttagcgcctgacctacgtcttgcctttctcccctttttttcttatagagtaatccctatccaaataaccgatcccctccctccacctctcatcgcattcctcacacttcttcttcttccgacatcagcctacacgaaagcgcacgaagcaaacaaacttcctagacctaaactatcggctgacgttattgagcttggaaaggttctgattggccgtagattggaagagtatgccgatagtctagaggtctgtgtttttcttcacactttgatttatttcaccatacgatctttccatctgaattgactccttccgttcgatttgaacacgcacgcccacaaacaaaaaggctgatctggctatcttgtcttcacccgagatctcaaccatcccgatccgtaaacgactggccatcgtcgttcgagcgggtgagaaagccgtgctgggtaaaacgcttcgggacttccagaaagcagaatcgaaactcgcagcagagtcggcatcgtctggatggaagagaaaagcaaagggaccagacggatcgaggggagggtccaagatgaagcttgcttgatcaaggcaaacaagaaaaatacaatgatagaatacaatctgtgacttttttctggtttgtgatgatggaacgagtaagactgacaggatttgctatcacagaaactttcacaagatacagcatttatttagtctcacaaaggaaacagaagaaagactaggaagaaaagcgaatacagaaagtcgggaaaccaaagaggggaggaggaatgcgatcaaaagagaggatatcaaataaagagggctaatgacgaaaggcgagagtacacgcgtaacaaacaagcatgggaggacatctgggagaaactgttcaaagtcagatcgcatcactgaaaccatcaaaggcagcctaatgatgtgagaagattgaaactcaccaagtcaggccgtttactttcgcttcccgttgtagtcccgcttagagaagtacgaggcgaatccaagactaaacacaagaaaaagagacagtcttagtcatgttcgagagataatcgtgaaagaagaaaacgtggcccttacccctccaaagcagcgatggctccgacaccgatggtgatggcgctgaatacctttcggtcgaaaggtcgtcgggagaaatcgtggatataagtcttgtatcccaggaaacctgcgagaagcgatggatttgaaaaggttagtgtgaaagtgtataaacaaaagattggtcaaaaatcttaccgataagagcgacatcgactgttttatgcaaatcagtatagacagaaacagaagagacaaccgaatgagtggtgtttatctggtaggagcgcatcaacagacatcaagaaaagcaacgtacaggccgagatgataggaacaaagaccttgggctgggagataagagccttggccttgttgaagatctgttggatggatgtacaattcgatcagaacatcgcgtgaagacctttctttcctctctcctaagatgagcggtttgcatgaagcataacaaaacacatacggaagcagcctccctctccaatttggcggcctccttcttagcagcctccttaacctcctcagccttctttgcagccacctcagcctcgtgcttggccttctcagcctcttccttcacgagcttctcagcggcggcagcctcttcggcggccttctcattgaactctttggcaacggtctgatggttgatgggagaagataaagagattgtgatcgaaatattagacaagacggaagaacgattggatatgcattggaataggtgaacttacctcagggtgctgatacaagcaagacatttgtttatggtgaacacagaggagagaagttagtatgtagagagagtgattgaacaacgaggagagtgatggaagtaatgtggaccaggacgactgggtacgaacctccctaaagtcatgaggaacgacagtgacaccgtgtccgtctgggtgctcgttgatggcctcaccagtgtgtccctcgagcaaagcctggtcagggtgaggctgtgatgaggatagatcagagtaggatagcacatgtggaacgatcagatgaatatacacaaggagcaaaagaaacaaggagtcaagaacatacctgctcagagggaggaggagcgttctttgcggcgatatcggcccaagtagccctgcagtatcacacgcacacacgtacgcgtcgtccagaaggaaggatagatagttgtaagatcagaaaaggcgcgatgaaggatgcagatcagtggatgtactgggagatcccacttacatgtttgtgaaagatgaaggtagggaaaagagtagagagtagagagattgagggagagaaggttggtcgtttcgagagaagtgcaagcagaaaaagacggcggacggaagacgcacgggtctcgtgtgagagcgcagggtccgcgtcattgcgcagcacgatgccgtggtgcctgatcacgtgttttgttattcaggtgcggtcttaacccgatttaaccctaacagaccgcgttggtgcgactttctcaactcccgacggacataatctatgtctccaggccagtccaagatgagcacagatgaacctagtctggcaagtctgtccgatctggtagcaaccttgccgccaacgattccctccctagaagcatgggccgatcttcaacttacctttcagactatcgctaaggccaaggcactcctccaaggtttgttcgtctagctattcatacagtcatttccgcttgttgttttgagctcaccagccctcttttcttttgttgtctacacgcgtctacctcatcttagacccagtgtttcagactttgccagagccacccaagccagactcgttggctccccttccgttggtgcctatgatgtctgctccatctgctgagccgactatagcaaatacggtagcgactgtggttgttaaggaagagaagaacgtgggaaatgaagtagaggaggttggtttgacgagtcaggacaaagagcatcaaatggatatctcatgaaatcgtatcctgagtcaagtcgagacaagacatcttcgtcttgcttgatcccgaaagaggacgtcaggtcgcgtcgggcagaccggtagattttcctcttacagagaacacccttcgtaggtacgtgtctctcctatggatccgttcatgttgtatccccttgacagatgaatcgtcttttttttttttggacgaaaaactgttctttttctgctttatcttgtgatgggtttcccttcgtcataggatcttcacctctcaatgtcgcgtccgtttgagctttcaagaaagaaatcaagaccagaactcttgagacgcgtctaatttgtgtagttgtggccgtcatccaaccaggctgtcgctctcttctctttcaagaatataccatgaccaactttgtgtcaagagaagaaaaaaaacaagaaaaaaacaaggccaagaacatgccattggtacaaaacgattctttctggagagaaaactcatctaaccttcgagcttcgctttgagctgcttctcatctttcttccctctactggtcgttcctcttcctttgccgggcctatctcgtctttcttcgccttctcatcctccgaggcttcttctgcgccttcagtatcgacgtcgatatcgacatcgacgtcatcatcaccgatgtcagcatcatcagtgccgactgaagggtgatcatgttcccagatctcgagatcatctgcgatctcgcctaaccgtttgacgagtcgtcttactttcccttctgccgcatactatggagatcccgcaaagccagaacgtgataagagagaagaaaggtgtgattagatcaaggattcaatacatatgagaaaagaaagaaaaatgagaggagacaaacctcgccgacgagcgtatcgcctggttgccagatctcctcaggcaaaccagtcggaccggaaaggtaacttaacattgatgggtgatgcattctgtttgatcgcaaattggcatccgttcaagacaacatcagacggctgttctctgcctctttctgaacataccaagaaaaagcaaaaggcttacaagagaggatctcctcgggagactgcttcgtcgatcgcttcgtacgaaatcaagttttgcaatctatgtttcccccagattagggcacgaacaaaaaaaagagtcaactttgctatctgatctcgatcttgtcaaccagaaaagacagaaggaagaaactgaaagtaagactaacagtctgattgactttgaggtcgaaaaccgagcccacctcgcccgcttcacactactcataccttcttcgacctcgagcgtatgcgcatggtttccattgccattctcgtgagagttttcccttcctgaccttcttctttctgacccaaaaggcggaccatagaccctgacgccgaagccccaatcctcaggggtagccgcttcccaagtaggagtcgtatggacgtaggtcctgtttttagaatccgtcggcaagaccgcgctcgatctggccgaaaggacagatagggtcgaccgatgatgagccaataatcggagatgagcgtgttgggccctggcaatgtcttgacggatcatttctccatctttcggctgttgttccatcctttgttcgaggttggcgaacttttcgggttcttcgggttcttgttcaatctcgacattcatgggagtcggcaaatttgtcgagatcttgatttccccaacttcatcaaccttgacatccccagtctttatcctctctctttccctttccctttccttctctctttccttttctctctctttctcgcgcccacgaacgttttccagagcggagatctcctccatcgagagctttgcctcttttgtttggattctggcaacctccgagcgctcctgaagtccttcatcgataacttgtcgagcatcgggagattcaaggatcagatggcttagctggagaagaaccgataaggtcgaacactgtcttcccttttttcctccccctgccgacttgctattcgtctttgttgaaggcggtggtggaggggtggcagtagtagaaggagtgggaagcgaggaggaagcagaagaagacagggcggaaggaagcaagagatgcaaatctcgaagggaggtaacgaattcagacatcgttttgcatagttcgtccatcgggatcgtcgtgtttgacttcatccgtttcctcgctagggcgtagatctgagtatcatcgtttcaagaccgatcagattttcagaagaggctagaaagagaaaagacagagaagagaaggaaataaagaaacatgagacaaacctcatattcccgagcttggacatcatctacctcttcgtcatcttcatccaactctggtaactgcagacagagatagtcaaacatcgttccaaataatttccgaattgcctgattttgaaccggtctatcaatttgttcaaggttgtcgaacaccttgtcactagtgtgaaggagaagaagttcgaagtatgcgggcggccaggagattagatcgcagatcacgcaaggagcaaaaagtcaggacacgcacggaataggaagcaatgtcgagaactaccagattccaataaaggaggagagaaaaagagagaaagctagtcagtattttgagaatgaaaggaagtgaagaggaaagaaagaaaaaaactttgaaaagacggaccctccagaagaactccctcagctcgactcgaccgacgagcccttcttcgattgtacccgatcggtcagttttgtccttccatccaacgatgttctcttcgtcttcttgttcgttctcttcatcgctttcttccttctcacctcgacgattacttcttatggggattccttcgacgccagccacagcacctaatcctcctggtccgaacgtcgttttctccctcagcgtttctagtctgactctggctgcgagcatcaacttttcccttcttgattcctcttttcttatccgcttctggacgtctcggagttcagacaagaatgctttttgggcggctgtcggtatcggaacgggcgatggtggtgggagaggaggagaagcagggaacggagagcatggttccttggtgggtgtaggtatgggaggaggtagaggtgagaacgaggtgaggaaagcgggtggagtgggtaaagtagatgagggggaaagtcttgaaatcgttcggtctgttgatgagtggacgtcgggttcggatggtggtggtgatggggttatcaactttgatcgtttctgtattccctccccgaggaagagagaggagaaaaggaagtgaaaaaagaagaaagatcgttcgcttgaatctcagccgggagtcgcgcgtcaaacgaagagagaggaaaagaaagaggcagggaccgacccgagaaaggttcttgatctttttctccttctccttcttcccaaccacgggttctacgctatcaatctctctaaccgtcaagccagccgctttctttgcggcatgtgaaaggtttctgataggtccatgatcaaataaaattcagcctttctctcattctgaacgcattttatgagcgcaacagagaagaagaagaagaagaagaagaagaagaagaagaagagagacataccctaacgggacgagacctctacgttttctacagatagagcactgcaagccagccatacgcgggagagaggaagaagaagcgaagataaaactcattcagctcatctcttgcgcagcgtatccctatccctctctcaaacagaactaggcaaagtggaaaaaaaggcaagagaaataacgaacgaacctgacagatttcatcacaactcgggcacgtccatttgtatttcgcccctggggcatgtgtttggatctgcgagtttatctgactaggatcgagctcggactgagcctctaaggtgagcgtctcattctctgaaggtggagctgatgatttgacaagttctgggtcgatgttgtacctgtttatcgttggaagatatcagaatttcgtttctttcgcagcggaggaacgaggacggtcgaaggagagaagaagagaaaccaaccggtaagcggcacaacgatcacaaaagaccaagttgcattgtctcaattttggtcctttcgtccttgaacatcttaggccactatcataataccctcgacacttacgccccccgaaccaagcgcgcatcaatgtagaacatcgtgattccagtgaagcgcgcgcaagtgtgtgagcgtttggtttttctctccgagacaaaacaagataaaaaaaggttgatacctgatgacatgtcagactatcacctccattgacagctctgtttctccttttctttcccttcttcttgtccttctcgccgtcatcttcgccgtcatcctcgtcctcatccttgactttttgctctactttggtctcgacttgttttcgttcggactttgaatcagtctgtggaccgagtttggcaggcgccatccgctttctcttcatccgcttccctggtggccgtccgtcttctgatcgtggtgtgcgcgattctcggtcgtgagcatcgttcccattgacatggctgagctcggtaccgagcgtatcgttcatggctatatccatccagggccggcgatgaatgtccggcctgatggctgaatgtttgtaccatctcgtctcgagaaacccgccggcaggattcggggtctctgtcactgcggctaacggtggaagcgggacctggccggctaccgagggggacgcggacgtggacgcagagttggcgtttggtctgaacgtagaccttatcagcgaggtagcttcttctcgttcttgttcctcttcttcgtcaaacggttccagggacgattccctatcttcgttctgttcttcctcgtgttcgatcctaccttgaactgatggacgagtggagaaagatctattgggcgagagagaccctaaggacgctgcatcgtctgttggtccataggccgatgggggactgtactgttgttgattgtggtcatggttgtggtgatgatgatagtggtgctgactaacaagcggactaggaggatgactaggacgatagtgacggagagggggtaaccggttggaccggaaaacattcccgacgaccgccgaggaggacgaggacgaggatggaggggaggtctgagcgatcgacgttgacgagaggggcgcgttcgagagcggatgggagtagtcggccggatgatatgacgtctgatggtggtgctgctgctgctgatgagggtattgccgaaaagaaggcggatggtagccttgtgggagggagagagggagtgaaggggcctgctgatggtactgatggtgggaggtgacaggtggttgagggtatggattaagtaatgaggagagcgaggatgacggaggaagaggatgtttgggagaggggagtgcaaaaccagaggagaacgaggaagaagaagagtgagaaggactgtggtgatacggaccggccgcgctcggcatactggtagaggcgttcgaatgagttgcctggatggtcgtagaggaggccgtcgagggacctatgatgggcgggagatatgttgacgagagaaagactggtgggagctgtagatgaggttgcgatagggacgatgacatggcggaaggctggagagggtttggaggacgaaatgatccgtagaatggataatgataatttgaattggccatcctttcaggtatgtgcatgtgtatgtatatttatatgtggatgagcgtatggatgagggtatgaacgtgagcgtgaaccaaactagcgggatgtagagtgatccgaaggagcaggagcaagagcaagagagaaagaactcagaggatggtgttcaggatgggattgtatggcggccggttggacccggatgacgataaaatgccgagcgagtgatgtagtgagcggcagatggagtctgtgaagccgacgaaggaccggatgatgtgcagatccagataaacggacaccagcgccaacggtgagcgagaagcgaagaccaagcagcacggagtgatgagcagctgcaacagaccaacaagcaagcagaccgacgagcttgacgaatgagcttgaccgagttgacgaacagagacccggaagaattcaaaagaagcgagacaaaattcagcaggtattttattttattttatattttttgtattttatattcctcttcctcttcttgcctttccttcatcaacccagcctgtttcttcggcctctttgttctctctctctctctctctctctcgggtcttccgtgtgggtgatagcgcgcgcgcgtgtgtgtgtccatgtctgtgtgggcgtgtcgatctcaccgtgtctcggtctatctcccacgcgcacactaaccctaacagaaccatcctgcccagcttctttttgctctctccattcttttcctttactccttctctctcactcactcactcactcatacgcacacacactctcatcctcttctgtcgtgaccaccaacacaagcatggtcctctgtagtagatcactgctctacctccgtagctcgtccagcttggttctctccagatcggccggttctcgccaaccgatccaaaggcttccttcattgttcaactcgatcagcctaagctcttcctcctcctcaccacgatctttactctcagcctcttcaacatcacttccgtcttctctctcccggccggccatcagatcgttctcgtcctctcttcccaaacagactccgaggccagggttgttgaagaagaaaaagttgggaaagtacccgtggagaaactttaaaaaggtaaagacccactcgggttgcaaagccaggttcaagtcctacaagaatggaaccgtacgtccaactttcttcatcttcgtttctttcttcttctgaatgctcctgacttgatcgtttctcaccctttgtcttttttgtttgtgtgtcttgattggttctttcttcctccagttcaagcatgtacgtccctcgtctgatctcttcatgtatcgtacattacattaccttaccttaccttcctctctctctctctctcttcctacagatcaaagcaggacaaaaccaaaagaacatcaaagacaacgccgccaagcgacatattggctccgtaaagatcctctgtggaccggtgagcgttttgcctctatccttttctctttctctcttctctttctctcttctctttcctaacgattgcattcacactgatcatcatgtctcttctctcctttcggacgtccctttccacccttccttgccttcctcgtcctccttgccctccctccctacctccctaaaacctctctccagatgcaaacgagaaagcttaagaagcttatgccgtactggaagaggacccgaagaggaggaggctggtagacttcccttgtctctactggacataggtgccaggtgtatgcgtgaatgagaagatggagagcttttttttttgaaacacgaaattaggaatggacattatttctctcgcatctcttccccctcttttgctcctctctttcttcttcggtgttcttataaaggcttcatgtccatcagcctctttctcgatctccctctcttcacacacaatctgaacttatattccgaccttggacccgacctctccagagttgaacatacctcgccagagagcaaacaacatgtccggcctttcttcctgcatctctccctgctcttcttctccctgcaactcggacaaagaaggtttcagagttcgggtctgatcaagagcgatcgctagccgagtagctagtaaatgcttgcactttttcccgtgtcagccggatcaaaccaaaaaaaaagaaaggcagggagaaaagaagagcaaaacgtcaattctcaatcctttattaaaaccaagtctcagatggaaagaacgaaagagctgaaagtgaaaccagaagaaactataaccggaagaacaggtcggacgtacccaacttccctgatattgatcctctccttctctttgcttctccgatgatagtgatgatgacgatgatgttcccgaggaaagaaacatggcatacccaaaagctggacaagaacaatacgctcgggtccttgcgcccgtgtctgtctgtgtgggcgagtgtgaacgtggggtcacgaaaggcttagagtatatataatatgaccgagaagaccctttgacctgttgtggatatcgcgtgtggtagcaagtacagatcagcctttctcgcatcctcaacagtctgggtgactggacgcctttgagggaaaggaggcgaaaggacacgcacagcgtagatcgttcgaccgtctctagccgagattgtttcaactgtatctccggtttccgccaaacagtcccttttcagaatcgttagtccttgaagcctggaaagaaagaacaaaaaagcaaaggaaggaggaaatcaccttgaccgaggtcgacgattttcaatgcctcgagcacggtctcgtccggtaggaagaatgccaatttaagaatctcgtcatctcgtactgtcctcgtacacacccaatcatgttttcccaggcgtaagatgtagattgacgtataagaaagtaacagagaaggaaagaaagataacttgttcggttagacgtaatgttctcgagaacagatgggaatactttaccgaatgtactgacgtttgggaggtcggatctctcgaatgatagactctaatatcgaacccgttgtatccatcctttcaacctttctcaccttttaatcgtcagaatatttatgcgcgtctgtacgttcacgggtttacatccgagtctcttccttcacagaaagatacgagccagatgagagcacagataggatgatgctgggtagaggcgcgccgaaggttgcaatcgagacggacgtcattcgcgggaaacacgaatagatttcgtttgggatcaatctcatcctccgatcgaacagcaacccgtcattctaccgagcgtgcatctctgtcctccgtcgttatcatccacatactcacatcacactcatatcataagctagaagcacgtaaatcatgtctgctcagccgatggcgtcgtcctcttcgtccggtttgatctcttgggtggtcaactggttcagaaacctgttcttttcgaaagagcttgaagtgtgcatcgttggtctccaggtcggtcctttccctcttctctctctatcctctttcatccctgtgtgcttccagcggaccggaaacaaagagagcgagagagaaatttgctgactcggtcatctgtttccaatcccgaacgaccaggcttccggcaagactagtctagtgaacgtattagcaaacgggcaatactctgaagaagtcgttcccactgtgagtcaattctggcttcctccggctcgctctatctctctatttcctgcttcgtcggagggctgatctgtactctcgatcgtgcttaatcaatttaaatctcaaggttgctttcaatgtttgtcatctgatctcaaacttcgactttcactgaggctgggttgctgatcctgaacaactatctttgaatcttgattctcaacccctgacacttaactatcgatatttgacctctgcctcttgatcctgttctatcaaacgatcacccgtagctacgaagagttaccaagggaaacgtgacactcaagatatgggcgagtcgaccttcttctctccctctatgagaggcctaaacctatgacttgactggctgacatgcttctctcatcaaaacaggatgtagccggtcaacccaagtttagaaacatgtacgtccgctatctctgctactattaatcgccccaaaccgggctgactagaattgtgtctacccttcttcggtcgctcaactctggggaaaaccaggtgggagagatatgcgcgaggtgttcaagccatcctgttggtccagaaactcttcttttttgagatctgtgatgggcctctctgggtttcttgtggctgacctacttgctctcatgcattcagatacgtcgtggactctgccgatgtatgtactctcctctcctttttgatctatacacacacacgcacacacatacctcttgagagataacatctaaccaatcgacccactgtactcttgggtatttaatcagcccgattcaattccatcctctactcatgagctccatgcgctcttgtcaatctcagagctgaaaggtatcccactactagtggtaagcctctcttcccacggcatacagagtaaaaaatcctacaatcgttcatcccttcgccttggcttcttctgtttcctctccctgtttcctctccggaattttattcacctggacgatagcttgggaacaagagtgatctaccaacgtcattgtcgatcgaagaactcatctctcagatgaaactcaacaagatctcgaatcgtcctgtctcagtgagtgttcattcttcaacggtccccatctactctgtcacagatataacataaagctgagacataggatatgcttatgtatactagtgctactcgacgtcgatgaagacctcacataacatcgatatcgtcctatcgtggctctcccaaagggcaaagtgatagtttcttccttccacctccttcacgtcgtgtgcctctccatatacttctcttgctctcccctcttccaactcctatattatttgtattcttttcgttcttgtgtattttgagatcgatgaccatgttcgatccatagataggagcacacagataaagttgatatacagacggtcatcgtgtttctccttctttgagtctcgcggtactcgaccggaccttgagtagcatccctctacgaggacgatgaaaaagaaaagaacaagagcggagatcttgagcgcctctccaaaggacccaaaagaaacagagattcaagacactatccagaaagtctgtaacgaaacctcgcctgaagtcggttggcccatatggagtcttctcccaggtcacgtggttttggagttctccaaacgcgtcagataaacacattgccaaacccgcacccatcgtctggttctcgagacactcgcccttccgttctcccttcccatcgatatctctcgactgaatacttccagaaggactgaggaccatcatggcttccaaacaaaacagacaggtcggtcgattgtttcagaggatgttcagcagactcggtctcttctgtcgcttgtcttagctaatcttgttcatctatccgatgtccgggcggggttggttacgtgtgcgttgctggaacgattggattatctcctggggaaacgtagaaagtcttgctgatgggaagatcaggtatgtccgctctatctcgaggacagacagatttacaacttgagatgatggccagtctagatgctgacgatggaaggtctatcgctacctttcttcttcctcctctacgcaagggagtggaaagacatctatgagacaagtcatcttgtgagttttacattgactttcgacaaaaagaacaacgcgtaaaaaagaaaagaaaatcctctcgtatggacgcgtaaaacatgaatgctgaggactccttctggtcgtcagctcggcggaatatcgaccggtagatacggggagattaggagcgacagtagatgtagagagcacgaatgtccgtctgtttaacaacttgcatctaaacgtctgggtatgttccttctcctcttcttgcttgtctctgtacaaaatcgcaggagtagtcgttcagagtcagcttatctttttgacgttttgtctcgatccggactcgttttctctttccaggattgcggaggtcaagattcttacatggacaactatttgttctcttcagcagccaacacatttacgaacgttgcgatctgtgtgtacgtgtttgacacgaaatccgaagaatgggacaaagacgtcgagtactttgagtctgtcctcgataatctccgtcaatacagcggaacctccaacgccgaatcagacgacgaagatgccgatggtgaagctgggacaaaaaaggttgatccagactcgttacctggggtgtgtatcttgatcaataaaatggatctagaggacccgagtgaacgagcgaggatcgagagagagaagagagatgatctaacaaagaaggttaaagctaggctaggtggaaaagtcatggcgttcggaacgagcatctgggatgaaagtctctacaaggtttgatttttccttcttccttccctttcccttccactcataaagaaatggcccaacaaggaccagaatacaagtcccgtatcatgctgacattagctctgttcaatacaggcctggtcagcgatcattcgaacgttgatccccaactctcaacgtctcgtcgctcatctctcccggttatgcgacaaagcccacggagcggaagccgttctatttgaacgacagacattccttgtcgtcgctcggtctcgaccgattccacccagagtaaagctcgacggtcaactcaagcgaccgaaaagaatccatgccgaggactggagcgtcgtaggtgaagaagaatcgagtaatccaatcgatggcactgtaggtgcctgggaggagagcgagacggatgtgggcgagaaaaagagatacgaaaagatcagtgagatgatccggagctttagacatatcctcaacaagtgcgcctatccttcttctttctttgctctgtatccttgcctcttccttactaaccacctaccaatgacttttacaggaggattgaatctcgatggacgagctggcaatccaactttgcaaactgttcagttgcaatcgatgagttcacatcatctacatattgtcttattctctccaatgataaacttgccagtaagtctatcatcgtttcgatcgtgcaagcttgcgcactgacaagctgttttacatttggcgcgttcttctgccccaccaaagaggcagacttcttgctaggaacgatgaaagctgctcaaccccactttgaagaactctcaaagggaacggtcctcctcaaatgcccgtacgtgttttcttacaaatacattcggcttataggtcgatgttggcggaaagttgtttactcaatcttctctctatctttgaaatatcacacttatcttcatgcagaatctgtcgaactgatagcggaatcgtctacctaggcgaatcgtcagatgattcacattcgaactcaaacggaacgggggcgctgggcctacaactcagtcatgccactattgaggactagtctctcctggcctccccttcccttaattttcctttgtgtcgctccactacactccgatcctctttctttctttcctctcttttacttcttctcaaaaaagggaaaagacaagtacatatgtgatgttgtatgagaaaggcctagacccaccctctgaggtcatgacccccacaccccttcaaacaaaatgaaccgatttatctgccgttcttcttaagaataccagtcctgacggcgtttcgcttgaggctagcgtacaaggcgagagcttctgcgaaggtagcattattgcacaggtcgaacgcgctcaacgtctatgtaacaaaggaggagaaaccgagagagaagagaataaacaaacgctcagaagtaagtacaagctaacaaaaaaaaagaaccggctgtgtgagatacgtacctcgagatgaagtaccagataacgtcggacattggcactatcgatcgtggaaaagtatcgagtgacaaaaccgatgatgtgtccgtgcgaattccatggttgaattcgaccgtacttcatttgtttcaggaaaaagaagaaaaaagataaacccagatcgcgagttagatccctttgtttgtatgtttagcatatggtctgcttagattggattacgtaccgagtctacccatctattccacaagcacatcatgaatttctggccatcgtgaatagcttccagatcaaagatcgcctgcgaaggaagaaaaatgatatggaaaatcagtcaatgacgtcctggtatatggcaccagatgtagcgaccaacagatacagagaaggagagagtggactgacttcttcgcgttcaaaaatctctggatctcgaattcctcgatccaaagcagtcaagttgttcgccaagcttcctttccaaatcctctggttaagaggcaaaggcgcccttggaggggacggcttgaacgtcggaccatcgggattgaaaaccatagtgaacggttgtgggactttaacgtagttctcatctgcatccgatgaggtccctcgttcatggtgggcttgccctccaccatcggatgaggtcccagtcgtcaacgatgcgccatcaatgaagtcagtgtccgactcagaatcatctttgatcacacggctcttgtttctcttgataggcgagtccgtcgccggttggacgattactccaggtaccgtagccttcggcgtatgccctctgacagatcgtgtcgcccaatagacaggggttgcctttgtcttggaggaagaagagttagaagtagaggatggcttgagagatttctgagcttgaacagtatcggtcgaattccaagaattggcacactctaacccccatgtcatcttcgggaggactactgatcctctgatcgtaagcggcaattgagtacctggcagatccagataatctctctccgctcctctgggtcgaacgagttcgatgagacatcccgggagttggatggtaggtttaccctggttgaatggcgctagttcgctcaagatccactcacatggctttcgatggttggcagtgaaagagagaaactggatttctaatcggagatgggtgtcttgacgaagcccctggtcaaacatgaaaggccaatcagatggaagaactctgaacgtttctggaggaagattaaactccagaggaggttcgaatgtggctgattttttgcgagggccttcaaatcgaagtcgggagtaatatgtagtttgtttaatagtctgggcatcttcataagatggagaattagcctgtaagaataacaatgggaaaagccagttataaagataaacaagaaacgcggttaattactagtctcagttcaacgctgtagatgaaagactaaccatctgtgccttcacggatatagcgcaaaattttggaagcttgaatttgtcatttctacccgatccaagagaacacgattgaatattgatcgtataagatgatctagaagacgtcattcgagatctgtaagcgttgaaaaagggaagaactccgtcatctcaacgaaccagagaagtggaacttccaattggcagtacttacaacttgttcgcttttacggaaaggctatctttgagaggcgcacgagacggagaaaccaatttagcggcctgtagtttggatccttgttcaacaagagaaggagaaggagcaaccaagggagggagaaggcaagagagtagtgggatctgtttctgaacttgaagtatttctgagttcggcgatggagggaaagagggagctggcgaaagcgcagaaggagcaggcacaatgatcggatcaggaggagcgcggttggatataggcagctgcttaactttctcgggaagaaccgaagggggttcaggaagaatttgaagagggagggctggagagttcgttctcaaccttcggtcgaaagcgtcgaggaaggctttccacatggcattctccagaaaagtgattgagtgatcctccatggcaactgacgaacgaaagaccatcgggcagttagttcaacttaatccagttcagtccgttcttgaaacaagctgatcgttgaaaaagtctgcttacaaatccaggacattcgacggtgggactgatcgaataacatatgcattagatcaaacggagagaggtctgatcagtttaaaagagctcaaaaaagtactaagaacgatgtgttacctcatcaaactcggcctcttgaagatcatctctcgaacacagaaagctatcatcactatcacagttcttgcagagcatgtagactgttttagtccgggaaagaaagagaaacgaagagaacgaacttgagaaaacaaacacaatggcagaataggttaaagtgaaaagagaaaccgcgcatagagagtgatacgtacacatgttcgaaattccaggctcattaaagatctgcacaatcgctaaagccggctctccctcttcactagtgctcaacattactaacgcctcaaacgacaaaggttgggttggaagtgatcctccgatagcccgaggcctgttgctatgtttgtgtgctgaagatgcagtctcgtttgagtctgaatcggaatcaaatatctcgattggcgaattaaactcagcaatcgactcgtctgaatcactcagcgtagtgtcaaagagtatgttttgttcgtggggtaagaacatctctgatagtgctgatctagaacgagaaccaggagatgggggagtgtgtcgagaagaagattctgagggaagtggcagaagtaaagatgtaggggttgatacagaagacgaacgactgagttcgagtttgggggtagaaatgggtgtcgagactggggttaaaaccgggataatcgattcgacaagtttgggttgaggttgaggttgattggcttccagctcagatgacaaggcgggagtgagggtaggcataagagcggatacagagataaatggaatgacaggagcaggaatggaagaaggcttttgtagaactggtttgtcgattgatatggattcagaactgctgtttgcaactagcttaggtctgaaagcgatgccaaagcaaacatagaaaccgttaaatgtgtcgtaaaggaatacaaaaaaggaagtaaatactaacaggttcgtttcctccttaaaaacaacttcctgctgatgcatctcttcttcgtctttcttcgtactattggcttcgcttgatgtgtccagtactcttgaaggtagttccatagatgctgataacgcagtttggacatccgaaggagtcgaaaccgaagcaacataaacagggagcgcgcttgccgagccagcagatgaggtcgaagacagggataaaatcgattctcgtgtcactcgagcagcagaggaagacgcctgaagtggtattgaaggcaagctcgaggaagatgcaggagcaggactggcagcgatttgttccaaaggcaggcttgaagggacctcaaaaggttgaacgacaagcaaaggaagcttcttcatagccgtggccatggtctcaccggcaatcgtagctgttaccgttgccgctggcttgagtttgaccgatggatcatcatttgacaaagtgagcggagagactgaggaaacctccttctttcttccttgactctttttcatctccctctggcctgtatctgaggtatctagtttttgttccttctccactacgttatcatccgggttgtcacaatccatgacggaggcttgatgaaccggcctttggtcgggaatggatgtcgagacagccgcacttggatttgttttcggactcgaatttgaagaaatactatagatagtgagagatgtctcaagacgcgtttcggaagatggtcgagactgagggacagacggccgaggagttgcagactgcgattgtggaggcgacgtttgaggtggagggggttcagaatttgaagagttggtccgattaggaactataggaacaccattcggtaagatctcgttatttggaaggtcgatcactacctgcgatgaccgaacctcctgttccaacgacttgggctccactgtcttcttcttcagcactatcttcttcccagtcccggttccagctccagtcttgttttcacccacaaccttgtttctaacctcagcctcaggcccaactttactctcccgattctttctcttatcttttttccgtttctttttttcagtgctcaatccttcaactgtccggtcttctttccttttttttcctggccgatcattctcagacttgtcgtccaatggacgcttgttgagattcaacagaggtctgttcgtttcaagctcagatgacgaaattggcgttgcggttggaattgggatcggaatcggaattggaatcggaaccggaactgacacagggatagggataggtatagggacaggagcgtctcttttttgggtcaaaggcagaggggcgcgaagctttatgggttttgaagaggatgcatgagatttgttggagactacgtaggatggtgatgctgataatgccattgatgatgaagaggaagaagagggagaagaaaaagaattggcttgggcggtgataagttgaagtcgtttctatggttcagattaagtgatcaccaagtgcgaggttagcagcgcaagatcgttttctcgtcaatggttcaactctatagacatattacagaattatgcaacgaaccctgcctttgtctggactattcgctgtccttgcgtcagacggcgttgtccgcttggtcttgtttgcgattgactctacgagtgaagctgaggatgaagttgaagcgagcgagatttgccttttcttatgattgactccttctcttttgtcctcgacgagtttcggtgcgcgcacagtgattcttttcggttgaacgtgcggcgtgcttaacgtaccctctggaggagagttggcaggggattgcttcgacgaaacacacatggagcaggaaggtgtagtagcacccgaagacatggcagtgatattggatcgattcggctgagacaaggagacgtctgaaagtttcaagagctttgtcgctggtgatgtaccagccgcctttggtcgaataagtgatatctgaactggcgaatttgcgcgagatacttgtctgctgggcggagacgatgacggcagagacctcgtggccaagttcgacctatttgtcgatgggaaagcatctaaaggatcacttgaaggttctgatcgagtcttttctgacgtatattcgtcctgaggaaaggagttggccgagattccaccggaagaaggccggctcggaggagggggcccccttgaggtggacgcgacggaagacaggataggcgaggagatcgatgacgcgtttatagcatgagacctagaagagacaagaggcgcagagggaggaggaagatacacggtgggagtggtgttgacgactgtcgttcgaagattgttgctacctgttgacagattcggagggcgcggatcggtcgaccgagcagggcgggtaggcttggaactcagcatcggtgagccgactgtggaatcaaaacgaaggaataagattcggaaacgaaagaccagcacaaaagatgcttcactatccaggagtgatacacataaagagacgagaggcaacgaacagacctaggtcggattgacaatggttgaccgagacgcgttgaatgagaggatcgcgattgagcatgaacttgtaggcgagacgtttacgccaaccagcgagactttctcacctccaattgagttctgtcgcctctgatgtatgaatatatatgcaaccgagtgtgaacacgaatacgagagtgtggatatatacgaatgagggtgagagtgagagcacaaaagaatctgatgatatgatgtaggagcgacagatatgaatgtatgccgttgggtacatgcgtcccaagtggagagaacaataaggaatagatgaaagcacttaatattcataaatcgctacgaaagctcgtccggctataacttctattctctcttgctcggctcacttctgttcgcatacactcccaccttcatcccatccatcgcattcaagagccatgcgccgtgttctattgaaacctcctctgctgcagaggtacatggccagagccgttaggacatcagtagctctggctcctctttcagttcatcgaccatatcgggcattctccagttcgcctcacacactcttcgctcgacctagcttccatccaaccgacctagataccgctgaaccgttgcctgcacagaaacccattgtcaattcgcctttgggcaaatacatctctctcgtggactctggattactcatcaatgatgatcatcagcgaaagatcgtgcgcaagctgcaaaatctacatgacaggctcgaatcgtactatccaaaggatattccagacaaggttcctcagccttcttcccggggcggaggctttctgagtagactcttctcgaattcttcccctccatcatccgaggacgtcgtcgatcacgagtcttctatgaccattcctgaagatgctccaaaaggaatctatctctatggaaccgttggaacggttcgtgtctacgctcccttcatcctttgttactcttctttcgtctatcaagaaatactcatttcggccttccccgctgtaattcgttttctcgtcttctcatctttcttttgactttagggcaaatccatgctcatggacctctttcactcgacccttccatcccagttccataatttccgtcgccgaatacacttccaccagttcatgctcgagtgtcacaagcgaaatcatgcctataagctccaatatggagaactcggagacaaactgggtgaggtcgccagggatcttgcaagagaggccagagtgctcagctttgatgaatttcaggtgtgtgtgtgcattcctttcccctgatcatatctcgatcatatcttgatcataatttgattttactcgaatctgacggaattttctcctttttatcactctgttcgcctgataggtcaccgacattactgacgcgatgatcctccggaaccttcttgaaagactgatgggatatggcgtagtctgtgtcatgacctccaagtatctatagcccctcatattgtctcgttcttctcgactgctaaccacaactgtatttctttcacacacacgatcctagtcgtcaccccgatgagctatacaagaatggacttcaacggcagagctttttaccttgtattcagcttatcaaggactgtttcgagatcgtagatctcaacgggaacggtttgttcttcttcatgcgctcgtgtcttcttctttttttcgcaggttattgtataggagctcaatttttccttgcgcgcgcgcgtgtctgatactttcatatagactaccggcgtgtccctggcgctctgaacaaggtctatttcgactcgagttctccctccgacacagcagagtttcgaaaaatgtttgaatctcaaacttcggaggatcttgtcatcccagacagaaagatcgatgtctggggtaggaaattggttgtgaaggagagttcggaaaaggtcgcttggttccggttcaaagatctttgtggaaagaacttgggagcggcagattatttggaggttaccaaacagttcgggaccatcttccttggaggagttgagtgagtctctgaagtccttcgtctgtctgaactcatcttatcacccaagaagcatccagagctactgtcgaactaagcaatccatgtttctcttcaaagaaaaatgaatttagacaccaaagataaagttcgactctcttcttttcccttctcagcaattcataaaattcttcaaaaagtactaacgacaagacattctactcatcttcatccttcttcgcactacaaaaaggcgcgaagattcatcactttcatcgatgcctgctacgaatcacgtgttggtatcatccttgcctatgggtctttcttctttacacttctcgccgtgttctagatactgatgttcgtgtctctcctctctcgaccagacgaaattatacatctcttcggaagcgcctatcatgcagatcttctcaagcgagtctgaatcggatagcttctatacagactatcaaaatggaggtatgtcttttctctccacacaacttctggtcatttacacaaatctcggtttgacgttttctttgtacacatcaaaaatcagtgatgaaccaacaagacgtctcaccagatgcaatcacctccccaatattcacaggagaagaagaagtctttgcgttcaaacgctgcgttagtaggttatcagagatgggaggtcaaagatgggctcatttctcagcacctgacgccaacggagacaaggccgaggtgtagtttatcctcagtcactctgttcctctcattgctcgctggttgttcttggttggaagagaacatggtcgttgggtctagagataaaaaagagataaaaaaaaagataaaaaaagatgaatagagataccactcgacttcccatcatgtcaagctggatgaagagaaccttggatcgccttttgatatctatacactttgtctatacataaatatataccccttggtcgaaacaagcgtcttaatccttacctcagaaaacaaaagtgaggacagccgtgaggtcacccatttacatcggatgacgccgtttcctcagcttgatttttccttgagcctttcattatttccctccaccttgatcttcctcacctgatcttgatcaaatctcttttcttcatacgacaaacggacgaccgacagatgacgaaccctctagactcccaggaagaaatcgaccccgtcctagcctctcagctacatatcacttcacacgagatctctaccatccttcaatacctatctctccctccgtcgaccattcttcctactcccgcccttcagtttctctctacccatctatcctccttacccccctcactagccgccctcttttcgaaagagaccactccgaaagccagagcttcgatagcaggcatcagaaatagaagatttaggtgggctaaccaggccagcactccaggagtgttgagagtagggagtgggagggagagacatccattattgttcgatcggattgttgggtcgggcatcgatctacattcagggtcatcctatgaagaatctgatacagcaagtagaggaggaaatgctgatgaagaagaggatgatgaagaggtgtggggtcagatgaagggggtgctgggtgggaaggctaaggtaggaaagttcggagcattgatgaaaggattcgaagaagaacgtgagggagagagacgccgagggcttcgaagagaggaaatcaaagctgaacgggagactggtgaagagtttgagagtgatagtgacgatgacgacgacgatgatggcgagaacggaggtgaggaacgaaagaggagagaggaggatacgttttggggtgagaaaggggaggataggattcaagtcttcgaacggatcctcaaagagaggtggatagacggactcgaggttcgtcctttctttcctccctcaatctgccttgtctctctctatgtgcgctcctctctatatatattctacaacttgtataccaacatcttcctttcctctcctttgtctcgcgacgaatctgcggacacgaatacaggatttggactacgatgccgttgactatgacgaaacatgggatgaatcatctacagagtctctctctcaagacgcttggttcgatgatgagcctgcaacaagttcactaggcggcgttctaactgagcggagttctcaggcctctggtctggctgaaggcgaatacgattattgatacaagatgtcgggttgacttttggaagtccatcctctctttctaatatctatgccaccaaaggactatgctccgctatcctcgcttactattttcctcaatccgattctacgtccggatgtcctgtcgaattaagtcctcctacccaaaactcgacctctgttccgccatggcccggcatatccaacaccttttccaaccaaatccccgcctctctggcgagtgtccataactccctttctgctcctgttggatcacgttctttgaacgctaagagcatcagcggcgatttctcagacggttgaatttcttgaggaggacgcaacaggttggagactgtatggaggagagcagggaagatcgacacgttgtatgtcctatgggccaagtggtcgaaccagttgaataaaaaaaagcttgtcttagaatttacatgctacatgcaaaggaaaggaaaagacttagagttgatagatgaaactacgtacacgtcagccatgataatcagatctagccctttgggttctccctctccagcgtcccatacccattcggggatactcttagatgtccagtcgagttcacgagcgacgatctgagctttggacgcatataggagtttgttggcaagtgtattgatgtcaatcaaggggagcgcggatgctatgattgttatagaaagagaaaaaggagaagaagaaaagaacgattggaccaagagtttagtaagaacacgctacagcggaaggaatagaactgaatttcaagcaacagatagaacccaccaagatcggtagccataatggtgtgtaattcgctctcacaaggggagatcaatgaagcgaggttgattgataccaaaccgctaccagttcctataattaaggagaaaaggaaagagaatggcgcgcacacgcgcctccgctgtcaacgtaggcagagtgccgagaactagctttctatcttcctcttctgaaggagaaggaagactaaccgagttccaaaattcgtagaggttgctcattcgctcgatccaacacattccacagctgtgctagataattagagctctgagggtattgagggtacgtcgttctttgagagggttcaggcagatattgcgtgaggaaggcggagcaagccaagcctgagtcccaaattttctacagcgaacgaaagaaattaccaaagcaaagcctatgagttcctgtttcagagagaagttaggcaagaaggcgaaggaggagtgaacgaactttatcaagatcaaaacttgtctgttcgaccatgcacattttgtaccctctccccagaccaaacactcttctgatccgatcctgcttatctaccgcaccagttcgttctttcatcccacttaaaacttccttccctctcccctttcctttttcgtttccgtgcccatttccgatcttcttcttcccaccaccggattcgggtgtggagataaaccggatgctttcgctcaacacagggaacggtacgaccgcttctccatcaagcgccgagcttagatccagttcccacaagctcctttcactgttcatccgagcgcctgagtcggtgatggagttgcaggcggaggaagaattggagttaccggagcaagggcgggcgaacagagacaaggtccacgattgaccggaccgaataccaagaggaggtgggatgctcagcggtttataaaccgacggagatcctaaccaggttgttaatgaatgaactggctgagccgtagttgaagaagagggaccttggatccattgatagaaaatctggagggtggattcgagtcttgtgtttgtagagcgagatcagaagaaaaaaaaagaaaattgatcagtaacagcaactaggaccgaggagaatacaaaataagaaaggcttatggcacctaccgagtactaacatttcggtccgtaggtcattagcgatctgaggagtgatcacaaatggggtaactgtgtctgttgtccgaggcggcggacggaggaaggaaagatagtagtacatgaatgaggtcgaggttgattgttcagaagcataatccagccgctttgaatttcccaactcgttatcagcccagactatcaatccaccatcggacatcaacgagccttaccatctccttagtatcatccatcaccagataaggcttgaagcatctgagcgcttgatctgaaaaatacctgaagctatccaaagagacaaagcaaggatgaactcgacgcccgcggaggattttttgttacttcttctctccgactcgaatctccctctcggtggatttcatttttcgtttgttcatctcgttcgtttcgttttgctagaatcgtgtcttatatctactaaattgaactatctatccttgagcacacagagctggcttagaatcaaccaccaaacatgggttcctccctcgtcagaccacgtcatttggtcgtacaccccttgaaccgttcattcgatcgtcccttcaagcgcatgctcgttcaacccttgccttcgtcggcacatcttatgaacgaactgcatcatatatcaatcacaaccctgattctggacgtccaaaaattccagcagaagacaggttaccgaatcccattcaacagtgtgaagatgaagaagatatggagagtgaagaacggacggtcaggggattagtagaggatgatgtgctatacgaagtgatgacgagcaatcaagtgactcgaaggggaagtaaaactcaagggattggaatgctaaccatctggcagaaagcgttccgtcagcctgcttatcttcctttggacgagttggctgatagaggttggaaggaatgcgcggtgaggaggttgatggaccgattgaagaaagaaattagggagggtcgaatgatgggacatcttcctgtttgctggggtgtgctatgtgcagtcctcggcctcacattaggtaggatggtatccagaacatgaggccactgccaaatgagctgactctctcctctcctttactctgctctagaacgaacgctgcatctgcatctctatcttcataccaggtccattctatcctcatccgttcgattgaaccagactgggccgtaccacgcccagacgattttgctgtacacgattcaaccattaatcgaagctgagcttgctctgtatagagcatcacctggcatgggaggagttcgatcttctgaagggatcccgaggactcaggaggaggccgaaaaagcagacgaacaagaatccgaggcagggccgatgaactgctggcctctgggtgagattcttcaaggaaggcacgacgtgatgcactctaggatgttcaacacctgagcatgatcacgactaggaagagacatagatcaaacaaatgttacacatatagggcatatgtcataggattagggtaaaacatatgagatagtatatcaatcgtgaagaaactatatagttgaacgagagaaaacacccaacacaagaaggaacgttcaggaacaaaaggctaaacataagaagagaagtgtaatgaacccacaaacatttattgtgcagatcctttcttcgcggcctcgttcttgaggttttccatcatgacttcggacgtcttcttgagcttgccaacaacaaactgccgaagaatccaagggccgtcgacttggtctacctttgtgacctcggatccagatccaggaacgtctttgacagaccacttggtggcagtcttaatcccggtgtctgatccgatcgataaaaattcgatgccgtcctgagtgattgtaaagacagatcgatatttggagaccatggtgccaagaccgacgggtgagggaaaggtggccgtgatatcgtaggcgttggtgtcagcagggtcaggggtaacctcatcaatgtgtgggttcaaggaaaggagcgttgggatagactgaatcagtgaaatcagtgttgctgcagtctcagtaaaggtctttacggtggaaactttagacattctgtgtatgtgtaggtatgatcacgcgaagatgagatgttgaaagtgatggtgaggagtgaaagcaaaggagaaggagaaggagaaaatgattgttttccctgttctttaactttttctgttcctgtccttgaatcgagtctcttgtatgtctcttgctttctgtgagtgacttcaacacgatgtacagaggaatatgcaacaacagcgagcaagggcatctcgaaagagatggaatgagataccgagaggaaccggagagtggcgttggtcacgtggtataatcttgcacaccctgatatgttctggttcgtgccccgcacagcccggatgatggttagctggaacctctaacaaattgatgcttcatcactctttatcaatcactcacagcatacatcctcgttctctgccttcttacatccttctctttctgtatatctagtcgctcatcacgcagttgaataacagccatgtctcaggaatcttctacaccaggcatcaccctcaatagttcgtgtcctcgtttccgtctctcttttctcttttctatcttgtgcctttccgtgcaacccttccagaaggttcctttcgcctcaactccgtactcacctttttctttctctctccttatagtcaagggcccatctgagctcaagctctccatctcgatatctcctgaagctagttcgtgtttctcttcctttgtctgagattctcgcttcgtactttatcgactcagcatctttttctttttccttcccgtccctacagcggtggccgatctcaagtcagagattgctcaaaagtctgaggtcgaagcgaacagacaacgcttgatttactctgggaaagtccttaaggatgaagaaaccctagcaacatacaagctcgccaccggtcacaccgtccacatggtcaaaggtgccccccgagctggagacgccggagcatcatccggtggggcttctgccgctgccacatcaaccactcccacaggagcaagcgcgtttggtttgccggcatcaggggcgggtacgggaggacagcagaggctgccgactatggccgctgggcagcaggttgtaggaaatccactggcagcgctcgagggagtacaaggtcatggatttggagggtaagcttcatgaatctcgtttaggccatctctcacacgcaagacgagcaaaagagctgaggaattctcactcgatcgttgacacgaccttacaaacagtgggattttcaatccatttgaaggcatgggcaatttgaacgatccaaatgcaatggcaaacatggcccggagccctgccatgatggaacaaatcacgcacatgttggaaaacccagaattcgttgatcaggtcagttcttccacaaggaccgatttgtggttcaaactccatcttctaatgttcggctttgtctctggtttagatcatcaactctgatcctcgactttcagcgatgggccctcagatgaggcagatgcttcagagcccgatgtttagacaaatgctgtatgtattcttattgacaatgtcttcaagaatgctctgagactcttcgatcttccttactcaccgtttgtctctccctcctcttctcagatcaaacccggatatgatgaggcaaatgatgcagatgcaacaaagtgagtgagctaatctctcttcttttatttagatttttttgctcattaccttttgtcgtcgacgacttgagtgatgggaggaggggccggtggtggattcggaggtttgggtggtgcgggtgccggtactgccttccctcctgtacgttacgcgtctttttatctctcttcctactttctacgccgctctgttggatgatactttgattgaaacggtttctcttatagcccggagctttcggtcaacctccatcgacggagtctgactcgactgctacttctaacctcttcggcggcgcagccccgggagcaggcaccggtgctggaactgctgggggcaatatgtttggaggtcttccaatgccgacgccggaacagatgcaaaacatgatgggcatgttgggcggtggcgccggtggtgccggaccaggtgtcggcttgtttggacagggctttgggacgagcgcgccgcaggatacgagacccgctcacgagcggttcgcggtaagtttctgtttccccattgttcaaaacacctaaacaatgagaggtgtatgtgctgaatgttcgatctatataatgattatctggctataggatcaattggtacagttgcaacacatgggtttctacgatggccagaagaacatcgaggctctttctgctacgggcggaaacgtgtacgtttttatctacttgctatctgtctatctatcgttaccgtctgcccttgttcttcaccagcagacattgaaagctgacgtgtgctgtgtggacgtgttaaaacaaaatataattacaaaaaaaaaccaggtcggctgctgtggaatacctgtttagtaacccttaggtttcatttctctttcaatttgtgtatgtgtcttgtgcccagtactatattgtaaatcgatgcagaatgtggatttcttctctttattcgttaaacggataaatcctaccggcaccgagtaattctctatttttagtcttccggagttaccatctgcagtcgacgtcatcggtcttggctgccaacctagtcaaacagctgaattatctttcggtctttgccgaaaacggacgggaccaagtgttcgatgtgtatgtctatcgtgtacgtgtgcagcatcagcatgtattaaccagtggccgtctccaaaactcttctcggaccggcagggtgagagagagagagggggaaaagaggcaaaggatgacgtttgaagctcatcggatggaggatgtatacacttgcttttttctctttgttatcgctcgtctcacccgcttaactttaacttctggccgaccgggtttcggaccgatcacttttggtcttccgtccttttactccaagcggctgaacctgtttggatcttgacatacaaaggcactcaagtttgttcctttatcgcgctcaaactcttcctctttctttgcctctcctccctttcttgtcctctgcttgttccatctgagttatcttctcgattcactctttgatctttaacgacatcattcttctctaccctcaactgtcaataaatcatgtcgtttgatcccccagaggcgaaaaagccaggaataccagtagtctctcacaacctcacccctgatacagcttctgacgctctttccaccagtgcaactcagctcggaggagaattcatcgatgaccgaggttagtccttttcttcttccttttgttatgggataatctcgtctgagatcgagaactgaagtataattcatcttcctttatcaaggtcgaagagtgtataggtcggtttatagcatctcctctctttggtttcctgcgaatgacgtatctggcctatgagtagcagaaacgtccgatgaacggactgaatacttaccacttgaagatttcttcggaaattcatccaggaccactacggttgcacccacggagccttcgtggtcaaaatatattcctggagggtacaacagaaaatggcagattcctttgaagggtaaagcaatgatgtggggtattcagggaatttccggactggccattctgttttgtaagcctcgtcctcttcccatgtgattgaataactttgtcgctgaattatcaatttttttctcttgtttctcaacaactaactccttcgttcaatagatggttacgaccaagtatgtatattcctcgagctaatgtccttcatacacagctgttcaggcgactgacctcgccttgcagggagtcatgagtggtgtcaacaattccacatcctacaaagttctcatgggaacggcgagtgatccggagacccaaagagattctgccgccatcggtgggatcgttgctatctactatctcggtacactcttcggtggtcttatgggtggaatcttgggcgattcgatcggcagaatcaagaccatcgagattgcctgtgtgtttgcaatcatcggcgcctccttgcaggcttctactcaaaacataacttgtgagttctggacctcacaaaattcactgaacgtgagccgccgagaaagctgatgtctggaagagttgatcggccaactggtccgcaacaaagggatgatatttgctcgaattattaccggccttggaactggttcgcttaacgctgtcgtgcctgtgttgtcgtccgagttgtccactcatgatgctcgaggtgctgtccttgggttcgagttcttcctcaatatcagtatgtcctttttgttatcaagaacaaaccctcaatcgagatatccaactcaatcgacggaatttgctcttcatagtgggtctggcggtagcctattggttggaatttgggctcaaatgggctagtaatcgatcagagcagttctcctggagattccgtatgttcttcttacctgtatctgtcttgtatcttgcgcttgtgttgatcttgaacttgttctctctgttatcgacagctctcgctttccaactcgtttttctgctcatcatcctgtttaccatttctctattccgtaagtcactctgtttcttttctcctaaagatcgttacattcgatttacgtctcgaaattgatttcttacgcctcatagctgagagtcccagatggctcgcaaagatgggacgtgaggaggaagctcgacatatcctcgccgtttgccgaacgcccgatgcagatgaagacgatttgaaagtctcggctgagctttacgaagtatgtttggccttacttccattgactctctgtcatgatccgcagatctggccgacatatatctgactactacgaatcgctgtttgaattatggaacagatcatggaggttgtcgaggtcgaaagacagagtacacatctgaacagctactgggccatgttctttggctcggacagctaccacctcaagagagtgagaccttgtatatgctctctctgcgtctcttttgggttcatcaactcatgtttttggtctccgctcttttgaggatcggtagagaacttggttaatcatctggttgcagatcatgcaggaacttgttggaattggtgtgatcactgtctgtaagttattttcccctcgagttcctcttcattcttaatgtatgcagtatttaacaattcaagcgtcttctcttccgttccagacgcccctacggtgttccaacaggcaggttattccgaatacaagtccgatttgctcagtggatgcaacgacatagcatacatgttgtctgtgcttatcgctgtcttcacgcttgatcgaattggtcgtcgagtgacgtgagtcctggatctttaatcgtttgactttgttgtgcagaatgatagactgacaggtgggaatcttacactcggatcagactctactggggtgctatcgtcatgggcatctctcttattttggccggagtagcagctaaatatgtcaccaaaaccgacggctcccagcaggccgcttatgggtaagtccatcttctgtcttactcttcttcttcctttgtttgaggtttcaacgatacctgaactgatgattttctcctttgggatgcgttattcttcttcagagctgttgtggccacgttcgtgtttgtttacacaagcacgtttggcgcgacctggttgactgtcccttggtaggtctatctcttgatcgtaatctggctgaagaagaagaaaatgtaaactgatcgaacattggttgaaggctttacccaacggaaatcactccaaacttcattcgagccaaaggaggagctgttagtgtgtttgggtggtcgatcggaaacggaatcgttaccgagattacacctttcttattcaagtcagtacctccttgatcccttctcttcgtgtactagccaatgcatcgtgtttactcaaacggaactgttatcgcaatcggaacggaaacagcgccatcgggttttggacatttattctattcgccgtccttaacttctgcacacttccatttatctattactggtacgcttaaaccctctaggatgtgcttcgtatacttttcagctgatgattttgtctggtcttacaggtatcctgaaactgctggacggttcgtgctctcttcactggcatctcaagggatatgagttaggagagttactgaccgataatgtgaacattgtccttcaataggagtcttgaggaaatggacatcctgttctctgccgattcaattctcgttcataaacaagagaaagatctcaaacggattgcagagaccgatccagagttataccacgccatggctctaggagacaaaaaggcgatccaacgaaagcagtcgtacaaaaaccctggcgccgttgagaacacccgattcacggaacacgcaggaaatgttaagccatctgcctagatgtttctttccctaccccttcccatgaagtcttaaactttttcgagtagaagttataaggccaacctgtgtatagatatctcttgtatcccgttttttccttgctatcaggtagaattcagcgtttctccgtcttgttctctttgcgcctatttatccattcacattctcaatcgataattatttaatatctgtcttctcgaacttgtctgttctcatctttcttctgtcactctgtcgaataattcttcttccgatccaatagagagaacagtatgttttgtatggacgagatgaggtttctttgacaatgtttgccaactgcgagtctcttatgtgttccctttgtattccagtgattgcttctcttctgatttccgttccgatcttgcgatccaaagcaggaatgcatagtagaggatacatatatcgcatacggaacataacttagattttccccagttcattcatcaccgcctagaataacgactcccttctccttcaatgtgtcgaccgctttcttctgaccttccttacctcctacagcttttgagccggctaaaactaagtctacttcgaacccaaatttcctggcgtcgagacatgtccagagtacacagtagtccaacgcgaggccgacgatggttaattttgttatttcagaggtgaaaagcgtccgggaaagtgaggtgaattgggcatatgcattatcggcgaaagcagaataggcatcaacatgtagatctgtgccctgttttaattcatgtgtttcgttctttgtgaaatcagaatatacgatacaccaatcaagagaggagagtggaacggaacggacctttcgaacgtatctcacaggagaagttgtacgatcaagtctttcctgaacaccttgttcgagttcccatccctgattcgatggataaataaaaaaacaaagaagagagaagaaggttcattatttttgaaaacaggtaagagagaggagaatacattcaagaacctttgtatcgacgatacaatgttcaggcctgcagaacaaggagagaggaacagagcaagcagacaagaagagggaattgtcaacacatgcagccgaacagaagcataggcaagttaaaaccaatattatcaacaaagacagtgagagaacagaccacaacgtctgggagattgtcttgtcatccgaacttcccggtagaggaacatcgatcacttcaaacatcttgtgtcccgggtgacttgtatcgaacgagacgtggccttctggatgggctgtttaaacaataagaaggatcggggtaagtatggtgcactcttgtctgatatcaaaagaaaacgaggatcacgaacagtcctggcaaggtatatatacaagagggttgaagttcagaaaaccaggtgggaagatctccggattagaagtctgcacttgcttaccagactaacagcgatgacggcccagtcgtgattctcgatcaaatcatacactactggaaggatttctcgaccatcttcgacttgaagagctcctgttggaggaagaaagtcattctgtatgtctgttcgatgaaaggttaatcaagcggttctcgacctaagaatcaatcactcaaggaaaggagaagagctggtcagacgatctaaaggccagacataccgacaagaataagggcggaatttgaattcgaatctttttgtctgtctacgctggacatatcagtgagaaattcgatggatcagatcaactaccggttgctgatgagagaatgagtgcgttccagtggatgaggtcatttaggaaagtcgtagggaatctctgcacgtgactgcactgcatcgaatgcatctttccatccacgtctcgactccttactgtctgcttcgagatatcagcggctgccttctctctatcaatcgcttgtagaatgcgttccgttgtgttgtcgttccgtcgtccttcttgtttctcttctcatctggacttgttatgttctggatagtcttcaaaagattagagatgatcaaccgcgcagtcgaacgcgtgccaggcagttggtcgcacgcgctgttattttatgaaacattcttgttgttgagtaaacttctacttcattcttccttcgcctctgtttctccttcttgttccaactttctttcttctttctctttttggccttcttctttgcagtctcgtcctctttccctcttcggctcttatgacgatctattcacgcgatgttgctaaacacagtgcacttaatagcacaagcacttttattgacacacatactgacacgctcttgtatttcggccaaggctaatcaggactctggctgggaacatctctctcctctctccttccggctcgtcctgctgttcttcttgggcgttcgaaacgtgtctggtctttcctttttcctcaacgaagctgccaagtcttaacttttatcgtgaaaccctcttgctttctatattgacccatttcttcgactctcttctccctccatcctttgctccctcttgactttgcttgggccggtggcctctctcacattcgtttaaacctacattcctaacaaatctctttcaaaccagctctctttatctctcttctttcttccatctcgtcctcgtttgacagcccaacaccttcctatcagtcgacgtaattaagcatggtcccttcagctcgcttccttggagcaataaccctcctaacactctcttcaacgctcgctcgagcggcagagctcaagctagccaagaactacgtcggtaaagattttgagaacgacttcagtgagtctctcctcatcaaacattttttgtttctagcaaaccaaacactcaattcttctattgttacaaactgttgccagcgttctacaccgaagacgacccgacaggagggtacgttaactatgtcactaaagcgatcgccaaggcgcaaggaatgatcactacttcggcatcctacttcaagatgggcgtcgacacctcgacctctggtttgacgtctagaggacgaaattcggttcgaatcgtcagcaaggacgactttgcggatggagtttacattttagatatcgatcatatgcccgtcggctgtggaacggtcagtccttgctctccccactgatgactggaagattttgctgacctggtggctcgcttctttctccactctcattcttcctcttctcttcgcacatctatcatatagtggccggcatggtggacgacgacccgagatgactggcctattggaggagagattgatatcatcgaaggagcaaacgcctggccggcaacaggctcggttgcatacacctctacctttgattccgctggtgccaaccttaccggagtcagccaaacatcatccgatttagcctctttacatacaatctcaacctgttcgattgaagataaaggactttccaccggggtttgggaatcgacagtgtgcgatgccacccagaacgataatcagggatgtggagtctcgcttggaaacggtacctggggttcgcaatgggtgagtgctttggtctctccacatttcctgcgctcgaccgagcgatgggtctgatctttcctgaatatttaaatcaacagaactcaaacgctggtggttactatgtcatgcgccgggatttccagaagtaccttcattccattcggttgacgttcccttgttttcgcgctgacctcgtgtatccacttttctgatgtatcttcagctccggattgatttacatctggtcgttcccccggaactctgccgatacccctgctgacatcattgactctaccgctaccacaatctctccgtccgagtggactgtccagccaagtgccaacttcacgatccctcaatgcaagaagaatacgttcggtacgcacgccattgtcctcaacatcgctctttgtggaagttgggctggtgggacgttcaccggaaacggttgccccggaacgtgttcagatttcgtcaagaacacacccggggcattcgctgatgcgtactttggaatcaggagcatgaggattttcactgaaagtggtcaccctgtcggcgtctcgtatgtggttcctcccgcttttcgcatttgttgttgatcattgtgattgaattcttctttctcttgcgtgttgtgatgaaatagatcaatgagaacctgggttcttgtcgttatcattctcggttctctccttggcgccggactcatcagcgctcttcttgtccttctttgccttcggcagcgacgatcgtatgtttagcttccgtccttttttcaattcttttcttctctttcaatttcgtctcgattaacatcgtctttttctattcccctatcagtcgaaacaagaattctactgcaacactacactctgagacttcaactgcatctctcaacacccgtcaccctgctacttcctaccctctcaatgaaagtttgagtgttcctcaccctcgatcacctctaaaatacttccgtgccacccatcctgcagccgtcgccgctgcgacctctggaggagccgagaccacggaggttagaaaacctggtgggttaatgcctggtgagactccagcagtcccaagtatgttagcttacaatgcggtgggagggcacacgacttatggaacaggcgtggatgaagcaattgattcaaagacccgtagaaattcattagaattctagcctgcttcccttctttcttggtccttctctctttttcttttaattctggtttctctctcatagagttttgtaattcgatacaacccctttaaataaatctacgttcccattcgaaaccttttaatctacctatgatatctatagaaacgataatttaacattgagtgtatgtttttcctcagcctttgacacacggttatcgtataaaaaggccaccggttcacaacttgaatgatagagtaaatcacatatacatatttggtgaggaccggaatacaaataattgatgaagaaaacaaatggatacagcgatatttcaatgggaagccttcgaccactcttcaccgatcatcgtcgcgcatttttcagccacgacgacaactggtgcttgagtatgcaccgcaagtatcgtaggaaacacactcgcatccgctactcgcaaacccttgcagccttttactcgaagacaaccatccaccacgccgtcgttttcttgaccgctcatccttaaagtagaagacatgtggtctaggatagaagaaaacgacgatagaggcattagatcaatagatgataggtcaaggttctacgttgtaaaaatactcacaagcagggacagcccacttcttcacataggccttcaactcatcatcggagcattctttaccgaacgcgaacggattattcttctctattggcttgacatcatacccaccagcgatcatcccatctacaaccttcgccgctagacgtaagccctgaatgagcacaggaagatcggctggatcggtcactgttacaagtagtacatagcgcgattagaattcaaacgtctcttagttttaatccttagactgtttcaagttctcatactcacagaatccaggatcacaagctgggatttctcggggatctttcgacttaagcttgattgtaccagtcgacttcggtcgaacaaggattgagattggctttgtttaagaagcccgagttggtcaaattgggtgagctagccgaaccgcgagtgaggttaggtctgaaaattggcaagagatgtaggcgtactgagagatacccaactgatttgttatattttcctttccgaagatctggtgtttttccatctggttttccgtcctacacagaaaacgacagcgtatagcatcaacttgttatgtcagttattctcgtccaacaaaaaaaaactacttgtcacggaagagcgaaagaccgagggacatacatccatactggaatgaaacctgaagggcaaaggcaggatttcaagatttggcacctcttcttcggccaatgagctcgtccaaagagggcgctccttcgagtatggtgagtgttcagagaggatttcgggaatatgggtggaagagatcatgatagccgtttgtgatccttggctacgtgaggaacgagaaaccaaagtcagaagtttaaagcaaaaccttacaagggttatcaagcttacaaggtgaaatcaccagtgcggaagagtgcaaaggaagctatctgcttgatcgcgtgcaagggtgaattttctaatcgatctaacgaatccgttattctagaaaaccacatatcgatcaagtcatacgtcagttgtgttggaaagaaacaagatatagtgctggctactacttacggaacggtgtacgggagatagacgctgagatggtctgctaatcctcggccaacatcgggtaggtcgaccaagcaagtaatatgaagctcttccaattcggctttcggccctattcctgagagaaggagaagctgagtggaaaaaacagttccgctagttaagatagtctcttgacagcatgatgcatgcagaagagtgctctcagctaaataaataaaatagagattttgacgatcagagatttgttccaaccaagtaacctgtgaacataacagaattcaacgtacgtttaccgtcttccgagaaccacactcctttgcaggttccatcatgatcgaggtccagtttgtgcactaaagctcccaagccaatttttaggccctctccaaatccggcccctttggtgccaatggttcgaggaaagaaataactctccatcgtgcttgttcttcttccatactccccagtgatttcatgcacagctaccgccgtggccgacacatctggatcattgaaggaaggaacaaccggaattcccagcgactgacttgcgacgacgaaatgttttgaggaaggataagtaaacactgagggattagtcgtagcccacgggccatccgcgcctgtgtatgcagaggcagtgttgctagggggcaagagatcggcgataggcgaagagttgggtcgatgattctgagaagagataaagtatggcagaagtttagagaaggaccagcttggaaggtcgaactgagatgcccagatgttgaactcggacggaagacctctggtgtagagggacgaattgaatgtgctgtaaaggagtaatttagataaagctgatcaagtatcaagtgaactgacgacactaataagagatcatcatacctcgctccaccaagaattttgcctccaagcatatcgcacactctgccatccagtccttgttgaggtacggtaggtattgacgaacatttttctgaaagaaatataaaaaacaacatcaggtactaaacatttatgatgaatctagtgtagaaacatacatactttcatccatctgccacgatgttgacatgagcggcgtcgatgacatccatcctctgtctgaacctcctcgctctagtagcagtacagttggacttcctggaagcaacgaaagcctagaggcaaggacgcaacctgctgtacctccgccgaccttgagaggcgaaagatctttagtttgaagaggcacgatgatgccacacaggcaaaggatagtggtaccacttacaatgatgaagtcgtatttgaattggcctttccctggtcctccaagctgagacaaaggaagtgtagggagactaggagtcatatgtgccaaacgaagctgaacagaagtaaggtgggccgatgattgataggaggaacatttgagttgggttttggtaactggatatttgttcaacgtcggcgggcgatcagctggcatcagcctgttctgatgggagagaagacaacaacatccaattgaacacatatgtaaagtcataaacattgattggtgataaactaaaaatgagctacaaaacaacatgactgggtcgtgcagagaatatttatatatgtgcgtgcgcgtgagaaagaatgtgtatatatgtaggtgtgagatgtgggtgcgtatgtaaatgtatcaatgaagcaagagaatactaagaagcagattcgtaaagatgttaaggtatgcgactggagacggctagtggggagagcacataagagagttctaaaatgcaaagataatgctataatcccagtacagaatcaaggattgatcttggatcgcggtaggaataagaatatcctctacaaaaatcgaagaaatgaacgggttagctgggcagcgcgcatatgtcgagattcataagaacgagaacaagaacgagaacaaaaacatacttcttcctaacttcgggcccttcagtagcatcgacgctagcaagcccaccttcgccctcgtcgaaggagcccccgctggaaagtcccatccggccagaagcgaggactttttgtctttccgctcggtcgtcatcccaagcctcttcgaaatcctccgcggtcatgattcggttgcaaatccggcgaccgacgttaccctcgggaagagcaagtgaaggtgtaaccgttaggatcccttctaaagcttcttgtgtaaaagtgtttggtggagtttgtggcatgaacgaagacgacgatgacgctgaaggcgatgctggttcggaattgaaaaaagctggaattgatgatttaatagagggtgtagaggaaagattggcacgatggaggtgaagatgggtagtgatgaagtttcgaacacaagccttcaaagaaaaggcgaaaacataacgcattgtggtagtaagaaaatgttgaaaacggttgtacaaagagctaagacttacttgaactgcttgatctactatttcactgactccaggttcaacctctgtgaggccacactctgtagacagccgttgtatgcgctctttaagttgttggtgatccggaagcattcgcatctcaagagccgtcggcagtggcggcaaatttgtcgatgatagggaagcttttgtttcagagggaggaatctcagcacacgttttctttgcgcaaacacaggagagtttaactagattgtagaatgacactgaccagactcactcgtcggtccagacccagattcaccagaagcctgattgacgtcgatcccattagtaggcccaagaattgctctctctcgactaagctcggagactccgacccatccggttccatcccttcgcctttgttctcgagcatgaggataagcatcttgtcctgtgatagtatcgatcatatgtttggccttgatgcgctcacgctcgccctttggcatgcctaaaacgtagttgaccacccgtcgcttggcaccatattctgtcggatcatccggcctggatcttttgagcacgttggtttctgtcgctggggtgatagttgaattggcagcattggagagaatagccatcaagaattggttatgcaatggaactgtcggcagaaagggagatggacaagacgttagtagcccgagtcatggttaccatggttactgtcttttaaatgacccttgcatcagaccctccttcccctgccgtacaacctacccttcctccgagcatagctcggacgggatccatccacaaatgaacgttggctatgtatggtctggataatgatggattcgatccaatagatgtccatccatcctcctacaaaaaatgaggagatttgaaagagaactcacttatgcgcttgtccccgactccccattcagttaccaagtcatcgagctcgtctcggctgagtcgaccagtgatgaaatcttgaagtgtcttccaatagaccaatccattggatccaagagcgtcgtgcaaatgttgcttctggatgatcgatccgtcccgtttgaatgaaatccgactcaccatcgacgtcagccacaatcaagatcaaatcagaagaaaaagaagaaatctacttgcgatttttaatgtatcgatccgaacatacggagcaagtggtctcgaagggacaaccatcggacctttcagggatgtcggtgaggatggatggatgctggccattatgccggtctcgatgcgttggagctttgaaggttaacagtccgccctcctgaatgccatgaagaaaatccaaagcgatagacctttcgagctctgcttatgggttaattgatatgtgaattgtcacaaagctgtgacactgtacgtgcacccaaccgttaagcgagacagacgcgccacagcacgtgagtgatcatctacttcatgacgacaactctcacagatcaatcaagtagtatacatgaaaacctcgagtggaacttgataaggaaagaaaaagaggtaaagaaagagtggaaaggacatagcttgaggagaaaagacaaggtcacaaacagatggtatccagagttcgtaagtagagtaaagagagtgaaagggaaaagatggacagttggcgaagagcctgacatataaaaatgcgaaatgccaagatgcagatgtacgatgaagagtagtaaaaagctagaaagaatttcagtagcgtgggtagtccatatgataatgatacgcaaaggagagattgagaagtcatgaagcgaaaatagaggccagtatgggggtcatatgagaggctagaggaaatgtaatagaaaagttgatatgatctaagttgtatactagacagaaacgatcaagacaaccaggcctacatctgtccttgaaggatcttatcgatgcaggtgttgatccaaggaacctttccagataggtccgctttggggaatcgagcaaagactgcagctcttgaggttcttgaaaaatagcaagtaaaacaagacaagaggtattaaacacaataataacacaagatatagagaagacgaaagaaaacttacttcttggttacagccatcagatcctatcaagtacaatacatgatcatcattggttttgtcagcgcatcttgaactggttcatagatgaaaacgagaaggaacactcacttgagtggaaaggtagtgcctcaactcagccaaaatttcttcatcgctgggatccgtgcaatcgctaggagccgatgcagcaaacggattggccgttgtcgcgagtgaaaaggtagacatccgaggattacccattccaggctggcccccacccatgaaaccacccatagtcgatggtggtcctccttgacttccgctgaacgacatcatcgtactacggggtcctagaccagggaactgaggagggtagagtggggctgagaactcggaaggtgcatgtgttggaagacccatcgggtgactcatgaagggggtactggcaccgtacaaagagttttgggaaggattataaccggtgttgtacatggttggaggggccaacgagggcgcgcgactgttacgcaggttgggattcgagttgtggtgcttgagaggagaagcatctcggctggtagccacacacatccaatataacaacattcagaaatcagattagatgcataaaggaaaaacaacggttcaggtcttactagtaatctcctccagtctgagaaccagcgtagctctgcggctgttgaggttgcatgcgaggcccagggctactgttgtattggctcctcttgtcgtcgtgcgggtatccataattgcttcctggacccgacaccgagcctggcctagatggttgatcccatgcttccgcctcgtattctagaggtgtgacagcaacacaccagagaagagaagtagcgatgttgagggaaagcataacaaaaacggatgcagcaagataaggtatactcaccactaaacttcttcaaagggaccatcgagtcatcaaagagctcggactcggtagtcataacagtcttatccttgccttcaccaacgactactcgggtgttaccccaactgaagtcatccatgtaccagaatgagtagatcgggaggaagaatgagtagaccggataactaaatgaaaaagatacagaactaatcagcacctttgcttcacagtgcgcatcggtggtattaacttacgcaagaatatagatcaccatccatccaacgagcataaattctcgcttgatcaagaagattacggccttttcatacaaacaacgcaaggtgttagagaaaccgtgtttagtaatgatgtcgatgatggatacagattaaatgagatacgtacttgcaaaccgtaggttattccaatcaagatgagtgcaagagtgggaataggagacgacccgattgcaacaacaatgatgagatagaacaactgaaaagaaaacagcagtgtgtcaggattcagatactgcaggattaagaggagattgaagacacctacgtatacacaggtagcaggcaaaatctgttcgcatcacagaacgatatgaaaaaaattcagtttgagaggatatgagatgacctgggcagtaggtacatacaatcgttccgacaagatctaagtagacaataaatctcatggagaagagacagaaaccacacatctctggaagagtcgttaattcagccagattatgaatggtagagttgatccatcgtcgacgctgggagagaagaacctcccatctatcaggggcaaccgtgtacgctatggcgtcagaggtaaatttcatcttgaaggaggggaaatacttcatcatgagcgtcgtaaggtatctatcttcaccaagagaaaacaaattctttttgtgcaaggtgtcgacgttgggctctgaataatcgtcaatgacacgctgagagatgatgatgggtcgtcccttgtcggctgttcggagtcggtacaaactgaaacagcccgggagacaggtgactgaaccgaaaagggattcgaaagccttagctaagtgatgagacatgaaatattcgtaaacctgtttacaaaacaaatcagaagtgagtcgaagacggggcagtgtatgaggatgtttccgatttgtgctcaattacttacctgaatcatggttgtgatggattgcatctcattttgaagcttggtctctccacagacacctatgatggtagaatcatcaacagaaaccgcaaccatacggttgagagactctggagacacggtctagttaattttacaaaagcaaggcatgaagtactatcagacgagaccgcggaacataattgattagagaaaagcgaggtgagaggtcaagaacgaaccgtgtcggcatctacttggaagaggtactcgtagaaagctggatcaattccaatgatatttcgcatctgatggtacatctcaagctcgaatggcgacatgggggcatcgaaatgcacccggttaaggtatcgaagtaggagtatctgagagtctcgttttcctctgtttccaggcttggatcgctcgctgggcttcccaaccttgacagtcaccatgtaactacgaacagaaaagtgatacaatgcacattccgtaagcaagtgagttgtagaaaacaaatctggagtagatagagaacgcaaataacgcacggaacgacatgaccctcaaactcgtacagaccggaataaacttttccatagttgagttgcttggatccttctcccaccgacttgaatagaagtgcctcaggatccaacttttcatccactccaaggatgtcgagcacaatccgaggagtcgacttgtcgtttccactaccaatgatatttccatcgcagataatgaagattagcttccgtttgtcatcgtatttgagtgcagcaatggaatcgatcgttcgtcgaagagactcctctccctcggtataacacgggatttgacaaatgacaaatttgtcttgcatctcagggttccgttttcctgtaagctgaagagcagatagaactagacaaaatcgtgatcattggacactgattaatacaaccaaagaggtattggagatgcaaagatgacgagaacgtacacttcatgaagatagtaaccatgatcagaattgagaacgagagtaggatatagttgttgacagtgcatcgaggagtctctcggatgtctgcctctccgacgtagaacgcattgcgaaggcaggcatactgcatcgacgcgtacgacccgttcattgtttcaaagaccgcgttgagctttttagtaatatctaatccaggttggtctgagaagattgaggtgaccgagtcattcaggaaggagtatttgctcgaatcggtatccgattcatggtaggtgatagttgtaaggtagtccgagaggtcataaaccccattatcgtagattgcccaggttctaattcacgacaaagttaatcaaagagtaagcaatgtgatccccgaagaaagaatcgataagaaaaagctgaggcactcacttgctgcctgaatcggcgttagatgtgatctcttttctggagtagacaaaggtgcctttatagtattccttcataaaaggcaaaaaccgatcgggtaaccaatcggaattgttgagtttggctgatccatatgtctgaagagtgccactccagtgaacggcataatcggccacggcagtaaagttacgctggagagcaagggattcatcggtgactagaccagcgcaggcaaccgggaagacaactgggaaatagtacgtgagatcttgtccggcgagttcaagcatgatttcagaagtgaccgggtaggcggatacgtcggaatgttgtcctttccagaaagaggttatgtcatatactttgcctgaagtatgacagacaggaagaacaaaaaagtcaataccctttttctttccttctcagaatgacgataaaaattgaataatttgagaggggaacgaaccataagcagcgacccagaagtcattggactgagcatgttcgcccaactcggaagtgttccacacaagtttgtagtctgggcagagaagcaaaccgaagacgacgacataaaagatgacgattccacataagaggaaaatcaacacgcagattgcgaccttttctctccatgccattcggacgtccggtctagtcatctttccgaccttggtgatcatgaactccgggatccaccatgtgaggagccagacaaaccgaacccaccatcgcctcgctctacttgtctccacgatctcaagtgtcttgtcacccgttttctcgttcacgatcatcccacccaattcatcttcgcctgacctatgaccttcgggatgcatcgcatcaggaagtgtcgtgacgctttgtgcgggtttggagtcccattgatcagggtcaatccaactaggtgcgtacccagccttgtttcccccggcattgtcatagggctcataagtatgccccggagcgggatcaagataagccgagccagtggtgtttgttcggcggagaagtaaatcgtcagaactctccgtcgggccattgttatctgcgactccccagtgagacacactcgatggaagcatagactggtcatctgtttcgctaggggtaatgaacccactagctgccttcttttcttcatctcgtaactcgtcatcgacctctctccatgcgtcgtaactcaaccaaatgctgtgctctccgatggtgtagtctaatccatccgtccagcttctctcggtaacaaacttccgaacggaaacgtcgattgagtcgctagcttggccattcgggacattgtacctggatatgaagtccggaagctcataaaaagtcgtatactcaacctgccgacgaacgacaagatctggaagaagaaacgagcggatttgtgatttcactcgacgcttatcgaacgaattagcgagcgagttatcattcggtcggatgcagatcacatcccaggttcggcccttctcaattgttgtcaaaagctcggccagagtcgcgttcagttgagttgtgacaggatagacggcgccttgctcgatcagcggcgaagggagctgtgtatcagagaagggtgattgggtattaagagtcgggtgacgaagaggagtcaccgacacttgggcttgaacgacggtttcaggatcatgaggatggaactctgacgcaatcccagggccagacacaagtttggcgatgaaagagtcagccgagccccgaaggagctgaacgagagaggaatccaagatgtcggcatctctctcaacaaagccacgagcgtcgtatgagcagcttccggtatagtggttgataccgaaaagtgtcttgtcccctgccggacccatgccgactccaggactagtcacgaacgatggatgggaaccaaacttatggatcatatcctccaacacttccacgtccttatcccactccgacgtcttgccttgactaaacttggtacacgccctggcgagcgagcctagcactcctcctggcttacgatctgcccggctcgacaaagggccacctcgaagaagctcgacacaggctgcattatccatggtaagtacggaggagatcgagattcggtctgcagacatcagggcattgtatccgattgaatcatcgaacgcgcggcggatgaaagacgagtga

SEQ ID NO: 2742 - DNA, 11168 bp, Xanthophyllomyces dendrorhous
actttgaaatccgggttggtcgaagatagtaatagatgtcttgaaaggttctcccagatcatcgagtttgtgattgatggtttctacaacgaaggcaaagagaagggcgtagagatcacggacaagagcgtctcgctgaagaccggcgtccccggacataaggaatttagaggtcaggtcatttcgaacgtacgtcgtcttgttggtcaaggcttgttgaagttcttcagagctgacttgaagaagattggagacttcgtaaagaacggtgatgttggcgaccgtggccgattcgtacgtgagctcccggtctccgttgtcgataaattcgagattaccgagcaagaggatggcggtgagcagagtaaatatggaagagacgtgcttaggcttgaagccgagaagcgcgagcgctgctcgtagttcacccatctgtgcatgatcatcactaagaggtccgcctgggagaaggtagcaaccggaggaggcgagcaaagcatagctagatggctcgtccagattgagggcttctctctcatccggagaagcgccagcgaggagctggtagaagatattgaatgatcgctcattctgtgacaaccggtttactcgagacttgtccaaaccaaaggcaagaaccttggcgccggagattcgacctgtttccgaaaagtgaagttcgaggaacttaccgtaccttgaggcagagggattagcggccgttttggaatttccgaatgaatcaagcaccgtaaagattgccttgatttggttggagatccgttgctctttctttgtatgagcagaaagtcgaagaacctgggagataaatagttcggaagaaaaggactttccagaaccagtgataccacttcaatcgatagattaaaattggaagactgcctgtcagcatgcgtgcagatcgatggaaaaagatttctctagttctttcagaacttacctaaaagatactgcttggttctccttcttcctgctcatcagcaagtagaccttggcggccaggtcatatagatgaggttgcataggacctccagggcgttcatctccactagtgtctgaatactcggcctccacataatcttttgcgctcgcctcattcaaatgagcgagggccttcaaaggattgacgacaagaagggtggaaggggaaagccgggtgtaaggaagatctgaacggaatcgggcgtggagaagggcaagaaggtggtcatccgaagggtaaatggtggccccccctgcagattggatgagttgggagacatcatgggtgatggctgcctctttgacggatatggtggccatatcgagatcaggagggagagaaagagggctgatggtagacctggttcagccttgaagtggcaagagagaagtcagatagggtctgaagtaagcaaaagacttgacctgtttaagcatgcaaagacagtcaacaaaggtgcattcaatgtctccgcatgagcctcgtccgattatacattacaaccaacacaaacgcaacgaaagatctcacctaatcgacagacttgacgctagcggtgatagagagaaatttcgatagctaaataaacaggacgactggacaaaccgcgaaggagcgagacaattgctgatgtgactgtataaagtccaagggcctgatttggaacaaggaatgtggattaagaaattagcacgaacaaaaggccaagcacagacaggtgcaagggatatctatatgaatcggtaaacatagaaactaaatttagaagaaaaaaatagaaggagaaatacacaacatacagagagcaccagatcaggacaagtacgatcccgaagaggaggaaagaaaagaacgagaaagggagagcgaaaagaagaggaagaggcgagtgggtggtcgatctgtgtgttggatgtatgtgtgaaggtctagtctggtcagtcactggataaggaaaagaaatcaatgtgatcattcctgtaaccaggggctttctctgcgtttcaaactgtgagcgatcgctatcgcgtcacccttgacgcgtcgcgtgccagactgaataactgactgactgtatgcacacgcgtcagtgccagaaagaattattacctattgaccgtttgaagttgctcgctctggctcattcatcctccaggcagagaaatccaattcatttatcctcttacctcttttctcctcttagaagccgtactcgatagaccaccaaagtatctaatcacttcaggtgccatcctatcagtacccttcatattgggacactctagatatcgaccttcttttgatcactttcttcctctcggtctcacggatctgagacctattttcttcctcgtaaacaaaaccgacatggctacgatcacaatgggaacccctgaagctcactatgccattccctctgctcactcttccaacccggcttggcttggagtcaattcgtctgatcctccgattgacccaggctcatcttcgggtgattcgattgtgttgaccaggttgattttgcggaaggtggttgaacgaaaggaagagtatggcggagatgatgggttaggagaggaacttccggatgaccgtgatctcgaggggaacgagactgatgaggacgccgatatgactatccagcctgaagatgatgatgaacaagaaggagaggatgaagacgacgaagaagaagatgaggaagtcagttctgtttaactctcaatcttaacgcttacagaatggctcggtctcactttatatttcttctccttataaatcttctgacagatggaagaccatcttgctcatcgttcatcagaagaacgagccatcttggtcaatgagatgagagagttagaagatactgtagccgggttggacgaagactaccagctagtggatcgtcttggggagggtatgtcatatagttctcgacttacgatatgcatatagcctcttatgctcgtttagcttaccgaacaaccgtcttgtcgttcttcccttattactttcttccttcaggaacgttctcttccgtgtataaagccattgatctgcaccatgttcactatgataacacactgtggttaccggccgaggcatcttctgaagaaacgaccactcgagcatctaacaagaagacccggaaagtttatgtcgctcttaaacgaatatatgttacgagtagtccagctcgtattgagaatgaaatctctatcctggaagacctaaagcaagttcaaatatccttcactttttctcgtctatatgcatgtgtacgtgggctaatcatacatgcgcgcaatattttcggctgatgaatattcttagaggttgctccaacatctctcaactcattactgccttccgatttgaagatcagataattgttgtcatgccgtttcactgtaacgatgattttcgggtaggtctcgatttccttccttcataagaatctattgacaaaaacttgtatctgacagatcattctgacgtcgatatgacagaattattatcgctatatgaacatcgacctccttcaacgttacttccgagacctttttcgagctttacgcgcgactcacgctagaggaatcatccatcgagacgtcaagccagccaattttctgtatgacgtccgaacgggaactggagtcttggtagattatggtcttgcacaggtacgtcctcttttcatctgacgccccggctgggtcgatgcgcatgaaattgaagtagaattttgtttttggaattacgtctttctggacggctgatatagagatatcaaggagagctaagacaaacaccgaaatgccaacatagcgccgctagcttcgaatatccacatggtaagcgtatacgaacggattcgaccaaggtcgtcgagcaggctatttatgaagtgagaaagagagcaaaactaccggcggaccgaattggatttccagctgaagacagacggtcagttcatgcaagaccctttctaaaaaaaaattaaaaaagctctctgtagtggtgatagtcaaaccaagctaaagatctgaaaacttcctgtcatccgcagaccaagtgcgaaagccaatcgtgctggtacaagagggttccgagcaccagaagtgttatttaaatgccctgatcaaagtgttggtaagtcagatctagtatctttctctgaccttgtcggcgtctatcgttaaatatgaacgtactcgctcttcctgaacattctcttcaatgtcctctcaagctatcgacatttggtcggcaggaatcatactactctctttcctcacccgaaagtttcctatcttcaactcatctgacgacacggaagctcttatggagatcagcgccatttttggaaaattaaaaatggacaaatgcggagctctacacagtacgtctaatcgttgattatctgtacataccaaagaaaaagaggtcgatatttgctgacatcagaccaactttcccattctttttcttgaatccccctctccgcctgcgtgctttttcttactcaagaccgaacattcatcagtaaccttccttctatagatcaccctggtcatcctctcgaaagtatcattcttgctgccaatccagacttttataattctgacgagcccaactatcgagccgatatcatgctcgcgcttgatcttcttaaacgatgcctggctttggatccctgcaaacggataacggcgaacgaggcattgtaccatccgttcttggcccagaatgatgtggatgaagacgaggacgcgcctagaaaccctctgaaaggtatatgtagacgtagtcacatatacgacgatgagaaaggtcaacgtgagtaccagtaacgagctttggaaaacacaatcgatggctgacctcttcttcttcgtcggtaatgtacccatcatgttttagaccacgtcatcgttaaaggcgctattcatgaagtcggctatggcgagggcatcgcttttggatcgaaacgtcagtgttcctgaacttcccttttcctttgatgtttacgcttgatctattcataacccagccaactgactatgtatgatttctttgcgcgcgtcaacaaatgcagcgtgtcctatccatgcaatccacggatacttgacttgaaagaatcattatcagaacatccaatttaccaaccatcctcttcttactattaacccccctccctcttgcattgcattacacgttgcatttttctgttgtagaatacccaatttatatgacattcaatgtcttcatcatcccacgagaatccgtcacatttcactgaaattcacatggtcatgaagagcgaaatccagagagcgacctatagaagatgtttcgatgacagcacgttttttatcccttagtgcttcttttgagatggaaaagaaggcgtctctgttggatgagaagaagtgttatatgaattgaaagaagtttcaaaagatggtccttcgccttcctcagcaaatcattctttgcttacgacatatttttcatgattattcaaaatatcagcagcggagtttcagatacaaagagaacgagcaatatgtgaaccaagtactcttgacataattcagatcaaccaaggtgaaagacaatgtttcaaatctttccttcggcataagtcatcggtttcctggttctggtagaagtttcgtctctgtcgtgagaggcttgctctggcaagatcgtcgaatcaagaagaattttagccaatgaggccaacatggacacaagagacaattttcggtaatcacatcacaaatatggcgcgaaacgcaaggagaagggttggatgtgtgtcctgactgtaacgaacgcatcttttcctcgagcggacccctcttagactttacgagttcaagtgaagctgatgcaataagattctcgtcgttaggtcttgtcttttgagtttcgagaaacctttggtgatgagttttgaaggcgagacctacatctgatctgagcaggataacgaaacatccaaaacagagatagacactgatttagatgaggatgattttaattatggtgttgacctctgagtgcactaacaagtaagaagaaaacgcaagcgccgaggaagtctatcaacgacctcgattcaaggttgatgagaagccctatcttaaccaactgagtttcgacgcgtccggttcttgcacgcgtgctatttcttcctacaggtttacttctactgtgctgttaattagcgtaaatagtacatatcaggaatcaaggcctattgaaaaaggaggatgctcggttctagtaagcatcatgttctaatcagcaggcaatttcaggttttgaggagtgatcgagagagcatgtactcagtctgtatctcttgtcctcgtttgctaacttctttcaaagcggcacacaaggcgccaccttccttgagtggttcttgtccgcaatattctcattcgttctcgtataagcactctcgctaatatgtctccatcatctatgggctttctattccggccttgagaccagcacttcaactcggtattgtacgtgggattattggagaggtcgtcttacacgtgaccatcacagctattaatatcacgtgaataactacaataaagcgattaaaaaattgaaatagaaggatatgtcaaaaaccggccctggcgaagtttttctgtttccttcgtgagctgttgcgtttccccacttgtcagaaaaattctccgtctttccgcccttcctcaagaaagtgagtctgtctataattttcttctcttgaatctttgcatttgttcgtctccctcggctacttttcttctcagtgtgcgttgtacatcagcaaggtagatttggagaggtatctttgtttggagaaaggagagcgagaagtttttttctcctgttggtcccgcggcatggaaagacagcttcctcttcagcgaaacggacgacaaccaaaacaggaggggaaagaagctttggagagaagggagaagaacgaaaaactggctggttggggtgaaaggaagagcaggaggcattgggaatgaaggatgaagcagtagtatgcgagtcccgtgagagccaatggagatacacaacagtacgacctctcgaaaggatggtttctagacacatcaaccacgaacgacttcatccttgacaatctttcataccattcgacctaaacttccaccctgttgtccatccaccaaaaagacctcgagtaattgttataactgaaagaagaataagcttgctgacttggaacctgtcttcctttccttttttttccttcggccttagttcgccatgtcttcctctaccggcaaagttcgagctcacgagctcatctccaagaacaaggctgatctcaccaagcagttggttgagttgaagcaggagcttttgactctccgagttcagaaggttgccggaggatccgccgccaagttgaccaagatgttcgtcctagccatctgatttttttctcttagtctgctgattgaaattccgttcctgacaatgtcaaaaactttcatattgcacctttttctccaccccgatttttgtctactcacctttatcttgaactctggctcggtcaaacacaacccttccaaatatcccacaactgcttcttttttgttaatcctcgccgtttcccaaaatctatagcaacaccgtccgaaagtccatcgctcgggttcttactgtcatcaacaagaagcagcgagacaacctccgagagttctacaaggactccaagtaccttcccctcgaccttcgatacaagaagacccgagctatccgaaggcgattgaccaagggtgagaaggccaaggtcaccgagaggcagcacaagaagaacgttcacttccccctccgaagtgagtgtcgggcttcttatcatcttattctatacccttcacgagaattgatgctgatgactttctgccttgtaaactgtttcccttctttctttcctgttcgtagagttcgctgtcaaggcttaatttcccttcatgatccacgattattcttgatgcggttatggctggttggatgtgacaaactttagtgggcaacaacgaaacaagaaagaatcatcttgacaaacagcgagagaaggaagctatctaggccagcatctagttcttgaacaattcatctgcacatgtctcaaatttgaccatttgactcaaccaggatcaatcaactaattgttcttatacagcgaactggctggttgactgacttgactagactgacttgtttatcgtagtgtcgtaaatttgcaacaattcacattgaaacttcatcgactagcacatagctttgctggtaacaggctcaccagatcgtagatacgacatgaaataaaaaggcacaagtgaagggtgatattacatgcggaaaagatggtatgatatgacaggagatggagagacaagtacaaataaaagcatgtgttttctctttgttttcttcagatgttgggaaagaagataaaggtggagaagactaaagagatggcaaggtacgatgtcgtataagacgagataggcagatacaaatttaaccaaaagaaaaagggagggctcttttcactgttgggcaaatccttcagtctccgaaattctttagttccgagagagtgtaaatcagagtagaatagataatcaggaagaacggccaaaaaggagtgtgaaaagaaagatgggaagaaggtcccaagaaagaagagacagaaggcagaaggacgtacgcgaacccaagagcccgttccatatcttcccacgtcatgtaaggaggcagctccagctcgttgaaacacgtgtgcgcacttggaagtcgatttgacccgggtctagagtcaagcacgatagtaaatcgtttgagatctgagcccgttgctttgaggtatgcaaaccctcctggaggaaggcgggttgaggatgtaacgaattgtagaagagccatctaagaatattaaagggaaagagcagaaggggaatattaggatgttgagtgaatctgacaagacaaggaaagaaaaggatgaaagacaaagacaaactttttgatcagagctcaacgtccggacaaaagcccagaagagctggatcgatggatgctcgaagtagtatccggaccgctagatacaacgatacattgtagtttggaaaaacgaatcatgagaaggaaatttaactccatgagtaggggatcttgagagaaacggaagccgacacatacataatccgtatgagcttgccaatcgtcgacgtcgatctcagaaatcccgcaaatcaagagctgttatcaaagaatcgattcatcagtcctattcaaatcagttaatatgcacatatcagaggcggaagacaataccaacctctaattctgctggctccaaagtactcaggaatctcctttcgactacttcatcgagccctctaagcatcgcctcggtctgctctcgcacgctctcgaccaagacaaacctggagacctcgctaacgtattcttccttgttatcctccgttacgtcgatttccgctccattaggtctgagaggcacctcgatctgggcgccgaatgcatcaagcgggtgagtaaacgatcgatacaagaccgaaggatcattgtttctaagaacataagcaggtaaagatatgaccacaagaataagatggtaggaaggataatacacaaattaagacatataagtactagttaatagactcgaaagatattcgcacaggagaaactacttactgaacccattccaaactcttctccaactcatcatctactcccttcaaatcttctcttccaatccctcctcttcttctctttcttctttgcctacagtcatcacgcccatcgtttacgtcctccgtctcgttccttcgtcgtcgtctcgttgttgtactcctttcttccgcttggtttattccaacttctatacctccaaccaacaatttccagacaactccagcgaacccaacgctcactttctctccattcaagagtgccaaaccgatgaggcgaccaacgacacggaagtagtccaaatgagcagggttgatggctgaatttgggtttatcgatagcaaatttgggtgaaccgtcgagggcgcatggaagagtccataagaaggatcggcgatgtgcattgataggagttgaaaaaattcacgagtgaggccgccagcgtctatgccttcctcctgatcaaagtggacgtagaacttgcgtttaaggtcttcggagctctgtggagaggaggaagagcaattcataatgaaaattatcaagtcagaattgaggtatctctccctgcgcctcggctttttgcgtttatcaatttaagaggaaaaccaacgaaccttttgagcgagtgcatcgaacgcagtctcaaacagatcctccctacgaacgatcacgatacaagctctctctcgcatacctacacttgctcgtagatcctctcttcctcgaacctttgataaaatttgttcacggacatacttgacttttcgtcgaagtgtctgtttacgcggcttgtatctgttatcacccggttacataattcagaaggaaatcagcctacctccgagatacaaacaacaggcagaacacgtaaaatgaaagagcaatacgcacagttcccaagttgtaatctttagatggtgatccacgtaaaacggccttccgtcatcggcaaaccttctttcgaacctcctcggatgattttctcctatccgtccatcttcatcctcatcttcatctccatcagcacctatgtcatcttgttcataagtctccagcctatcatcatatatactaggctctgtcgttctagatcccgatgggaacgtacgcgcagatgatcggaagttattagggtagaggttgattgtccgtgctggccccgagggatagaagtcaacctcgtttgagggtgttcggggccgggaaagggagaaagaagaggaagatgatgaccgagaagattcagaaagagagggcgtgtacattgaagaagaagccgatgagatagaagagccgagagacggttcagatgaagaggaatcaggcagagaggttggaaggagaggggatctagaaaggaagggaagggaagggaggg

SEQ ID NO: 2743 - DNA, 2272 bp, Xanthophyllomyces dendrorhous
gaagagggccaatcagcactggatgaaaacggcaagacacaaattcactatcaattaaacacatacgacggagtccaggccctagaaaggatacctgttctgaagaagttcatgttctcaaaaagagaatttgaagcgagcaggcaagagacgggcagggtgtgtatgtatgtagactgttgtatattctaaccgtccgttctgatagttgagattcgagaggctggttggtggtactgcttttgacgtcacgtgagctactttggtgtcgtaccaacccattttctctccagtatttgatactcatgcgattccgttgcagaaggagtcacacattcatcatttctataaagatatcgacattcttcctatcgcttcaacgttctctgcttcgccgcgtcctctacaatctttttctcaacaaacattccttttctagttcggactccgtcgacataaaccttggcgatattcgctcgctcggccagagtacccaggtcttcaagttcttcctctaagaaagattggaagattgcgcaaccatgtaagaaggcggaaaagatgaattaaatatcacgcattaaggttgaacaaagccatgaaaaaattcaattgagggcgaagactaaccggtggtgggaacccaataagggtcttggtcgatcatttggtatctaaggtttttcaagcgcaaaggatgagtacataatgaagcgagagtagaaggttgtgctggtgcttacccgctgaacaccaactgagggctagcagctccagacgatcgttttcttatttctaccataccataaagaagcagatgagacttttgagttgagctgttatcttcaaccgttaccaaagaagggaaagaagatggttgaaacgcaccatctgcaaaaccaaaactctcgatgacaggcaagagtgctcggactgtgaagaaagaagtaccctctttcatctcctccgcaacgattttccctcgtcttcgagcaacgactccgtataccttacccaagacctcggctaagcaaagcaaacagagtaatcggtaagaaatatgacgaaacttgatactgagaaacagactaccggatagagaagaatcgggttgacttactagaagtttgaatatcacaggtgtacatggcaagcaaaactcgaggggaccagtctagtagacccgctcggcaggcgtccttgatggaggagatcaatgatccggtcgcctgagccaatttggatcgaactgcttataacaaatttcctcaggcaggcgtcaacattgaactctcaaaccggaaagaagagagattttggaccgaagaagacaagagaaaaacaaactgttttcatcgtcctctgagacctcgacatcgagcttctccacaaggtacgccataccgaccaccggttcggcgcatagagggccctggaaggtggctaactggaaaccggtctcgatactgtcgtcgaagtctcgcatcattcgagcctcctcagaaagagaggatgatccaagttcctcggcaaggtcgacaataggtccatcaactactgaatccgtaataggcgttgatggattctctagtgaggtctcgtatcgttgccgaagactaattagtaaggcacgcaaacaatgtagaacaatcaatcattggggaaacgttgatgggcaggaagatgtatgaggaaaagaggagaaaaagataggcgagttactcacggctttacccttccatctggtctgtcgatcaaaaggtttgggcccaccctctttggtccaaatgcccaaatgcgatcgacaactccgacccaatccctcccacactgatccgagacttctcgtaacttgctccagaactcttccggcttaacttctctggcaccttcttcgtctcctccaccttcggtagtaagttgcttagatgtcacttggtccgagtcgtcctcacccgaggtccgtccagcccttcggtcgggttggatacgtcgcatcacactcgtgttggcttgaaggaaggatgtaatcttcaaaggaagaggtactgctcggatagtgtagttgacgagcgagttagagatcgaaccctcgatcgttccacggggagcatctttcgtcttgggtggggccatgtctagaaagtttggaagaaatggggaaggggaatggagggaacaaaacacaagttgatgcgcgtaaaaaattaaaataaaataaaataaaaaagcaggctcgtagctttcggcatatggttggattatctagacg

SEQ ID NO: 2744 - DNA, 5851 bp, Xanthophyllomyces dendrorhous
tggttggattatctagacgaagaaagcttgatcagacttaccgacacctttgacagcggtttctcggaagggtacaataggtttggaagcttggatttcgatttttgcgaatctctctcgaagatctttcaaacatcgctgatgattcaaaagagcaagagcaagttgtcattcgcatgatagcaggaatgatacaaaatacacagacaaagttggatcagacatacctctaggtgcaactcaccagcggtcaagataacatgctctcccgtttcctgaacgagtgtttcgacgcaaggatctgcctgattgagcaaccgaagaccttcgactaactttggaagatcggctatgaggaagaagaggatagatttgagaatatgtcaactgatggttttgaaagtatataggtcgatcgaactgaaggacaaacctggtgactttggctcaagagccactcgcacaattggcggagactaccggggtagtaaaccgatcaataaaggcagttccggagtccggtaagcacttggcgagcacgaaggaggaagaggatgataaggtgagctagcagactgaccgtcataattactcccgctaagttgatcaatccagccttcaacttctcctcgtcctcaccctcaaccgcgcctgtttgatccaatgagcaaagcgtcgcgtttctaagaactttgccttctaagccaccaacggcaaacacgttacccgctggtacttcgtcgacagcaacgagatctctacccatcatcatgtataacttcgacacagtgaccttgttgatgaactttacattcgacgggtgggaaggagccagctcagtgttgtattttgggagtagacaatgaaggctcgttcctgccttaagtgttccagagtaaagtcgagcgaacccgatgagcgcctcggttgatgtcgaagcaggatctatattttcctcttttactggcggagcaggagcaggagtgggagcgggattctgctcggcatttcggttgagttctgtcgttcgaagtggaatgccttcaggtgttaacgttgctaccgaagactttgatacaccatccgctccgagtccgatgagagtttctctgtcgagagcaagctctctttctctctccgccgctcgtcgttgtcgttccaaccgactgcgctctctcatctcgtcagctgtgatctcaacgactttgttctctggtagttgatcttttgagacggcgaacatcttgctaacgtaggcgacgatacctgcttccggactaggatcacatgagtacaagtctttctcaagcttgtttgttggaaggacggcagccgcggtagtgtatgcatctgggtgaagcatttttgggactcggatggactgagcgatctgaggaggaggaatgatctcgaccacggtttggaacgtcgtggttgatagagggagccattgagacatgatcaacgataaaagtgtcttgtgctctttcgtcctaagatcccgaggatggagcttaacattgagggaggcaacgatcttgtcaatcttgtccgagttactgataaattggcgcaaatagagaagcaagccggtcagccgactcactttctttctctcttttcatatgaagaagaagggtaggagaaacactaactggtcaagaacaacactttcgtacactctccaaatattttccagcacaaactgaacaaacatcggtttcaaacttcttcctgcgagtttcttatgactgacgacccgttttgtctttgggtcaaggtagtaatctccccagagaacttttcgaagtttgctctcctcgatcttcaatttttgagcgtacagctgagcaaactttccgactcggaacgcccatccgtcgattgcgctggcaaagataacgtttcctctctccggggcgaagtaaatatcctcgtcgtctttctcttcaaattcgtttccttcctcgtcttcaccgtcctctggggtggcgcttccactttcctcgaccctaccagcctcagcttcccgtcgagcggccatgcgtctctctcgctcttctctccatctaagatcatcctccattcggtcggatgcataaaagcttcccattatagcgttcacaccttcgatcaattgagatagatgatgatagccttcagagggagataacctaagctcggtgatcaacctgtctaacttattgatcaccaagatgggtcgaagcttatcgagccaagcttgtcgaagtacagtgatggtcttgggtgtttgtttgtttgttcgtttgtttttaatgaatcaagatagccacaggatgagcctgaggctttcttgaacagagagaaatggtcgacgattgacgttacctgagtgcaaactccttcaactgcatcgacgagaacgagcgctccgtcacagagtcgagaagccgtagagacctcacttgaaaagtcaacgtgtcctggtgtgtcaatcaactataggagaaggacgaataacatatgttcaggttctattccttctctttcgaaggcctattgaacggcatgtggcacgtgtatgtatataagagagagtggtaaaccagtcttacgttgatcatgaaatcttgtggaacaacctctttggactctgtgatatgaaattatcacatgatgtttcattcgtcagccatatgttccgcctgtcaagaattctatcataagaggctagtccaaaggatcgaaagtagaaagaaaaagcgaaaagaaggaagaggacagacgaaccgttattctttcgtctcaacatcttgaaaccaagactgactgccgagctctccatagtaattcctctctctacctcatcctctctgctatctaggtatctcagactacccgccagacgggaagagatgatgttgttcgccgagagtagggaatcacagtaggacgtcttcccatgatcgacatgggcgattacacagatcgaccgaacgttgctttgagattgaaacgcctttttggacatttcttctgattctatcctctgtatgtatgtatgtgtcaagaagaacagggatagataaatcctttttgagaggagagaagtgaaggatgtgaagagggtagcttgaaaagctgatccttccttaactttggaatgtagacggttcgctgacgtagaataaatcacttcttccaaaaaaaactgcgcttctctgatttcctctagtgcttccgacgacgtctccctctctccttcgcttacaggcgggacacagtcatcactctgtcttcaagtgagtcacagtcatgattctcctcttttgagcgagctgacggctccttgaggaagtgaacggaaagcgagaacaggatgactccactttctttatctatcttcagttcttatttctattcttgtccttttccttctcttcttcttttgccacaaaaagccactactcaacccgatttgctctgataacttaaggccaaagagaaagaatgtaaacataatcagagttaccaacaataccctcccgcacactcaaccttccttcatcccgtctccttataaaaacacagtgatatttctcacttccttcgttctctctttcgttttctagttttggagaaggttgattcgaccggcaagttcgacctgagatcgaacgagcgaagagaggtacgacaccatgagagcgtcctgttgaaaattgacgcgccaagaatagacacacatgaaaatgtttgaagaaccagctgtcagaattggaggagccagaattgtgatgatcagaaggaagagaagggaaaggaagatgagaccatacctggagctgtccagaaatcttcttttcccactcatctcctccaccgacctttccgcacacatccatcaacgctcttccaatatcggcattaccctctacctttccctcaaccacatcgttgacgtacgccctcaccctgacgagatcttccctcgcaatcttcagcgaggcctcgagctcggccagaggagtcgtcgcggtggcggtggaggggatgatgttattcaacgaggacgtctgggagagagtaagaggaagatcggtgaacgaagttgaggtctcttccgttggctcggccggggcgggtgcactttgttttcggatttttcaggttatagtaaagagaacgtcgatggatgagatgactgatttgcgaagagaggggcggaggaagaaccaagatggtagaaagagaaagaaagactaacctgatccaacctcgggctccaagctcctcggtgttctcagccttgacatcgaccgtgacgtggatggcagggtacggggcggtctcggcagcaaaaaagtcgtgaaccagggatgagaaaccatcaggtgatgatccggtagagtacctgtggattcaacaagagtgtagaggcagcaagagagataggtagagcagagagaaagaagatcacagagaacagagacagagatatcaatacaatgaagagggttgaacacaaagagagaaggaacacgatacataccacccaacaagagtctccttgtcaccagacgccttcctgaagatatcgagcatcgcccggtgctcctgctcggcaaagtacgttcggctttcatcatggggtacggcaaaagagttggtgatcacgacctcacccgcgtccgttcgcttaccaaggagggcaccgatgaccctagtctgagaagcatccggtcgtcgagtatagtggttgagcacggaaagcaaaggaagtggctggagagtcagactggccggggctcggctgtttcaagaaggcgagaggaagggttacagaaacaatatggatcattttatttttttgcggtcaagcgaaggaagccatcgtcagcttctagaaattcttctttcttgttccagtcaagcacagatacttagaaaggggaacgaattatatactcacgcgctgtgaacagaagcggaagccatatcgaacgaaaagaaggatgaacgaaaggaggatggggagagagaagagagggagagagaccttgtcaagagcaaaggaaaacggcttgaacaatcggatggatcaaaaaaggagagggtttgtctttggtaacttacctaagcaatattgttagggttacatggttcaggctatatatctacattttttttgattatgctacacacatatataaccctaattacttgttgtgcgtccaccttttgctcaagattctcctgtccactcatcaagagcatttaaacccgaacgcaagacagcgaattcaaacagaacagtgttgatagaggagagccaagagagaaaaaaaaagaccctcggtggctgataccacacgaggaagggagggagaattccagaagtagtctgtatgaatgtcaatgtaattatatctgatacagcaggaagaaaagaaagcaagtaagagtcggtgtaggataggaagaagaagatgccgacaggtcagatcgttccgcaggggggacgatgtctcttcttcatttcacttgggcaaggggaatagaaagaatgagttgtttttgcatataaatcagaagactgcacgagggcccgtatgactcggcgttctttttccattctctttttccacactcttctgatctagaagatgtcatgatgtttatgataaaacctgaatccggaaagcggacagggtgatttcttggcgttcggtatgtcagtagggaaagaatgggaaaaggaaatccatctgagaagaaattatgtgcatcgggacggagactaatttgatttgcgcgagaaaagcacgagctcacttcgttcatttcattttatacatattcctttgtc

SEQ ID NO: 2745 - DNA, 16706 bp, Xanthophyllomyces dendrorhous
tttttttaaaaaaaagaagagaaaaaggaaaagaaaagagaaaaagaaagaaagagacggatgacgtgagaagagacggagcaaggaaacgggcaatagagaagaaaaagaaaagaaaaagagtaagaacctaaaggaaaggtctattgtgtgttgtctagaagagacaagagaggtgtattcgtcacgtccgagtaccgatagagcacatgggtgtttttcgagtgagggtcgatcagtcagtgtttacaaaatccaaaagaggagggggaaattgagcatgtttaagaaggctaggcccaaacggtggacaggctgtaaccgaaagatcatggggaaggggagagaacggaatgtccggggcgcggcccggcttatttgcttgttgttgatctcgttttgcatgatcagcactatcgcgcagcagtcttgaagccaagaccccacgcgagactgttttcagcctttctcgatatagctttgtgcctgagaacgctctgcacgacgtaccttgctgtgctcaaccagttcttgtgtgtattttgccccttacttattttaatatatatttttacaacttttcccctctgtcttcccgccgattctttgccacgcgagagagaacgcgcgcgtgcgtagatcgaaccaagaaaacacccggacggcacgacccgggcaggaaggcaggcaggcggattgtcgatcaaaagttcaacggcaaaagaccagtcaaaggaagagagaagaacagtaaccagagctaacaagcctagcctctttttgggttcttgctcatcgacaagtctctcttacctcctaactctttctctttccttctctcgttctctcttctttcgttcatccgtccgtcattgtcttttcttcttgcacttagttctctttacacttaggtttccgttcgttcatcctttccttctcttttcaaccttcctcttctccctttccttttccttcggtcaaaaacagaggctccacctttctttgcttggtcccttcggtctccttctccttccataggtcttgttcgtccaaacttttcaacaaccaaccgttccatccatccttggttccaagccgatctctcccgctcatccattctctcgagttctgctttcgcctgctcccttccttttcaatctctcaggacttcctactattgctgctgctgccactacagtatatcggcaggacgctcactctatggccgcccgctgcggctttacagaacctaacagaagaggttcaatcaggtcagtcatttggtcccctagtggttctctctctactgttgttctgacctctttcatgcttgttatcgcccttctatctatgtgtactttccatctgtttgtgaacacataacatgtcatcaaatctcctctcttccgctcacctcatatccttcctcttccctcggacgatcttcttcacgttcctgtcccgaccctgctgtggaaactcgctctggcacatctctcttctcgtatatgctcccctgttgccctattcctctctttctctcgtcagaactggcatccttacggtcgaaccaatttcaatctcacctcaacccatctcaatccatccgtcccatcgactgccgattgaatcaggagacgactcggacgactctgctcgtacgcctcctcttaagttctacagtctggcaaacaaacaaggctctcacgggtcgatccaacaaccgtctctattcctccccccgatggacaacatacacgtagaccatcgagtcagctctcaacctgtccagaacggacggagagaaagcctccagttgattggtagatccagtggagatattccctggtgtcagaggtacgtgcctgtctactcttcgggacatcccgaagttcggagttccacagcttgaactaatttcgagctttctatttcctctttctgatcgtctctatcacctgtcttcagcccatcctcaccggtcgaacacagacgaacatccatcgcgtcctcctcttctccacagaatgcgttctctcagaggtcacacaaccctcgtcggagaccttcttcgtcttcgtctgcaatatccataagcactctccgaccacactccccgtctactttcacagcatctggctttagtaatggcctcaagctccctcccagacaatcgtcactgtcccctcttcatccggctccaatcgttacccctggatttactcctggtcaagcccttccgacatcgccaacaacctcgtcgcattcgattgacccgttgactgttcttcctatcccgccgtcgtcgtcattgtcgtcgtccgacattcaagattttaggttcggatctgcacccgcgtccacccatctgacaaaccggttcccccgaaagcttagtcaagacgaacggtcgctggagagcccgacgggtgaagacgaagagatgaatgatcgggcgagagagaagttcagacagcagctcctcaacgccgggctgtcctcgatctcaatctcactgccgacagtgcctctcggaagcaacgtcaggtcacaccagaccccacccgggttcccacctctccaaacacccctatctccttctttctttgagccgacgacatccccgttcaccacatcctacgcaccttctccatccattccactttcctccctatcaccctcagcctactcctccgtcactgtctcccctaaggctgagactgccaacggccgtagacaatctgcgtcgtattttggctcggcctcgtacaacagaaactccccccgtcctccttcggactcccttcctaagtttgccagcccgaacgacgatagcggccacagcggcgatgacgaggcggaagaggaccgttcgatatctcctcttcggacaaggaattcaccccgaatgctggatgtcaaaagattaactagagataagaggattcttcagccggaagacggtgatggaagtgggatcgaggacgaatcggatagcgatgggagtaggcacgaggctgaaggcctacatggttccaatcggtcttcttccatatccagacggacagatgctctcaaaccctcattcgacttagataatgctcccggcccaccgccgtttgagacgtttacttttgaatccagatcggaatcacaaccgagatccagatcctttcctcatgatagagatttttcttcttcaattcctcctttgcccttacattcaccaaagaacctgactccactatctccacttgagtcgcgtcctcaacatctgcaattgtctgctccacatgatttgactaacgacgcctcccatccagagattatgatcctgccaaacacgccaagactgaattcatcatatacctcgcccgaacgtacacctatcaacaacactctccgccgaccgtctctctcaccctcgatccgttctccatcgtataccctcaaggaaggtcatctcgacttttcttcgaacatcttaaatccaaacactcagagatcatccagtcctcctcctcctcgatctctttcggactcggctgttcctcgtcggccatcgctcgcagcagaggttggagtggttttacctccggtactggctcgtgcatcggtcggcgcgctctcggatgaggtcgaatgggacatgaactttattcttggcgatgcttcgctctccggtatcgggaacgatctgataggcggcccgtccaggaaaggttcactctccgggacgagagctttaaattccatgatcaccccgttcggaagtccaccagaaattgattgtaagtagagtgctttctgttatctctctttctttctgggacaatttcagagtctgactgatttcacctaaatctcgctatcttgcgtttctgttagctttcgctgagtttgttcaaggtcacgatccgctttttaacaagacaagactcgcctggacactcagccgagtaccgtcgacgcccaccggctggtcgttccctgctaccggtggctacaccataattgatttccctgccgacccgaccgcttcctccactggctcttattctattagtagtagctcgaccacttcgtttcctttcgctcaacaaccgcataaattccaaaatcaattagtcgattcgatcatccgagggaatcgaccgccttcgccttcctggggactcagacgaaaaggcaaaggatgggggatcattcctttccaagactcaaagacagagatcaagtttggaccgaaaggaaagtggagagcggaaggtggcagaccgaggcccccaagtagaggcactgacaattacggcctacccaagacgacagaagacgtccgaaaaagacaaggactacctagaacgtcgatggcgactgacagcacaatggatagtaggctgaacagtcggtcccagtcatgggccgaggagaaggatgaagattttacccgaaccggaccgatcccttcagacggtgccagagtgacgttcgaggatgactatttgagtcttgctgggatgaaagattctatggtatgtattctctaccgtcttatctctattctgtctcttttccttgttctccgtattcctttctacagagatgagctcatatctgatcgttatttttttaaaaaaactttgatttgcaaaacagctatccggccctccgtcatcctcttcatcatcgaccaagcctcgatcgataaagtcacccggtcaaggagaccattccaaaccaattccgatccaatccgatccttacgactatgcctcgtcctccatctccgggggtcaatatgcgtcgacacctcgggcaaccgagatcgtgtctcctcccgctagatcatttgaaaagaccaggccgacggagaagtcgaaaaagacagcaaagtggctgttgacgttgaagcaggccggtgcggctctcggttcatcctcatcctcgtctacttatgccggaggaggaggagggaagaagcagtcacgggaaccagaccaaccgacgggtaactacatccctccttggatgtcagctggaacgacgggaaggaaggaagaaatcggattggcctcaaagtttaaattcaagcgacgaagtatatccgatggcagacgaaactcaagagaaaaagccagctttagcggaggcgaggattcgagtggagttagcttacggagcagacgtggctttgagacagatgacgagacggacgatggagaggcgagggaaggaaaagcttgggaggatgtaccgacggaggcattggcgatggttatccctcttgcagcaatttcctcgtcgacgacggcagacccggttcgatctgctggttcagcagcagatgcaatctccagtcgctcgaccgattcgtcttcctcagaattcgtaaaccatacgtccagatggagtcgttcgccctcaccaggcttctcttttaatggaatctcaccgctcgtagagactgatagtggtggcggaacgcccgatctcgattcattcgtgaagtccaaaggcaagacgacgactacggcatcggcgacaacgtcaacagcaggaggtctgaaggttgctcctccgccaccagaaaactcgttgctcgtgtatttcgttcctttcggggatggtcacctcttgccttcattttctgagagtccatccaatacattttccggaccctcgaagctatttagtcatatgcgattgaaaagaaatccgtctcagatgtttcatcgatcgatgccatcgtccggattgaaaccttcttcgcaagagtcgacccgttatcagcaatcatcatatccttctcctcaacagccatcttcatcctttcagtctcaagatgcaaggtcgcctacgtctcttcaacctccgtctccattttcggctgcctacctacagtctttcagccttccatctggtcttttcattcatcctggtggtctacctataacagatcctcgaccaggctcggtggtgcctcctttggcaaactctacgccttcattctcctcgttccggatcgtggcacgtgtggtcgatccttcggacctgacgttcatcccttcctggccttcatgggaatcccaacagaacccgtccctccatgctacgccggaggtgaagctctccgaaccgggaacaaacccggagacatcagccaaggatagtcggacaggtcggaatgatccaacggttgttggtgtctgccatggctatgaccacggggttgaatttgttcgtgaaggttgggaacgactcggtttcgtcccagcttcgatgaatgaggaaaaggcagagaccgatcggatagacctggatgagaatttggagggcagactgttgggcatcttgggatgtctgtcaacagcctgcgtggcgatcatgagctctacagctagctaggtttcagtccgttcaggttcattctctttcgtccagtatttttgcttttcttgtccctccaaactctttggtttcttttgcttttccaacacggtgtctgttcttctctcgcaatctttgtttttgtttttgtttttgtttttgtttttccaagttttctatctttgctttgcttataagttgcccctctatccatctcctttctctcacactccatacctacagtgttctctttttgttctacatattaattcatattcatctacactacacttagctctctgccaatccccttggtattcatacctttttgctgccccttctcgtcctttgctccattctcctccgtatgggtctctatagggtatacgcgattcatgatatatgagcttccaatctagaatcttactgaatggctaaacttctttgctcgtcgtcattgtttgaaccgattaacagacagaagaatgtgatcgcgcctcaaagataataagatatttgccgcaatcacaatgatcaccatcttgaattaccatcccatcaacgctcgaccgtttcttggtgattcagacaagaaagaagagagagatggatacattcaaagccgatctgttcacttccttaccaccgtacggttcatcgtcgttgtcatcttatgaccgagtacttcgaacgatcatcaacactccacccacagtcattcagccaactcaaagaaagatcttcctaaatgagattctgagaagattagaagatcgaacgttcgactcgaactgtgagtttcataaggagggaggaggagaggagctcgagatgtatccattgatcttggaggaagagacggctgacatgatgtttctcttgggcacgcctgggtacatatgtgggcatggttgtgttggtgtacagcgacattgctcgctcttcaggctgttaagacgctcggtaggaaccctacagggagcgagctcttggcagataagtcggttcgtgtgtctttgccattactttccggttctctgttcaataagctttgtgctttgtgcctcacacatctgtttgaaacccaccggccgtctatgaaactcgtcttaggttcttgggacggtcctcagttatacagccctacctctaaacacgtttacctccgtgtcgcaaccgacagaccaaacccaagagaaagctcctatgtcgagtccctcggatggatttggaaacccgacatcgacagaggcgctcagaatactagcgaacgggctgctgttacacgaatcagctagggatgcgcttagttcgctgggaggaggacacgtaggaccctctttggtcactgtccttggttggggttcggaagatactagatctcttccaacaaactcaaaggttagttgctcagatgtttgttaggattgagacgtacacgattttaattgtcgacaatgctttgtcctcctcttctctcctctaactttcggtactacacagaaactatcctcactccctacaccagataccattttcatcatcacacggatcctttttctgctgacggtcaaacagtcttccttgatcaccactctcgttactgagcttgaactacctcatatattggcccacgtacgtcgtcgtatgttcgatttgccacgttccatgacaaaatatcgatttagcgcactaaccagagatgcttctttccaatttggttctcatcatgagcagcgcatccgaatcacgcctccagcatcttcatcacctcttgatcctttgcctgaacttctgaaattgacgttcaacattttgatgcactaccctcgttcaagtgtctcggctatcagtatggatgacgatggagggttcatttcagaggtggtcgatgaatctgcacagattcgggcaggagctattggacatttgtgggataccgctttggattggtgagtacgcctctttcttatatctccagatgagtctgtctgccaagacatgcctgattttccccttcgatatctttttttttcttgcgaggatacagtttggccgagcctttgatcaatctcttgttgtctttaccccttccctcccaagcgtctccaatccctcctccttcatctgtatcacagactttaaactgccttctcacacttcccacaacccctctttcctccacctggctactctcctcgtccgagctcggtgttcgaggagataatcggccaggttcttcatctgtggccggaacaaaccaggtagataccgcccgtgcactgctcggattggcagaacggatgacagctccatggaatgatacaacggaaagaacgtggccttcagttcagattgtggaagcaacgttgtctgtgctgttcctcttgatggctagactatgcgctggattggaggtagtccgattgcatactgaacaatacctgttcccgttagatctgtatgttctcttgcccttctatcttctcttattgtgtttcgtgcttcgaatagagtatcagaatggtctaaccattatcacgaactccttctcttccctaacatcgaaaatagagatcgagcagaaaactctacactccttcaagagcggagtacactgctaggaagactactccgactgatgactagtccaaaatattctcaaaccaaaattgctatcggcgagatcttctttgctgtttcgaataagaaccgttcgtcaccctacttttctgttgcaggaaggacaagacttcgactccttccacaagtttttgagtattttgtctgaccctcgggtccttcccgcccccccttcttcgtatcttctaaatccatgattacgctcgtgccctttttaaaaaaccaaaaaaaactagccgacacgatgtctgcactgataggttatgggaatgccgctggctttcttctttccaaaggtttcactgccaacgcacccgtatcttcatcaaaatctaactccttggataacgcacctcgatcaaatagccgtttgaatccggtaacaggactcgctccgacaggtgggccgacgtttgacacttcgatgactgaggaagagaaagagagagaggcagagagattgtttgtattgtttgagaggatcaagaagaacccggctgtctcaatgggagttcctaatggagaagacaaggaggaaggagagaaaggaaggaggaaaacggttgatccggtgagacaagcggtggagagcggtcgatggcaagagatggacgagagtgtaagccccgttctcttcttatttccggtttggtcaagcgaggagcataagataagaatatcaatcatttaaccgttattctaactgaattctgcgttcaaaacggatgattcagacggaggaggccatccgacggttggacctcgaagaccagagagacgaacaggaagccgagaaagaactggcgactctcaaagctcgacggaatttctgatagtctccaaatgagcattcttgacatcatcctttctgacatgtttgaagattcttgagaatattcacgcagtgagcgcattacacaaaaaattgaagaagtgaaaccccgtgaaaagatgtgaagagggatggaagcgcgaaacaacgggatagactgggtaagaaggagatttgaacagatcgatggcgagggaaaaagcacagacgggagagaaatgttctaagatatatgggatttgtaacaagacaaagatgggaggaaagcgagtggagggcaaggggagtggaagacacgaaaaagatgaacccgaacacgaagaaaaggaaaaagaaagaaaacagaagatgaaggcaaaggagagagagaacaagaggaaagaaagctactttctcctgactgaatttggattctttcttccatgtccaatcttgggcaagaacccaccgtcccttccacctccgttctcgctccttcttcctttcccactcattccgacagagtacatctctggcatccaatcagcatccaaccagcttccacttccacctgctccgttgccaccagactccaaactcttctttaccaacctgtcagcctttgccttcctaccctgttccattcgaactcctctctgccattctgcctgatcctcacgaaggacgagacctgagccaccatgtttctgacctttggaagagccagctttaggaagagggatagagtaccgagtacctcgggtgtgatattgaaagttctttttcaagtgaaccgtggtggtttgctcggaagagccatcggtcggggcagaagtagtgatggatgttcggattaatgtgggtccaccacaagacgggcagaactttttggacgggtccttgcagagtctgtagagagcacaaaggaagaaggcatgctcagtaacagaaaggagaaaagtggcgatgataaggattgggggaacctacttgaagcatgcatgacatctaaggacccaactcttgacgctcctgatcctccttccttcacctccgaccaagttgagtcccatctgaagcagaacgttctggaccgcaaaatcgctcgtcatgcacgcgctcttcaagatggcagacttccgagctttcccgccggtttggttcgcctcaggcaaagcgagtcctagatctttagctttgtgtgtagagacattggaaggcgtgatccatgctcctccttcctcctcatcatcctcagagttggaatcatcggaatcagactcggcttcggcgtcagcggcctgtgccgtcgacgggagtgatggaggaacaacagcggtagtagtggcaacagaggacgatgaggaagcagaaggctgcggatccgctactggagcgggtgaggcctccagtgtagctcgatctagtcgttgagaaattgattcgacaatgtgatcgtcggctggaacatccttctcagcctggttgtcagtaacttcgccgttggcatctttctgatcttctggtgcgttggatgcgggagctgagacagaagtaggggcagagacagaagctggattagatgctgggcgctttccccatgaggaagtggaagggaggatagaagaaccaggggtagatgatgagccagacgtagtgatgctggcagtggtagtagcgggttgatgtttcgaaggagaggaagcgggtgccgaagagttgtttgacttggaaggagaagtgggtgcaggagcagtagtggaagcgttggcagaagcagaagcagaagcagggacaggtcgaccggccgggggctggatcggaaaaagaactgatattaaccccgtattctcaaagggtttcggtacgaggcaagagttaaaagtgtacggaccttgccgagttcgtctcggactctccagtgaccattctcctcgacttcgaccgcgtacgtcagagcaagaacacacagatcagtatgcgaaagcacggcataatctccggtttgcttagcgaatgcggtgactacgttcataaagaaaagacagaaggagaaaagggaggtcaatcaagtgagattaagagtgagcgagcctaggaatagcgatctgtatctatctaacgttcgaaagggagaacgaacccttagccaagcttacgaggtcgacgtctctgacctcgatctcgacaccctcaagaagacctaacctctcaaagtgctctctagcgcgcttgtctctgatttcggcaagcacctgaggggcaatgatgtactttgaggcaagacctctaagagggaactgtgtaagcaaaggggcagcatcgaggataaggttcttgataggcggctggggttgagaggaggacgcggagggagcagaagtggtagaggatgaggcgaccggaggaacggaggacgacgaaggaaccggagcggtcgttgaggagatggggtccatggtatgggtaagatatgtagggatggcgtatcctgatgagttctttttgattctctagaaagaactgtctttccccttctatctctctctttgtgcttgcgagagaactaagaacacgagagtagctttcttgtgggtgttggttccataatccaaaaagtttgagaagggaggaatggccggattaggtaagccaatgaagatcacgtggtttacgtaatgcgccctctctgtcgtaaccgctgccgctgggctacggtcgtggttacccccaacagcctactccacccagtaaggcccatctctgccgggtacgtgcgtttcctggtctttcttgttctttcactcccgacaaagaaaaaagacttttggttcttccttctagacaacaatcatcgtccccatcatcaccgtctgttctccttcttctccttaatagaatcggtttagtcatgacccacgctaccgcctctgagctttctggacacgtcggtcacttgtgcgtacttgccgttgttatattgatggttgcattgatgatccagatggagatcttgacgtccaactttccttcgatgtttgcgtgactgacgttcctgtctcttctatattgtatccaccttttttttgtttttttttttgtttggacactcctttctgtgtgcatgtatctctgtctggttatctgttggaatcgatcgaacgacaaatgtttgtgatgatactgcgaccaacacaataacaacgatcaatcggttaccttgaatccaacaggtctcccgagcaggagactgcccttatccagttccgatcgaacctcatcgctgccggtctttgcccggttgatccgttcgcaccggaagttgtcgccaacggccctgggtataaccgatacgacgacgccaccctcctccggttccttcgggcacgaaagtttgatctcgtcaaggcccaggagatgtggaaggctaacgaagaatggcgaaagagttacggaaccgaccagctctggaagtgagtctggacgagaaagtacaaggaatgatgagagatctttcggatacgtttggacagggattaacttggcttgttgctcatcaggacctttgattaccctaccggagaagagaaggcaaccatcgaaaagtattaccctcagtactgtacgtcagagtctttttcttgctaatgctctgacttgatgccatgcctcctgctgatttctctttcgtttcatcaacttgtgcaactctccctccggtgtaatctcgtctttttctgaaaacaatagaccacaaggtgagccttcactgctcttctcacgacatgagtcaagcgtttagtgatttaacctgacaaaatcctttcgacctctgatagatggacaaggatggccgaccggtgtacgtcgaggtgcttgggcagcttgacatgaacaagctctttgctgcgacgacgcaggagcgaatgattaagtgtttggtatacgagtacgagaagctgttcagagagcgacttcccgcttgccaggctgtcgttggacacaccgtcgagacgtcttgcactatccttgacctgaacaacgtcggattgagcaacttttacaaggtcaagaactatgtcggagaggccagtactatcggacagaattactgtaagcgtcgggattcacttgccatcttaccatggtatcaaagacgggtgagctgattgactctgtatgtgtgtgtgtgtgtgtgtgtgtgtgtttggtgcagaccctgagaccatgggcaagttcttcatcgtgagtttctttgtttgttatcgctttcggtgtcgatcgttggatttgaaaagtctgacatttcttggggggatttacttttctgcagatcaactcgccttatctgttctccggtgtctggtcgctcgtcaagccttggttagatgaggtgactgttcgaaagatctcgatccctggtcgggattggaagacccagctgttggctcaggttccggcggagaacttggaggttaagtttggagaaaagagcacggagccagcatcgagcgacgccgggccttggaacacggaatccggcagacaaggtgcgctcttgactcggggattttctttttcttttcgtgttggctttttgtttgttttcttgttttccaggctcagtttgctcatcggttcaccttgttcttttctgttgacagctgtcgccgccgctcacggcccttacagttcaacccactagattatgagacgactgcgttattgtttctcttttctttctgttctcttactcttttgtccctttgtcgtttgaccttgtgttttcttgtctctctccctctctctctctctctcacatgttgtctttcaacctcctctctttcttcttcaccttagcaccccctacgttctttaatgagatcaatcatccaagcattttgtttgtttccctcgttcttttcttttcttttcttttcttttttcttcgttctgttctctggagtgggatcctttgttggatgggaaaagtctaggatacaacccagacagagggagagaaacgattaaaccccaaggggaggaagaaaagaaggagaggaaggaggagaaaaagaagatctattgaaacactctccgtcgatcgggaaaaaagaaagatactgttgtgttctctccttgttcttttctttgtcttcttttctttttctttcgatatctttctcctttttcttgttgttcaacacatacacattcatgatgtccgttcaaaagaagaagaagaggaagaggaaaagatgagaaggaaaaaaaaaaaaagagatggagaaagctggatcgtctcggtttgattaattgttcttttgcatcctttccacaacaaaggggaggagaaggagaaggaggatgacgaggtcacgtcgaggtctttctgtttgtttcgccttcattcttttctgacacgtcgatcctcgtccttctgtatccgaccctctttttttctttttctcttgtccttggtcgtcttctccttcttcagtggtttcaatcattcattcattcattcattcgttcgttcgtgctgtatcctacatcctgcgttctccccaaaagaaaaatcaagcccggatctattccgtcctatcagaccgcactacaaccaagtcaagcgaacgccgtccgagagtaacgagagcagaattccgggaagaaagagatgggggggggggcaagacatagagagagagaaaaaaaagagggaggagacgtttagtgggggatcttgatgtcggccttctcggcgtcggcgatgaactttcggatgctgttggccctttgatcgtggtatcgacgtgtatcgagggggataggaaggagaaagagggacagggacagggaaagaacgaaagaaacgataagcgatcatcatcgggataaagggactgtaggcaggagcggtgattccaaactgtttgaaagaggcagagggaacgaaaggaaacgagacactgacaaatcctcctcctcgctagagatgatgatgatggacggggggaaaggagatcgttggtcagatgtgtcaaagagggatgggtaggggagaagagaagagaagaaaaaaaggacacgggcggtcggtcggtcatcacatacctggatccggcaatgttcttgacggtctctaacacggtgggcttggggacggcgggcttgttggtggcaaggtaggtactatcgggcgtgcagatcgagagattggttcagttggtttgaacgtgtgtgtgttttcaaagaaaggcaacacggggtgagggatggaaagtgatgtatcaagcttacccggctccgatggtaaagtaggtagcaagagcactgtttaggagaggggatgaagagggaggagggggggggaggggaaaaaaggatggatgatgagtgagatgacctcgtttcttgattggttggttttgctttggattatcgtagggatatgactgacatgtattcctatgaatgggcaaggtgtagtgcgttagtagattttcatttggacacgaaagaagaaaaaaaaaaaaaaggttttcgaccgtagatccaaacgacactcacgttcttgatgaacttgcccaagatcgtgcttgattcgtgggtgaaggatgaccgggagagaaagagatacgacgaaaacagataggcagggagagaagagaagagggggagagatagagagagagagagaaaagaaagaaaaaaaagaaaggaaaaagagagatgtaaagaggttggtacttttctgggcgtacttgggagatgtgtgtttgcgggaaccagacttactatcctccaggtcctcctcctccggccatgttagctgattgataaaagaaaggggggtgtgggtgtg

SEQ ID NO: 2746 - DNA, 364 bp, Xanthophyllomyces dendrorhous
ccagggagtgtgaccagggatcgtaaccaggaggaatctgaaagaaacgggcgtgggggaagagcgagggatggagagcgtaagggagagagagagagagaagattacgtaattttaaatattcaagtcacgtgtctatcggcccacaatcctttctctctctctctcttgctagatcgaccatcgagaatcgaacgatccgcagcagcgcggggcaaaaggaaggtgtgtgtgctgcgctgtctgttctgttgcctttgtctgtctgcgtagccacgccttgtcgctgtcgctgtctctgcctggtcactttgccttgcccctgcccttccctgggcctcatcctgtgccttccctgtgcctt

SEQ ID NO: 2747 - DNA, 511 bp, Xanthophyllomyces dendrorhous
ttctcttgctttctcccccttctccctctccatctacatctctacctgtatcaattctctcctctctctctcggaaactaacctcgcccatgccattcaccttctatccagcgagagatgcccggacttatgtacctcagggaaaaggtacagtcttgactttctttgcctccgaatcgtccactcaaagacgccagctcatcttttttttttcttgctttttcttgctttttcttgctttttcttgctttttcttctttgtccttctttgtccttcttcatcccctcccctcccttctacctaccctcaatacccatcgcatacactgcgcttccaaacacagttcggcaagtctcagcctcttaagggagcccgaattgccggatgtctccacatgaccatccagacgtaagtcttcaatctaacgcacacgtttctcgaaacgcaagatttctttcatcccatacttatccctttttttcttcctttttttttgcttccctccttatt

SEQ ID NO: 2748 - DNA, 3569 bp, Xanthophyllomyces dendrorhous
catcgagaccttgactgctatcggtgcccaggtcgcctggtcttcgtgcaacatcttctccacccaggtcggtcaactttcttatctcgcatcttttcacagatcttttcactgacattcattcattcatcccatcctatcttatccttcatctcgcaccttggcctccgtccacaggaccacgccgccgccgccatcgccgctaccggtgtccccgtctttgcctggaagggagagaccgaggaggagtacgagtggtgcatcgagcagtccctcaccgccttccccgacggcaagcccctcaacatgatcctcgacgacggaggagatcttaccaccatggttcacaacaagttcccccagtacctccccgagatccgaggtgtctctgaggagaccaccaccggtgttcaccacctttacaagtctctccgagacggtaagctcaagatccccgccatcaacgtcaacgactctgtcaccaagtccaagttcgacaactacgtgagtctgtcccttttggttctttcctcgttgtcaagacttcttttgagctaaccatgcccatcattttttctttcccccccccctctcaaaaaaaaaagtacggttgccgagagtctctcgtcgatggtatcaagcgagctaccgacatcatgttggccggaaagatcgccgtcgtcgccggtttcggtgacgtcggaaagggttgcgccgagtccctccgatcgtacggagcccgagtcgtcatcaccgagattgatcccatcaacgccctccaggccgccatggccggttacgaagtcaccaccatggaggagatcgcccccaagatgaacatcgtcgtcaccaccaccggttgccgagacatcgtccgagccgagcacatggaggccatgcccgaggatgccatcatctgcaacatcggtcactttgacatcgagatcgacgtcgcatggctcaaggccaacgccgtcgagtgcgtcaacatcaagccccaggtcgaccgatacaccatgaagtccggacgacacctcatgctcctcgccgacggacgactcgtcaacttgggttgcgccaacggtcacccctcgttcgtcatgtccttctcgttcgccaaccaggtcttggcccagatcgccctctggaccaccaacgactacgacgtcggagtccacatcatgcccaaggccctcgacgaggaggtcgcccgagcccatctcgatcacgtcggtgtcaagcttaccaagatgaccaaggtccaggccgagtacctcgatctccccatggacggaccctacaagcccttccactaccgatactaagcgcgccccggtggctttggtatccgtttacctgcattcttttacctcaactgtaacattaccctgtcacacatagattttcacccacaggcttcaaccgccatctttcattaagagaaaaaaagacaacaaatatatatgattttgatccatcaattctttttcttcttctttttttttcccccttttctttctcttttttcttgtttccaaactcgccaagtgaataaggaaactgagtctcgatcaagttggatggacatcggctacaatggacaagttatgaaacagcagtacgatcttctagcaagagcttacttaacaacaacaaaacaaaacaaaacaaaacagcacagcgcgacctcccccctcacggcgatcgatccgttcagagcatggcacataagtgcatcgaccttagctcctttgttcagcctggcattctcagccaagctcgtccttcctcgtttttgtttattccttgtttttttttttttccttctctccttttcagacaccatgagctgacatgctggttcaaaaatatggaatgctgtgcaaccaccgccacacgacgcccttgtcgaatcccaaacctttaccctttacgtttcattagccatcactttgccatcatctcactctgctctcactcgaccaacgctagactctcaagggctcctgcatacacatacatacacacgcgcatctcacccgtaacctcatcccctctctcttccctccgcttaggactcgaacgatcatccaaaaccgctatgaacaacgctccttcggtatacgaaaactcgacaaagaagcatacgatctttgtatcaggtctgccggatggtgtgaacgagcaacagctgctcgacgtgtttgtctctttcggtacgcgtctctgagacctcttttcttatcaggctgtccctttgttgttctcggaggaagaaggaagaggagaaagacatcggatgatcggtcaagctgatagaaacattctgaaccgacccggggttgcttgggttccggacgttccttcacaggtgatatcatcgaagttcaactgcccaaagagccgtccaaggagggtcaacgtgagtatacccatgctctgttctgttctgttctatcagacctggtcctaacagcacggctttcctttcgtccatcttttgctcgccgtcctctccagctaccagacatcgaggtttcgcctttttgacattcacgtccggtcttgacgcagatgacgcagtatgtacacgcactcacgcacgcacacacactctctctctctcgctcacaacgcataccatgactatgagcgaccacgatcccaaagactgaccgtctcttctttcaacgtggggctttctttttttttttcctccttgggcatactactttatcttcggtctcagatcgcaaattatgatcttaattattggccgggaacgaacggcggacgagtcctcaaagtgaacctcgctagaaatacaaagacaagtcaggctccaggagcacgaggtgatcgagccggtacgttctttgcgatttcctatatatacatttctttcttctctttctctctttctcttcacgactcgacgtgtggacgcgctgtattgactgatcgtctggctgtttgaactcgtcgcaacgcctgtctctcttttcgtatctcctctctctcgtttcatgttgtttgttctcttcttcttctttttttcccttcctctctccattggcacagtttggtcctcggaacaatggctgaaggagcacgctctaccgatatcacaatccggtggcttgggtgatgcacgactggaggatgtgtcaaaaccggtagaagaagaagtcgagctggagcagtgatagttttctcttctttccttctctctctcttccttttactacccccacgagtcgatatcgttaagcgtgcatgtgtgccaattacaacaatctacacgtcccttgtccttttcaatgtatagataacatgttccctctctccccctcccccacctcgccgagtagagaacttggttctgtttagaaatgaatgagaggaaaagccgagagaaatgatcgggtcgctaagggggagggcacgtgacctggacgaatcccggttactcctgagggcgatagtaccttgggaccgtttgtccgaccacctcgaaacaccttccccccaaaaaacatctctctctctctctctctctctctctctct

SEQ ID NO: 2749 - DNA, 36788 bp, Xanthophyllomyces dendrorhous
  misc_feature (11258)..(11267): n is a, c, g, or t
catcatcatcatcatcatcatcatcaataatatcaaactctccttcgtcgacatcgccacccccttcgagctcaaaagggaaattagatttcgtcgaaggggagaaacgagcgcaatggtccaagagctttatctaatgaatctgtactttcttgtttcttttccctttttttttcctttataagaaaaaaaaaccccgtctcttccttccttctttccttcctccctctgctcgttacctgtgttctcttgttctcatcggcaggagaaaaaaaagggggggaaaggctcgtagcacagtatgaagctctgtgaacgaacggacaaagtctcaggccagacccggtcgactcttagagatttagagcgtcaactacatgacgtgagccccatcgatcggcgcacacatccacgcacgcacagatttctgagaaaccaagttggggagagagagagagacgacgttctatttctcaaagcgagatctttcttctcagtctgtttgacttgatcctctcgaaagaaaaagacacacacacacacacacacacacacacatccatcccccccgagtcgaatgcctcgttccgtccgtgaggacacagacgcacgaagaaagaaaagaccatgatcatattctcattcacaaggttaggcgttcgagagagaaggaaaggaaaggggaggagaggagaggagtgttacgcacgtactctttgggatcctctcgtccggccactcttacttttcctcgttcgaaaagattagtttccttccccattatcttcttttccttttccatttccttttccgggacgtcttgccgcgttttcgacgttccttttttgttcttgttcttgttctttttcttggtttttcttttcgtttcttcggtttgtcttgttctcttccttcttgattctcttggatttcttgaaagaaagggagggggggagggaaaggcatcttgtgtatcttcttgagcaggcgaggaaccttcaggacggtaaggcgcgccagagacttgtcttgagacgttttcttcggcttcttgtttcttctatgctctttttttaaaaaaaaattcctccctcccccgggtctcttgttcgccgtcatgagtcgcggtttcttcttccctttttttgtttcgttttgtttttttgtttcgttcttcttttgttctttgtgtgtgtatttcttctttgggagtctatacagtcagacagacatagcgctcaggttggaatcttcaacgctaggcagtcggcaggatagacaacgattcgtcaggggcacagtgtgtgtacggcttcttcttttgtatattaaacgggtcttgattcttagtcttgggcttgatggcgcttgaaaattgatacacagcaggagaggggatggggtcgggaatacttgaaggaggaacaaaagaaaaaggagagtgaatgtcgctgaaacacaaatcaccatcggacggcaagtccagcgttctcggctggcgcgttatcataatccttgggtgcgatcgcgtgagcaggagatcgcgagtaggatcgtcgagctcgagggggaggactatcggaagagacaatcaaatagagattcagaaatgcaaaactacggtgacaatcggaatagaaaacatagacttacgatggagagtaccgcctttctcttcgaggagagtatctatccctggaggatcgtccgtaatcactgttgatcaagagaggatctcaaaggtcagacaggcagaattagcacaggatatatcataaggcaactgactctcggtcatagtcccgatctctatctcggtctcggccaaagtcatcccttcgtcgatcgtcatacctggaagggcgtcggtcgttgtatcgatcgtacgatcctccaccaccaccataagatccacctcggtcgtatcgatcgtgtcgatcgtatcggtctcgtcctccaccacctccgcctccacttcgatacgcccgaggatcatctcgtcgcttggcgcccactacacgagacaaagataagcatgatggacaaagagaaggagttgtcgatggtacatgtagcgttcaaggcggtgaaacagaatggtatgattagcgaatccgtttggtgtcaccttttggaaccatgcgtcatacgaaagcgaggtactgactgtattctcctggtgtagggttatgaggccgagctgtcacagagaaatccactcggatgcgcctgccattaagatcgagaccgttcaagttttggatgcatcgctcagcgtcttcgaccgagcccattttgatgaatccgaatcctcgagatcgatccgtctggaaaggggcggaacgagatcaccaagtgaggccaagatcagtatcggcgctgtttagaagccaagtgagagaagcgacaaaccctttggtcgtagacgatggttacgttgacgaccttgccgaatctggagaactcctcgccaagcgcgtcctcagtggttcgaatagaaagaccgaacacaccaagcgtctcggattttggaggattctgaataagacaacaagaggaacaaaacggggtaagaatgcagagctcgcgcctgtttcatccgagtcagagagagaaaagcacaactgacagtaggcgcgtattccggtcgggagggaggggcagcgctagaggttgtatgacaggttgaacaaacacacacacaagacagaaagagacacaacagaccatcagagcgaagatctctcgacaccgaggcgggaacatagataaacaacgagagcaggtctcacggctcccttcgaacgtattctctctctcttgacctagatctagacctggatctagacctggatctgtctctggttcggtcctgatccctgtcatcatcatagttgattctcggtggctctgatcctcgtggtgggacagagtccgctctggacaagggagccggcggaaggggagagagcctgctggattcgtgactgtctgcgtgagagctcatgttggatatagatcaagatgggctggaacaagatatgtgagatggaacgatgtggaggtttaggtcgaaacgttcagcaaagatggcaagatgatgagcaggcaggatcagaagtgtaaccaacggcctgtaaccggtggcctgtaacggtgtgtgctagccggcagatcagaagatagcgcgcaaacacacgtccacgcccacattcacaagcgtgcctatacacacatgcataaacgccataaaggatgcgctaggtagatgtactaagagactacgattctaatcatatatcgtacggtaccttgtgaataccattggtagagaagggcgagatgactacgacggctgcgatggcttacacctcgtccgaacgactagaccgcgagtagaaagcaaactacaaagcagactacaaaacagaccagccagactagaaacgctcgggcaatgttgagtgatcgcttcgccagacgcgtcaagatggctacgcgttgggcataaccatctgacttttgcgtgccttaaataagtcagaacggtctgtaaccaaactctgcgatccgtaaccataaccctaacagacgcggctggttctgaggcgaactctgacctcgttttttccctgacttggctcttttccagtttgagtaggcaaccaccaaggcatcaacatggtcagtctccacgccctctggtcttttttctttctttccacacagggtagcagagtggtcgacgtcttggagagcatacagtacagtatatgggaattcgtgtatttcacgtatttttatccggcccaacaactggatccctcatttctccgtcacaattatgcccaaacgctccaatatgggtctcaaaaatttcaacaccaaaacacgtctccaatatttcatctttcgatcggccatcgtcgcgaagaagaagaaacaaaaaggagagacagatcgtttttttccatctctgggtagactgagggcaggatttcactgaagagagtgaagaacgctcaaaattggtcggcgggcaggatttcggcggtgaggaaagagaacggagaatggaagataggccaaaacgaagaactctggggaacgaacagtctcgaccaaacagcacacggtcatcctcagtacacgatcatcatttctcttgggcctcacaaccagccctctcgacaaaccacgtcaagtacctcccaccaccgatagcgcctctcgactcgaacccatatactgtgctctagcgatcttgacccctgtgtggaaagcttggctgttaaatgcccacaagatacttactagatcatgttctgctttaccctttcttttttgtcctcgtaatggaatgaattgctacaacagggaatcgacatccagcacaagcacgtcaagaagggtgccaggaccgcccccaagtcggaggatccctaccttctcttgcttgtgaaggtacgcttctttctcttatatttgttcactgaaaccaaatcggagttaacgatttcttgttctcttttcaatccgcccatacttcattgtttatcgctcttctcgatctttgttaaatctctattttcttcactcgtttcaacctccctcagctttaccgcttccttgctcgacgaactgagtccaagttcaacaaggttgtcctcaagcgactctttcactccaagaccaaccgacctcccctttcgatctcgcgaattgtgaagcacactcacaacgccaaccctgagggaaacaagaccatcgtccttgtcggaaccgtcactgatgatgagcgattcctcaccgtccccaagctcaccatcgctgccttgaggttcacccgatccgctcgggagaggatcatcgccgccggaggagagggttagtctttttcttgcccttctcttgtcttgctttctttacacacgctcatttaaaaaacgattctatatctactccacagctcttactcttgatcagctcgctctccgatcccccaccggatccaacactgttcttgttcgaggaaagaggacctcccgagaggcctaccgacacttcggaatgggaccccgttcgttctttcattcttttttttctatcctataacgggcatattcactgatatctcttttttgaacatacccttatagacaagaacaaggccccccacgtcatctccaagggacgaaagttcgagaagggacgaggtcgacgagcttcccgaggattcaaggtttaaatatccctttgtttccctccttgtccggctttcatttccacccccaattcctccccctctttttcttttggtttggaacgtttctttggtcaaagttttcggagaatcggggaaggaagacaaagaagagactcgactggcgctttgttgcgaacggtttctcttgccttttttttctcctttattttccattgttttgccttgcgattccatgcaatcttccgctcctgtcgttcttacccgctgtctagcttgtttggtcgctgcgtactgaaaacccaatgagagagttcatcacataaccatcaagacctacaaaagaaagaaggcaaacaactacttttgtgacaaagatgctgataacgacaggaactagattcaacagaggtgagggcaacagggagcttgtctgtatggttccaaagtttcattcatatcccttgcttttggtgtggatgtgctgtgcgggtgtggacgtgtgcgtgcttcttttgcctacatctcctctctctcacaaaccaagtttcttatctcgatagcggagtctgtctgggatcagagctctttaaaaaagtctatggatgtagtcttatgggtttgtttcggacccgttaactcgattcacgtccgaatatgaacaggattacaaacaccgattacggctggggatgcggatgtagcagatatgaaaggtaagcgatgaacaaaggacaagtggcaagtgatcgagtgataagtatacatgaaatcaccagccctctggaccttctatgttccttcccctccttctctcccatgctcgttcttttccttattcttgcaagggaaagattgagagacagaacgcggaacatgaagtgtaggatatggcgggagaaccagacttcagatctagatctattcttgatcgacgtgcatctttccgttctctggtccttcttcttcttcttcttcctcttcttcacgccccggttctggtactaatcctgtttccacgtgagatccgcttgagagtgcgggtactggcggttgtaacgacgcagaggaattcaagggggtagatgtagatacagatggcgatggaggcgagggggatagaggtccgttcggctgattaccactcaatggttcgggcacagccacaggtgcgctggcatcagcgtcagtggtggtggccgtatcgtcgttgtcatgttttaaattggcatcgacggtggaagcagagacagcagacgctggttcttccaatttagataccgactcttgtccgagttctccacctatcgacccatccgtcaggtccttcgcctttgcctgcgctgtcggagaaagaagtgaagaaagaggatgaggcggagcgtccgactgggacgcatgtgccagaagagagggagaaggagcggggggcaagaagtgggattcgtaagatggcaaagacggatctgtaggagccggaggttcgatcggtacggatagtcgttcgtatataatcctgttatcccgagttgcgacgtttcatttcccacccggattatgtccaaacgcatgcatacgcacagaagaattagaacaaaaaatgaaatagaaatgagccggaaacaaagaaagagatataagagatcggagagaaagaaggagaggaagagagagagagagagagaacgaaggagaacgaacgctcgttcgagtcgagctcgctgaatatctttcttcgccttaagaatcttcaacagcagcttgtcattatcctttgtcgaaaagttcgttggaacaacaagaaagaaagtcaagaaccaaagcatcgtcaggttgtaagttcagatacggatacgaacgaggacggaagtcatcagtcctatctctacgcggacctcgcaacatatccaaggagaagaggaaggaaggagagataccttctcgatctgcttgactttcagctttaagtctttatatttcgctttatattttcttccaaccccgccgagaagagcattgagaagcgttcaagtcagctcttcttcctcaaaagccagaagctagaagccagcagctcgattgaaaagaaagaggaagagagacacactgaatatctccatcccgagacaactgagcaccataagccctcgactttgtttttggtaacggacctctgtgatgtgtgtattccgctcctgtcgtcgttgtcgtcgttgctgctactgctccgactgctgctcccgtaggagtaggagctggagctagaacgcccgtttcctcgacagtagacgtaggaacgccagctgattctgtggatggcatgccaagatgtacagtttgagaagatgccattcctaaatgtacttcttttccaaaatgaacgaggggatgaggacggtggcgggagatgtatgtcgatggtaggttgcgcttttttccctccaggattgacgcgtgatagggaaaacaccgaacgagagagaagacaagttgactttctcgtgtttactcctcatcaccttccttccttccctagccttgggtatcaccgtttcaaatatcctttcaagtcttcatacacttgttctaaataagtgtttcccacgcgcatatattcacaggcatacatatgcaggtacatataaacagacgaaccctcccattccataagattaaagaaagcaaggtaagatagacagacgacaaaatgtcaagataaatccgatgagatttttgtataggcacatatatgaataaagttattctgtttctattcaagaaggaaagaaagaaagaaacgaacgaacgaacatccccagtttagggataaaatgatgagaagctcgcctgacgcgacaagatgagaacaagataggaatgaaaccagaccagataggatataggagacagatatagatacagatggataccaaacaaaggacccatgaggaaaggatcatgaacatgagaatacgaaagtgggaaggtaaaaggatggcatgtcatgaaagaaataagagggcatgtgtacaagaagaaagcaagccaagggagaaacaactctcagagggcttcaccccaagcgacggtactctgtaccgggctggctgttcccagatcaatcatcggcctcttagtcgtttcgggttcggagtctgagtccgaacgcactggtgtagcatccgcgctgggtggaggacccgaccaccacgtcggcgctctcaccatagtcttgctcgttctccagaactctgtctggagggcatctgtggcgatgtgtgcactatgtgtcgcctcgagctcggtctggtctacgttgactcgaaggtaggatccatctaggtggtagaagagaggagcggtggtggctatggggaaggaaggtgtagctggttcagacgacctagcggatgagaccgacgaggcaaacgaggcgaatgactgggtagacagtgttgactgtctgtcccggtgagtaataagtctagatgattggctgggagaaagtagagatgggacgtggtgggacgattgaagcgaggcctcgagaggcgggacgagatgagagaggttgacggtcaagtcgtcgtcttcgtcttgatcattagcatcgtcgatcaagtacgcgagcccgaaaggctcactctcagcatcctctgccggaagtctgactctgagcccttcctgtggggtgacagtcggtgcagaagggactggaggcagcgcagacgaaggcgcagacgaagatggcggcggcggtggcggtcgattgggcttgtgtataaattcggcgacagcagtagatggcttgatgggcagggtgacgtctttcatgaaatttttccacacatgcgctagctccgtctcgttctctttctcgatctctcttaccggtgcagacgggaacgggaaacttgaaatgtcgcctgatcgcgcgggatgagccggacaacaggccgaaggccgcagggtctcttctccttcatccgaatcgttctgaggatcagtgacacggccggttggatgacctaaaggagacggatggggcggctggtacgttccgtgagtggcggacgcgatcgaggccgatctcgtcctcgtagccagtccaccagcgagaaaggtagatgagccatagaaggtggaatccgcaccggagccagtggaatgggagtgtatgctggaggctgtcgtccgattagaagctgtagaatttgctctgcttctgttggctgttgtaggaagggaaggaggcccggcgcgtgctcgagaagaagccgggtggaccgggaaagacaggtgaccaagctgagattgatcgagagatatgcggtgactgttgccatcattttcaccatcgacatcgtccgtatttgtagccatggaaggagggggaaggctatcgatcgaaagatggagagcggccggtactggatacggcctgcaaccgaatgggttgtattctgctacatctgagggaagggaggcgtgaagatttgaccggttgattgtaaaatccgtttgttggacctgaccagaggctggaaggaacgggtggggatgatggaacgaggactgggacttgttggatgggtagaaggacgactgagacccgttgggccgatggaaggaggacgacgacgactgggatgtttccggtcgatcgagccgttctctactctgagcggccgacgaggcagaaggcagatgatacattgacgatgcagctgacgactgaggatatactgacggggtgtttgatggcgcagctgacgagactgggtagatgacatttggctcgagatcccaactgtcttcgtgttggttaccgtggcaggaccatgaggagccagaggaagagtgtgagtctgtcgagacggtcgagggtgtacgagagagatcaaggtttcggccgaagctgtctacatgctgtggcttgttttgtttcttcctgttcccaaacggcaggaccgatcggacggtgtgacctgtgagtttcccggatgggctcgccggttgatctgccttggcggctttggacttgagcttgaaaaagttcatcctatgagaggagaaggagagaaagaaagaaagagccgaagatgtcaacagagggagaaagggaggagaagtagaaggagagaaaaaggaaaacaggaaagaggggaaaagaatcaagtggactgacctggttgatgtgagatgtgattgactgacctggccgtgttgctctatgacgagaaaccgagaaaggaagccagccagaaaggatgggaaaagaagaacgagaaaaaagagagcacagtccgtatatctacgagaaaccaaatgtgaaggagagcgaaatccaagtaggaaggagaacgaagaatagaaacgggtagatgaaagagaaaaggagagaggatgagaagaagaaaacaaacgggagtgaaagatggaaaaaaagggatgccagtcggatgttgagtgggcgcgagtgggcggcgtgctatcacagtgaaaggtgagtgtgattgtgaatgtagagggtagatcaggcacacgcaacaggcacactagggcaaaaacaggaccaaaacaagggcacgctaagaaaatcagagcaccacgcggcacattatatgataccaatcaaggcatatatacataaatcagggcccacatacataaaatatatcaagcgcacgtcaacccaaaacagactaactcaaataaacaccggatcttacagttctagacctccttctccctttcgttctctctgtcctgtcggaaatcacacccgcatgtcgctttccttcttggccctctttgaatttctatagtcgatcgttttttctttttctttttttaatatttcctctctactgtgttcgttagtccatctagtccgttcattgattcaacactcaatctatcggtccatccttatctcttcttttctttccgtcttactcacacacatacaatattcactctaggctcattatcttcaagaggatgtgtcttgtttttgtttctgtttctgttnnnnnnnnnntctttctccctagtttgctttcttgcatcttctcttactcgattcatagacagtaatctatctattgtttacgtgctccttaatatacattttttccctccccgctcacgactgcaagcgcgcaatatcaatcggctccagctcgaccactcgatcctcacccagactggctaactgagctctcacttcggctaactcgtcaatccacgtcacacgctggtcctccagccgtttcaaatattcttcctccgttagcgtcgtcacgcttggcaacgactcggacataaaccgtcggaacgaccaccatggcagcttttcttctttcctctgacccatcgatccggcctgttcgcttacctccggactacctccagacaggttgtcgacagggatcgaggccgtctgtttgaaagcctcctgttgggcgacagttaacgtatccatcaaggcttttcgttgatcacgtctgaccgcatgaatatcaacttcagggataggtccgacagcgtcgtaagcgccgtacatctttgcctggtgaatccttagctcgttcgatacccattgaactaggccggatgtcgcgctcgcaaacgctgtcgttatcgtcaccattcctaccgttggtgccaccactttgaaccctccgtaccccaatatctttccttttattttgttttgtcgcgcaaattcgtaatgatttttcctctatcgaatcagccagagtacatacacacccatatacactcagaacgaagaaagaaagacttacgatacaaagcaggaccgagcgtggcagtaaacccaccggcgagtgcactatccatcactcgtctttgtcggatgtccccccacgtctctggacccagactcgatagctctcctcctatctttgtattcgatcttgcctttccattggcccgttcaatcgctagtttcatctgacgacggtggtccgatgtgagaccggctttgagcaagagtggtgaaaatacgagctctctcattccttttcaagccagtcgcaaagcgcgtgcgtgagtgtacataggcttaattaaaagggaaaacatcagttaagaggacaagaaagagagaagaacgtaccgaaaaagacacaccccatacaggcactgttgaatgcggtcgtcagcgcaaacgtacccactcctgtatcccccatcacacctaacactgtaccgactactcctcctccagccgctaatcatgtgtgtattcggaagagagaaagagagaagaatagagaaaagatagaaatatgacgcgtgagaaaagatctctgagtataactcctctacaccatcgcctaaaatgatacagaagaatacgcacaccatagaccgattccccgaccggacaccttccacgcgtcagcacctatcggccattccggttgcttctccttactcaacctctcggctctttccaagtgagagaagtctggtgtagctgagcatcttaatagtatcggtgatgagttcgacatgggtttctagtcgtacactctctatatgtatatatgtgtgtgtgtgttgtacaaatggagagtgtttgaacctaacgggcgagaatgggagaagaaagcacaccgaacaatgcagttagggttggatgagatggtcgtcagggtgactaacctataaatatcatccgcagtctagccccttttttggttccttatgcctgggccctcccgagtgcgcactctgcccttgctgcggatggactagctgaccgtcttcaccatttcttttgacagccaacgacagaaatcaattccagcatacactcacatccgacaccgaccgctcaccttcttgccttgccttcattcttgcctggagcaagagaacagtaaagggtctagttttcaaatccagtgtacacatatacacaatctctcgaaaccagtctttctttttgtttgatttagaatccgtatcggagagatctcattccttaccttaaatcctcccaccactaagtttgtgaaagaaggagacctctataatgtctgccacaggcatcttgcaagtcctttctctctctctatctctcactctcttggtcagagagaaaagcaatctggaactgacttctggtctctatctctctgtctgaaccctatcgattggaaacctgatattcagaacgtccgctctgtacgtcattcttttcttccctttgtcctcgtctttatgaattcctcagccgtagctcacgcgagttcggatggacgagctgatcatgtgtgtatctgcgcgcttaccatttctcgcttccctctctctttcttctatccccctttctctacagggtgagctctgggaataaatacacacaaggtaagtttttgttaccgatatatatcttatccgatcagattaggtgctgacccgtccccatcaatagtctcggtcaaagcggtcatctcccagatcgccctgatgagcggaatttctctggcgacacttgttgcgttctcattcttcagaccgagagagagaaaggtgtacgctcctaaagtaaagtaccgttcgacggacgaggacgagttgccgccgcctgctgtaagtcctgcagacggttctgacttttggtgtatagagttctagatagagatcattcgtgctcatagatcgcctcgttgccctctcccgatggtagctcgattctgggtttttctcttggctcaagccgctcatcaccaaggacgatctagatttagtggacactatcggtgagcgcccctccgctctttacactgaccagccacctggtttctgcccgttcttttaaagcaactcactccccctcgtttcacttgcttgaactcgatcaaacacaaaaaggagtcgacgcggtcgcatttctgcagttcctctcgttgctccgttggttctttctcagcgtgtctatcttggtctgcgccgttttgttgcctatcaactgtacgtccttcatcctcttcttcttcccactccctactcctcacgcctcccgagtctctttctttatcttcaagatgacccattccgtctctgcaacctttcgtttctatctatatacaccgtctgttcttgtacagatatgtactcgccaagtaacctggccactatcagccgattgaccatcagcggcctagggtcagtccacacctctaccccgcatagttattctcccagtatcgcatctaatccttgatcgatcgggccggaaaactttctttttaaatagcacgcaaacggacaatccaagatataactcttacatcctcttcgttcatgtcggcgcgacatatctgattagtgagtgctcaaaatggtatgcgcgccgggcaatatataccaatgctcacacgtcgccttcctcccttccgatatttgatagctttcttgatgctcttcttttgctggttctactggaaaaagatgatgagcgtccgacaggcttggttcatgagtaagaaattccaaaggagtatccaatctcgaagtctgatgatcgtcaatatcaagaaagagtaccaatcagatgaaggtctaaaggcgctcataatgcagcttagagggggaaacgagaagcttgcttcaaacattcagtctgctatgatcggtcggaatctcaaggtttgcggttttgttttgctttgttcgtttgtgtagtgatcggatgagatactcatcagagtttttgactggctaatcaggagtacccagaaatgatcgtacgtcatcttgagcgttactttccctccttctaaaatctacgcctctccaagctaactgtttcaatcgtaccctattctttctctgtaggaggactacaacgatactgtccgagatttcgaagaggttcttgtcaagtacctaaaaggtggccaagaaggtaaacgaagacctaccatcaaacgaggtggtttcttaggtatcggcgctgaaaaagtggttcgtctcttgacttctgtttttactcacctcggcactgggtctcgcgtggtctgacgtcttgatcttcattccggaattataggatgccattgagttctatgggtacgccatgatttactctttttttcttcgctgatgactgcttcatctcgctctacatcgagctaagtcttcgtgtccaccccatcccatcccatctacgacagaaacaaactcggtcgacttcgagaagttcttgacgcaaagagagaagacattgagattctcaagccaaagtacaagaagaacaaaaaaccgggaacccatcctcatcagaaccaggacggttcaaatttgacacagaaggagattgcaaagagggcgagaaacataaagattccggcggagaactacgggtttgtcagcatgatggatgccgctcaaggtgccttccttctttggtgtggaccttttgaccgctcaatacacttgactgaacggatgcccggttctcttcttccttttggcggaatcagctcatgcaattgcaaagggccatcaaggctctcagagatcgcttcgtggcgcggagctgactcttgcgcccgctcctggagatatccgtccgtgcagttctttccatccttgtatttcatccgggtagaacgataagctgagatcgtttctgaaacgtctcttccttgtttttctttgtcgaggttagtctggcacaatgcgaatgttacaccgggggaaagattcaactcaaaaattgtcggatttgccttgttatcgctcggtgtgtatcttttctttctcttttcatttgcttgttgaaagaccaatcgcatcgatcaattatcttacttgttctcggttcgcctccctttaaatccccaaagtctgctttttcaatactgtcccgcttgctattgtggccgccgctgccaacttggttactgtgcgtgtgattttcaagtcgtctctcatctatccctgctcatgtctctcaatttcatggttccatttttctccattttctctcctggtttcgcgcagctcgcagcctatgtgccctttttgaacaaatggcaacaggcaggcacgttgggtgactggacattctccatcgtggcaggagtgttacctcccacgatctcggccggttttcagttgctcttgccttactttatccgaaaattgacaaagtaccaaggagccgttagttttacctttttttcttcttctttgttcttctcttcggttcgcaatagaaaagggattttttggcatgaatcataagctgacgatttcctgcttgttgactcaattttccatatgaacctagacgtctcgatcacaagtcgaccggattgtcctcactcgatactatgcattccttgtcatttcccagttcttcgtcttctccctcttgaccgtgtttgtcaaccttggaatcggaatcgccaaagaggtcgaggagaagaaaagctttaaagatatctgggatagttacatctccagtgagctttctctctctatacgtcacttttctgtccatctctcgaatccttcttggagttgtttcgttaaatatttctcgatatcttccatgcgcgtatagttttgccctctgagatccagtccacctatgttcttcagagcacatattggttgacgttcttcccgtgagtccatcctttctttacttacgaatacgatcttctccgttttcctggtatctgacgttttatgcactctttatccgttccagccttcgaggcttcttggtcttctttgagttggctcagttgatcaagttggcccttctctcgataaagaccttgcaagtccccctctacctatctgtcatttttgttttcttcttcaaaagggagtctctgtctttgctaatctagacactctcggggcgattgggttgcgcttgtagcttgtttgctaggactccaagagatatccaagaatggacccgaccaccttatttccagtactcgatcgtgtacgcaaacttgttgtttctctgtaccgtcggtttggtatatgctcgtaagtccaggcgtagttgttgatcgtctctgccctgcagggaagtaattgactcaagctggagttgtctctgtcggctcattgtcaccgcgtagccctggcgccgttggtggtggcttctgcagtgagtttctatggtcttgtctcgttgtttctcatgttctcgttgttctaaccctcgagtctgttatcttacatgaaaattagaccatcgtgttttggctcagtcattacatctacaagtatcaactactctatgtgtactcttcgagaacagagagcggaggacggatgtggaacgtggctatcaacaggttgttggttgctttgatgttcatgcaggctttaataatcctgagtcggtgtcctctttctatttcccgttctcaaggtcgtccgtgtagactaaaccagggcgagttatatctggtttcttgacaaaaatatatagctatcagcctccagacgaaatcgtgggatgcgtttgcagcagctccccctttcatcatcaccgtcctgttcaaggtatttgttctccgaccttatggaaaccaattccattactttgttcccactttggaggcctcacacgggcttttagaagaggccagacattcctataaacaacgggtacgcgcatagattttcggcaggttctttttcgagacacgttggttctgattgctctggtggacgtccttctccttctccttcttggtgttggtttcttgcagtttattcatccggctttgaaggatgatgtcttgttcaccgtcacggttcacaaggagcagcaggttcgtgatgagccttctcttttcatcttttatttgttcccctcatcgacactcatacgtttgattggatatcatttgtttcacaggatcttgtccaacagattctcgcgccttactcttccaagcttcagagagaggtggcaggtgtcagagaggcatgtctcttcatttatgattatcttcttatctaaccttgggcttgatctgacttgaccttttcattcgtacaattagaccgatcttactgagtacaacgccacgctcgatacggagaaacaagtcgagctcgatgaaggtggacatacagctgaacacgacggaaactctactttccgaaactccttcgttggtagacctaacggactggaaagatctctcacagaggacagtgcctttggtggaaccggctatagccagtttgcgaccaacgatggatcgacggtcgagctcattcattcggctgcccctatggcggatgccgggggttggtacggccgacatcaatctcttcccgtatgtcctcttctgaatcgtgccttcaagtcatagacatggagtctcattgctaacccggtccttttcttctttatcgcggggcggcctaaaagaacgacgaaccggactatgaaaatccttacagccatccatctgcccgtcaccaaccaacaggatcgacactcgccacacttccactcctcgatcggtctgatcatacacccgctttagaatcccctcaagaggagtatcaaatggcagagttcaactttcactcccatcccgactccaacaactacagaggtgatcatactccacccccagtcaggagtccgagcgggtatgggtttgtacctacggacaatcaggatgaggatgacgtaggcgagagttatcacccacctggctatgagatcaactaccggtaaaccgggcgttggatcttaagcacattttcttcttcttctttctttctttctcgtaaaacttatgccccctctattcatattgtcatcactttttctccacctctgtcgtttttctgtgtctctcgttatcagtctgagctctttgttagagtcccacggtcattatttatctatccatcttctgtttttatttgctcttcctcttcacgttcgttttcgatcttgttttcaatttctgcttgaacagtatttcgttcttccctctgatcttctctcgctcatctatcttttcatttctcgttccttcttctccttctccatggcattctcaccgctatatgatttcattccgatccatctcactcttttaatgtccaattgaaaaatgaacaaccatttctttctgcgtatacgatgaatctttctcttctttctttcatttcagcttggcacaaaccaagccttcttctcaaaatcgagatatagatcataagaaagatagggatgtgaaccggaagacaagagttgtaaaaaaaaagccaatgtaggaaagaagaagtaggaaacgatgaaaagagggatggatccatatgtaaaggaaaagggaaagagaaagaagaggaaaagagagttctactggtctaggtcagagtttagaagaaccaagggggagagggaatacccgaaatcttggtcaacactcatgctggaagaaatcgaagaggaagcgacctaaaggaaaagatggacactcactgggttttattcagtcttttgcacctcctgctcctcctccgtctcctcatccgaaccaccgacgatcaactccttcactccatcgaccaacttctcgacctggtctatcgggttacccgaattttcatcgacatccccgttctctacctgaacactatcctctcctagctctggtgcatccaccatctcttcgtcaccatcttcgtcttcgtcgtcatgaccgtggctgtgtccgtcaattccatttccgtgactgatggtaccttcagcggcatttgattctaaccgtaaggcctctgaccaatcctcttcaaacagatcggcagactcggcaggatctgcaatcgtctttgcgaccttgcccttaccagtactcgccaaatgagccttccacttgctgaccacctcggatgcctgactaggtgcgtacgtcctggcaaggaaggcagcttccggaactcgatcggtcttcaccagcaaatcgatacacggcttgacgtctcctagttggaggaaagcggtaaaggcgatgttgtgaaggcccttgtcaagagcggctttagccaaccattcgatcccagctcggtcacccaacgaggtgtaaatcaagaggagcgccggcaaatctaacgcgttcttgaagcactcctctgccagatcgattcgccaagcagccaacgctttgtcaccgacagttttccatttcgactgggaaccttgctcggggctcgctcgtgtgagttcaagtgcggcgtcaaggtcgtccagctgaatggcgagctcgaacttgtgatccggatcgttagacacctccatagcgagttctcggagttctaccaaaaggcgaatgaaacggtagtgatcacaagacccagaaaatgcctgtcagtcaatcagagaaaacaataagttctttattggagcagaggtaatcaacacccaccttgagtctccaggaatcgtgccacccggttaagctggtcagcagggacagaaggcaagatgctggctgcggtctccatatctcctcggaggatagccgactggtagtcaatgaccgtgacagaaagattgtaactaaagacattgacatccttgtccgcaaggtagacacggttctgagagggcaaatatccgagcaagtacataggactacaacaccacgtcgagatgataactatttagttttatctctacgaagaggaacgggagagagaaaagcggaacgagaaacgtacgtatcgaaatggttgatagcatgagattggtcgcccaccaagtagctgagcttattgttggaagtggtgtagatgaaacagtctccaacccatttggaagtagaaacactgttttcgaaacaattaaaaaggcgagatccaggatcagccttgtctctcaattatcttctacttttctggccgcacgaacatatccgcgagaacgtacttttcagaaacttcggccacaagctcaaacgcttcctcgacaccctcatccgaaatcggctgttcagactccaaagccgagttgtaggcgtcccggtcgaacttaaggaggtagaacgagtcctctccagtgatggcgaccaacgaaccgttcgacgaccaagagatctgttgattagaggtagaagaggcgcgagtttcagtaaaagtgcgcatcactagagtagaactacaagtacttacgctggtagcatcaacttcgatccgacggacgatcgctccagtctcccaatcccagaaaatcacaaatccgtttcctctagctcccagaagaactccaccgtgaagtccctcgactgcccagccgcttccggacttgaccaacccggtgcgctccttgaaatttttgtatactcggacccgggactttccctcgagtacggcgtatgtgtttgagtcaagagcccaagcaaacgaggttcccgtaccaaacgccttgtttcgccaggcgagcgaggtgtagacaatatactctccatctccgcacacagttacgaacctattctcagtacacaatgcgaagtcttgagtaactgggcgacggaaactcattcaggccagacagaagatcaacacataccggccgttgggactgtgctgcagacttgtcggataaacttcagtgtttccgagctctttcatcgatagcggcaacttctgtccatcctcagggttttcaatcgtttgtaaggatgccgttaagacttcagtgttgcgagcgtagacaatctttcctgaggtatccatcgagatggaaggctcctcgcgtccaagctattcaatgaacatacattggaacatcaaagggatacgtttagtctaccatttagctctatagacaaaagagaaatgcgcgagatagtcataccttgataacgacagctccctcgtcgtatccgaatgcgacctcgttcccgaccttcttgtaagcggtacaccacgccctctcgagtccatagctcagcgtgttttccagacggtacgtagatgaattccaaagcttgatcgttccatcctcggatccagagataattatcgggagcgaagggtggaagatggcaaatgaaacgttggcagaatgcgactcgagtgtttgaatgcaagattttgagtggtagtcccagattttgatgagtctgattgattgagaaaaaccaggacgagggaatcagtgttcagattatcttgagtgacgaaacaaaagggaagggtaccaaccgatcgtcaccacaagtaatcagatagggcttgtctcctccatggtagtactcaacgtaattcactcccttctcgtgcgcctcaagcgagaaattcgctgtcgggttaccgagagaccaaaccttgacggtgtgatccaaacaagcagaggcgaaagtattagaatccttagggttgacggcaagagccatgatgtagtgggtgtggccttcaaaaacctatgaagatggaaggcaagaagaaaagaaaggacatgagtatcgagaagattcagctctcactgtgtcatgacccggatggcagcatgaagcaacactgacttggacacatttccatcccttctcccagtcccaacacttgatagtcatatcatcacttccagttagaactaagctgagcgttgggtgaacgacaaggcatcggatgtagtccggatgggcctcgaatgccgcgatcttctcatacgtgttgtagttgaagattcgaagttggaaatcgtccgatcctatatttcatcaacgaatttgaacatatgcatttcgttcggtcagttgacttgtaatgctactctagacgagacttagcctgcggcttgaccagcccgacagacagaggcttcaccatctctgtagatggaaaacatgatgtagatatgaaacgtaccggcaacgaaccagttcttcctggcaatgtacctgacacatcgaacagggacgtcggtaacctcgaatgttttaactaatgcaccggtcacgtagttccagatgttgaccgatccgttgtagagtccactgtaggccaaagacaaagtgacccgagagaaatgtaatgtcaacaactcatacgcggatggcactggaagccagatgtttcggatagttcacaacagtttggaccgccattgagaagacagctagtcacttcttctcaacgggtacgccgagacatgctaatggattttctgggcttgaacgaaagaggaaaggtccaagagaaactcacgcgatgacatgaggctccgtcggatgaaagtctactgatttcactcggtccgaacgggcataatgaatccgctatatacagcatgcgaaagatgaaaagttcggatttaatacacccagacagacaggtataagagcagaagattagatatgagcccaagacgaaggacaaacaaccaaggtggaacaaggtttgtgattatatgactttagacgaagcacagacttacgttaacatctaacaacatgggctaatcaacaccaaaagaacgagatagcgttagttgacaaactttgccataccagagacccagacttgaagcttaccatgcttttgtagacagaattcgaaagagagagaagagaaagagaaagaaaaagcgaggataggtgaggtgagagcagagcgaaacaacgagatggaacatggaaggcgtaaaacccgacggtgggagatcttggttacggcgcgtgatgttggctacgcgaaaatgtaaccaaaggcgcttggccaactagaaatttctctaatatatttcactctgttttctagttaagaacaatagtttttcattatttgaaatccatccaatccgctccggaggaaaaggagggactccatctctgataccttctcaatccatcccatcccatccatctatctgttgctgtttctttctctccattaaaccgagaaagctcactaaacagtacgtacacatgcattcatcgtgtaacataggagcaacatgctcagatcacccacttgctccggtttcaacacctgttcatccttacccaaatagtgtcgggctcttccgctacccccatcaagtaccgacagtacgtctttgttttcttgccttttcctttcatgcctcggccgtcagttatgacccaaccctaggctggccgtagctgatatgtatcgcctgattacgttcttccgacatgcttagggatatgcccccgcctgaagggttcgggtccatcaaatacaaacgatctctaccttacaagggccccagtggaatcgccatcttcggaggcctcggcctgctcatgggtgttggatggtaccgactcatcggtggattgagggagcgcaagtcagtgttctctcttggcctttctttccttgtttcctcttcatgtgtctatcgctgcctatcgatcggtattgaagatagaaatagcatgttgatcgtgtctttgtatctcctcttcatcgcctcattctatcttgaccacctcgatccgaacgtgaattccatattgcctgtgtattactacgaatgacgtccgacagagagctgcatcgagaaaacatgcagtctagaatcaacttgcttcccttccttttagccgagatggatcgagacatgtatcgacgacagcaagcctctctggcgagagagagaattatcatgaaggacgtcaaaggatgggaggtcagtctcatttcttttccttcataaccaccttctatccctattgttctgatccattttcttgtttgtctggttttggcctgttctgtctacttcgataggtgggtaagtcgccgtaccacaccacccgatacgttcctcccaaggttttgatctaaaaggatcaaggcaaagtgtaaacgtcggacaacccgatctgtacttgaattgtatcacccttctatcttgttttagttctagttctctttagttgttgccatttcctctcttgcctccttatatcagtcttcgaccattttgttctataaacaaaagggtgaattggtatcgatagatccatttatggaccgagctgatgtatgcaaagcgagaaaaagaaaaaaaaaagaactgagagcagatgagaacaagctacgacacgaataagcgtcatttgaacagaagaaagtaatcgtaaagcagggctaagcttggcctatcaaggaccgcttaacgcatccagtgagagagaaaggagaagaaacgacacaagggaatggagaagggaacaaaacacgccgtctaattggaaagaagatcttgaagctccctctgcattcgctgcatctcagcctctgcttcgtcgtcttctttctcggctgccaccttgttggtctgtttgacgcagaggtgcaattgaatatgcaattatgagacagcaagaagcaatcagtcaatctcatcgcttgaaaacccatattgggactctcatctccgaatgaaaaaggcataccggtagacctgtgccgacctgcttcccagcaagcgtatccaatccggtcagatcgtacaacaccttgtcgacttcagcatctgcctcttcatccagctcttcttggtcctcatccaaagactccagcgtatcgtccatcatttcttccatgatacccgcctggtcacatgtattatgtatccaaccattcacaaagaaatgcaaagacataaggtcaatcagatgttcgtgatgatttcaagcaagaacagagtagtggcggaacgaaacagaaaaacgaaccttggtcatctccatactcatctggcgcattgctgcactgagctccggcagtttcaccaactgattcgtgagcttcataatctctgtcgacttctggagcgagccagtgactttcagcatcgctgcatgcacacacatatggccagatcgaggataatccaatttcaatcatcagctttactcgggatagttagtatatgtttccttccagatcttaatgcatatatacggaccagattgatgagtcaactgcatcccaacactttttagcctcgccttggatgtatgtagtctatcgacctgcttattgctacggacgacttccctggcgagaacccgagcattctttaggtctcccttggtagccaatcgtttgacatcggcccgcactttctgctggccaactgttagctagagatcccgaatccaatgttgaattcgcagccatatcatccgattgaaccgtgagcccatcagggttagaagaaagacgacatgataagatcagctctaaacatctacccatgcatggaaggtgtaacgatgaaaaacccacctctctaatctctttatcaagctgtctttgctctctcgcaacctttcgctgccactcttggagttgctcagcagggggtttaccgtataggaagtcgcgaaccgatttcctgtatattgaaacacgggatataggaacagtagaaacacgatcagccaaattcagaccacatcctgatacggttgtctctctttctctcaagagaaaaagaagaaagagctcagatgaagctcacatttgtcatggaaggcttgccaacagtgattaacgtagatgcacagtatcgaccagaggtacgagtggatggaagggatggaaagtgatagctgaatctcagtggaaggctgatgggggttgctcgaaagctcggtcaactgcgctcacgtgaattgaaccggacggaaccagaccggttccctcgccggttcgacggtcgacgcgcacgcatccgcccggcgcttcacgaactcaacgttcacactcatcgaacaatacctagacacccactcatccacccaccatcgacacctcgctaacatcgtctgtgtatactggtagacagacaaaaaactgcctgcatcagaaagatgacttccaagccttctctttcctcaaccactccggcgatcggatcccaggcaatttactatcctcccccaccatcaaaccttccggtgaccccttccacatgcttagatatctctctcttcaaacgtgagtccatctacaatctagtctgatagtatagtgaattagaaatcgaacagatgattgcattttggtctttattttcgactgggggttttctcagaggttataaaggagtggaggaaagcagacgattcgatcatcagtaggtctcgtgcgcgtttaaatcaggcaagggtgatgtataacacctactgacttcgcttcatgttgcacctttatgtttaccagtcagactaaaccgatcatcagcccgatccagggatgagtcaagatcctcctcctcatcttcgggtttatctagcgatgctggatgcgctgctgcttttgcagacatggtctgtaagtgtgccggtgtacgacaagtcgattcgctatacgctgatcgatcgttcgatcgcttgaacctttgtatataaggaccatgcggtactgaccaaactcatttaatttccttatagccacctggtccaaccgagccactatcttagactactgtacttcagtagtcgacaagttggcttcatctccggcctctgctacaacgacaattcctatctctcctccttcaggtagctctccagtctttatctcagaaggacatccagcagatgcaagtagctggagatgggccgaagcgggtgttgggcgaagtcctggaaccagggatgttggaaggtcggatggggaagttctggttagttcattcttgcgccctttgtgtagggaacatattgtctatttctaatgctgttgttcttcattctgttcggatatcttaaaaaacaataattgtcatggcggcagcaacgacgatatgcgaccgagaggtctgttgaggctatcgtccgagaacgatctctgaatggtaagtgtttacttctatctaaacttgcttcttacagacttcagattatgactgggaaaatggacccttggattcttctctaaatagcttttaaatctcgctgtccattctttgagccaccggcgagcgagctgaggaaggtgtacggttaatgatgtccttgcagtgtcttcatacaatctagttattgttctggccaaggttcgatgctttgatgaataaatagcaacatcgaaatgaatagatctcggctgtgaatgttttagaattaaaacttcgacgttcagatgatatcttgatggttgctgtgttgagatgtgccatgtgccatatgccgaacgcgtcataccgggtatccgacggcggccaaggctgtacacggccttggcaggcggtgcccgtgagttaaagaaaagccgtcgttcaccatcttagtcgtttgagcaaaccatcattccacccgactcactcttgtccatctattctcgtggatctatcatgtcatacaactacaataataaccagcagcaatcacagtatcccccctatcaaggtgctcctcctcagccttatgggcaacctcccaacgcgtacggacaacctcctaacgcgtatggacaatctggctttaacaaccaatccacctacgatcagaaaccatcttataatcaaccgcccccacccggtgctccagtgaactaccctactcctcagcagaatcagtacaaccaatatggatctggtggagggtacaacaaccctcctccgcaacacagctacgggggattcaattcggctccgcctcaaccgtatggcgctcctccccctcagggccaaccgctctataatgctcctccccctggacctcctatgcaaaactataccgctcagcccgcttatggaggcgtacctagtgccggaagcgcaagctttttttaccttggaacacccatccttccggtcgaaggcacaacattaggcagtatccctcctcctcctggaaattacaatgcccagtttgacgccgagcgaatcagaaaggctaccaaagggtttggtacggacgagtctgcattagttgacacgatggctccgctcggaggccttgagatgggtgcactctctagagctttcgaggcgagcgtgggccgatcgctcgtcaagacattagaaaaggagacgagaagttggttcttgtacggtttgagaggtctcgctctggggcctttggagtttgactgctggcttctggacagggcatgctcaggaataggaacccatgaagagtgcgtgagatgtttaatccaggtttgcttctatcgttcaatttaaagacgcgtttctaacgcaatgccttccctccctaaactgtttaggctgctgagtgagatcctactcggaaggtcaaacaacgagatctatcttctcaagtcggcgtacaaggcaatctacaacaaggatcttgtcgccgttgtcaagggagaattaagtatgaagaccgagagaatgttcatgtacgtatcatccatcgtgttcaatcctgatctatctggctgatatagcgcctttctgaatcacgaactacaaatcacagcatggctctaatggtatgacccatcagcaacgaacacttacaagccattctgtcacgataactaatcgatatgtcatcatgaaatcttatattagggcaatcgagacgagactggcttcgtcaatcaagcaggtatccagcaggatgttgagactttctacagagccggagaaggaaagtggggaaccgatgaggtaagccattcttatgtaattagaacttcgtctgtttcttgaacactcaatatctttgttatacgcccctttcgatagattgccattctatctatccttgtgaaccgttcgaacgcccacctggctgctatgtctcaagcatactttcaacgaaactcccggcctctttccgctgctgtctctagagagttctctgggcatatgaaagatggtctattgtttattaccagaggagctgagcaggacggagacggtgtcgctcgagacgcggagatgttggaggaagcaatgcgtggtatgggcactaaagacgaaagagtcagtgttgcgtctgttctttcacctcctggagagatggttgtaacgttgctaatctctcctgcgctgtgctgttaacagctgatttaccgaatcgtccgactacactggaaccgtcagcgatttgagaacgtcaagcgggcctacgaggccaagtacggaaagtcgctaagaaaccgggttcaaggcgagacgagtggtgactgcagagttcgtctttctacccaactctctcttctttgatcatgcacactcttctaaacacggaaagctaacttccaccttatcgatgctacttggtcgtgtttctttagaaactgatgctcgcaataatccaataatcgaactcctattactttttctttcttttctccatgctcattgcgtttatacttccttaccatcttcatatttctcttgttgagtacttgcagtagcatctccttaatcaacaacactcggcccaagcttacatttctttctcctgatatatgctgctctcaagccatgtcgaacgttgttcttattcttgtatgtctgtgactagtgcaaggctgacatgaatgcttacataagccatcgagatatatcgccactcctaaacgtttccgttattgttctgtccatcacacacacacacctacacacacccaaacacatatacctagactcgctttctttatagaacgacttagaagagtcagcgttagatcatatatggccaaaaattcaagatcatcgagaggcgcagatactccagggtcaggaccaggttccagaggaggccgaggaggtagaggaggtcggggcggagggggggatggtttgggctcaagaggtggaggtagaggtcgaggtcgaggtggtggagcgtacactaatatgactacagttggtttggactatgaaactctcgatagccgaccaggtacgtttctgatggtcttttgttcaggttgacaaaaccccaatgtacgattgtttcttgatgtacccgtcagcttatctagcgttcaaccggtgctcctgtccttctctgtcaattagctccgacagaaatgccgcctacatttatcccccaacatgtcggaccatcatcaaacttttcgccatctacacctcaccgaggtgctttccgaggtcgtgttggtggcgatgataggaatggcttcagaggcggctcacgaggaggctccaggggcggcttccgaggaggccgaggaggatcggtccctatgcctttcttcatcaacggatcccgagggaggagtaagggaggtaatacaccgactgctagttataggcgatctcaagaggaggaagacgaagcgtactattctagtcagcgaaacgggtctggatctgcctctgggacggccactcctcattatggaatcggagccggaaaaggaagcaagtccagtagaggcggattcaccggatatggaagttcacataatccgcttttgaagcctgtagtgttcgtcaaggctggcactctgttccaagaaggaaaagtggacgtgctcgtacaggacgaggtccaaggtcaaggtcagtgtctctctagacttcttatctgtatttctgtgacaagtcgagctctgatcctctaaccaaatgaattaaaactcattcagacgagccttcgacacatatagagacgttcgcgctgaacgatgccgctgtccctcaaatgatcgattctcgacataaagtcgaagtacaaattcttcctaatgcctcagttgctcaggatgtttccgcacccacctttgttcttccgtctgcagagcctactactaagaccttatcttttccttctgaggcatctccctcgtccatcgtatccaaccctgccatgtccatcttgagccaggtggaacgcgccctttgctcgatggtggtaggtgattctgataatcctcaactttcagatagtgcctctcaccagccttcgatatcccctgcttctcatacacatcaagttgattttgatagcgaatctgatgctgagctagttgaggatagtctagaggtggaggtgaacgaggtagatgaggaagatgaagtggaggaagaacagaaggaggaggaagatgatcctacgtctcctggcttctacgtagacaccactccttatgcttccgccacgaccgaccaggatgaaccgtccaatgaaccactcggtatctacgttgattctaaaccgtcagtttccatgccttctagtacggagggcgaagatcttgggttcttcatcgactctgctccttctaccgaggttcggactgaggaatccgcttcgattcgaactggtttgcctcttgtgcaattcgcagcattaggttcctctagctcgtccaaccccaaagctgatcgatctagctgggctcctacagtacctaaatcccttcgaggaaacgtgcgaatcattgatgaatcaacttcatttgcctcccctaaacccgcctctcctctcactttcaacatgttctctccatcgttcactgcagtttcctcaccctcaggaaattctaagtttgacaagcgtcagcctaagactcggcgagggaagaaagctcagaaggcgtctagaaggaataggaggaaccgccgttccgatgaatacgaacctcctattcctagagagggtgactctgatatcgagtggggatcggatggtcctcctcccccaaagcctggtaaaccatggggtgtcagaggaggaagcgccaaggctgctcttgaggcagagatcttggcagattacatctccaataccgtgggcagcgatggagaacaggacgaagaggctatgcatcagttcctcaaggggacaggcccaatggaacaggtttccgttggggatattgctctagagaagttgatgagggatgaggatgtggaagaagaaacaggcggagcgcaggggtcttctgtcatgggaagtgagagcgaggatgaaagcgagaattctgaaggaggaagcggttgggcgaccgacgaccaagatcctgaagattcagttggggacgaagaagaggaagacagagagctgaatgctatggaggaggaaatgatggcagaagacgattccgatttgttctccgaagacgaggaggatgagaacgattcggatatcatcgatgatgtcgatcttgaatcgttggatgacgagcaagaatcggatcaagagttcttggatgctcttctaaatgagagctccgaagactcggattcagattcggacgatgaggatctcgctgctgcaattcttcgatcccaagcagcccgatcgaagtcgctgcctcctaaaatagaacctgagaagccaaacttcactgtcaacgcgaagggtaaagatgatgataaagagaaggaaaagactacaatgatcgaatctggatctgaagatagtgacgggacgcatgggaaggcgatgttccaaggcaacttttcgtgggtcgaccaggatgaacaatttatccaagtgagtttgtttcttttgatttcgtgcactggttgcctagatcgaactatcattgatgttgaactcacttgcattcgtatcgacaggatttattggacgataaccttgaaatcatgaagggatccaaccgtaaggctcggaagcagctcttcaaagctatacagaacggaaacttcgatgaattggacgactttgatgataacccggtcataggtaagtctatactttcatcaaagctatatccatcataagctggtccactcattttcttatggtatattgtccacgggggattctgtctcaaagctatgcctgtcaccagaaagaacaagcacgttcctgcaaatcttcaggcgcaatgggacaaagatagaaagaagaaggccgatgccaagctcgctcgtgcagaggctcgtttggctcaacaattggatccctactcttcctcttctaagaagtcgcgcaacaagaacaagaagaataagggcaaacaggtctcttactcggctgatggcttcgactcggacgccgactcattctcggttgacacgccctcgagaggtggaaagaacaatcgatcgggcatcaccaatctaatctctctcgaccaagagattcaaaggttcttgaacgatcttggaaagacgactatgagcttaccgccaatggagaaagctagtcgagcccgagttcatcaattggccgagtgctattctcttaagagctcaagtaaaggcaacggtcgaggaagattcacgtaagtcctcatcacgataatttcacctaccttgatacaatgtatttcagtttttgactgattcgtttctttctgattttcatatatcgcgctttctgcagaacgcttgtcaagacttctcgatcaggtctgaatgtcaagtatggaaaaattggtcatatactgaaggttgattcttctttctaccaagcttcctggggtcccaagtccgggtctggaaagtacaccatgcctggaggtagccttaccagtggccaagccacagtcaaaagaagagaaggagaagttgtcggagagggtgccaagagtcttggagaagataatctgggtcacaaactattgtacgttactttctaattcaactatttctgagcgacgcttttgcggtcagtggttcatcgatgacccattttttttaaataggagcaagatgggatggactcaaggaacattgatcggcaagggcgatggaggtctgaacgctccgttagttgacttcaaacaaatcagagtcataccggttctgaatcacgctgatccttgttcatcctttaatatcaaccagcatcatggctgtggttaagaatacgaaatctggattgggacacaattaggtaccaaacgcattggcatctcgcatcctcacattctcacctgttttctttccctgagcttttcttgtatttcttctgaccctaccttagaaaatgtgtaagcttgacgtagaagaacgacaaacacgatctggttgaacaccaaagtttcgattcagatatgcatggtattatattgtctatgtacattaagttgacacaagtcgaagaaaaaaggagaacaggagaagaacagcctcgagtcttagggatatcatttgatatcaaagaacagtcttggaagatgaagataataccaaacatgtttgaatgagcgtaggcgatcagccaatgacatttctgtgcaaaagatggctacttcaaaccaagttgatatccctcaactcgccaaacactcgttgccctaacgccaatgctcctcgtcgaggagtcggcgcgcatccctttccaggactatcgaagttgatgagctgcatctctcgcagaggttccgcaacggtcgacttggcggtatctgaatcagcgtctggaagagctgaagtaacgacagacggtgtggaaatgagatgttggttcttggtgacttcataatccactagacctaatatcgcctcagtctctctgtccgaatcgatgatcaatagagaggacgaggtcattcgaatttcgtcctcatcaccagatgtatgcacacaagacggcgcggacttagaatctgtgtcgaccaaggagccacaatccggatatcgagctgcaggactagggctgaatggaaccaaagtagtgttcgctgaggaaagtgttccatgattgatttgcggtgcgaccgaagccggatctgattcaggtagagttgaatggggaggtgatggcgggagaggcaccatctgcgccgaaatctgtggttttatagcagaagacgttgctttttccaaagcctggacaggagaagagggaagagggaccgattcaggtctcaccaacgttgcggaggtggatcttgaaggaacaaccgtcttcttcgtaggtttgaagctaggtagtgcgggtttgagtctgactctctcctttctcggctgagccggaacggctggcgcagacgaaggagcaccaactatcttcttgatcactctgggtcggaccgtcgctatggtggaaccaactgaggatacagtattaggtttagagactggtgctcgcgcagatgagctcacagttggggctgtcgctgatggtcctttcgaaactgaagttgatctaacggacctagctgaagcagtcgaagaggctgatactgatcttgtggatgaagcggcagacacagatctagccgatgaagtcgccgacgttgatctggaagtcggggtaggagcggatagtgtcggaggaattcctttggttaatgtaggaagaggaggtttgacagctacgcgccgagtggatatggtggaagcttcagaagacgtagtagctgtcgatttgcttgctctcgacatagtggccgaagcaggagcaacagggtgacgagaaatcggtttgaacgctttagatgcagggacagagagctgaactcgaggtgctgatggtttggccgtcttagcggggtcggaaggtttatttgctttgacgggtgctttggccttagtcgaagcggcgatggaagtagtagtggagctagagatggtagtgacattagctac

SEQ ID NO: 2750 - DNA, 46978 bp, Xanthophyllomyces dendrorhous
ggagaagtcacaacagctggggcttgatccgcaggttgaatcagaggctcggaaactgcatcaatagtcggaagtgatggttgttccgtcttctcctcgggcgttgcttttgaaggagaagctacgttggatatcaaagtcaacaagttttcgaccctgggctttgctgtttcgaccgtctcctcagagatatctttgaaagattgaggtaattcagtagtcgtttcctccaccgccactaccatctcatcgttcttcacctggacattctctttatttcctttctcggtagagaccaaattgtccagatcgctaatcaaacgaagctcctccggtaccatatcgttccacatactttccaatccaggggatgtttgtgcaggcgccacctcctcactatccagcagccccaaaagatctcccacacgaactggttcttcgaccgttgagctagcttccggttttagatcactcgagatcgcatgttccacctgttctgtaggcaagtcaatcgcaatcagaagagttgggctctgttcctctttttgcaaggaaacgtgcgtcaccgttggtgaaggtggtaatgggattgcatgagctgctgttggtggatgagaacgaggcggagaagcaggaagagggatggcggcagcggcagcggcagcggttgccgccaaccctatcggctcatctagcgttcttccggtcgaccggccgagcgtgacgagtcctcttcttaccccagttgagatcaaaggtggagcacctggtggacgaacaggtctggacggagggcccaggttagaacctgcggagatagaagatgtgaacgaccgaagagttggagtaagacctgatccatgagatgaaagcgagccagaaatcgttcgaagatgcaagggcgcaggtcgagagacggccgttcgagtcgcaggaacgttgttgggggcgacagaggagaaataagaactggaggatgcggcggacgaaacagggtgggtagatgtatgcgcagatgagtatgcaggtgcagaggagatatactgctcctgattgtagtgttcagttcggtaggaggaaagcgatggagagggatggatcgactcgtgttccaagaaaggtctggaggctgcgtgcgaggaatgaacatggtttgataaagaatgagccagatggggatgagaagaactggctggtcgaacagctggcatagagcacgatgaaggaattaagccaggtcgagatgggccaccgtgttgaaaaccttgggaaggatatgactgttgaaattgatgttgttgctgttctgcatatagtggtcctagaggtggttgagcaacatatacctgagacgctgtgggcttcggtttgagcgcggctttgacacgagcagtgcctttgttagaacctgaactcgaacctgaaccaccagcggacggcttgacctctaagcgtttctgggtggtaggtgacaaaggagcggcgaagctatgacatcagggcagtcaatcgtaggagcaagattgaagtcaagtcattagcactttgataaggtaagaaaaggcagtcgaatacacgtacccatctactcttcctggccaaacttcctggtaagccacccacagctccttcgcaacctttctgacgtccacatctttatcagatattaaagctttgataaccttctccacctcttctacttttcctccagcttgccagttctccaccatcagtcgtagccctctcgcgatggctttcctaaatttcgggtttgggtctttgcatgccccagagagataaccaatgagtgcgcctgcatgagggcacgattttaggatgatataaagcgtggcttcggctcgttcacgaatgatgttgttcgttcgacggaccaaatccagtaaaggaggaatatagagccgttggaggtgaaagctgaaccggtcggccaatcgaggagccagcgaggacagcaggtcgagagcatgtttggacaaggcagctcgttcggttagcatctatgttggtaaaaaccaagagattgggaaaacagaacaaacaagacaaccatcgagtcagcttttcttgaacatcaattcgtttagataatgagagatagtgtgaagacttacacaggcaacaattttgtcacccagaccaccttgtgagctaggcccaactgcagccacatagttatccagcttggttgccccccctcgagtcaacgctgccaatctgacggatttcccgtccgaggatagaacgcaggatagtcagcgtttctctcttctgttcgttgctcgataccttgtataaccatagagtgagagaagacgaacgaacctgatgaatgctttcgcaaacttttcccagttatgttctgtctcaggctgagcaaacaagatctgcatatcgttgatgttgtgcgtcaactcggctggagtgttacacttgatatgtttgaaagaaggttcataagcagacgcattcacgattcacatcgcgtagattccatgtggcgcaaggtaatccgatgatttaggaggtggattggcacgagaacaaacggaaagaagagcgaaaaagactcatagtcaagtcagataggatttgtaaagagaatacctcgaatgctgaagcgagtacagaaacagagagatgcagagcagaagcctgaggaaaggaaaaccaggtattgagttgaacttacaggaattctatcatcttcttctttcttaggcttgggagccatatcggtgttgtattctaatcaagatctgttgtttaactctctttctggtgctttgatcgaaaggttgaaggcaatatgaagcgatgaagccttccaggtagaacaaacgtgaagttaagtggagagagaacggacaatggtgtcgaacaacgacggccaatatgctttggacgcgtttgtttttcttttcttctacaatcgcgtcggatcgcttacgtaaaggcgttaatttttgattacataaggcttagcccagtagagtcaaacagtcatcttttttaagggagaaagactacatgggaagatgaattaagaacaaaaaagaaagggaagagagagttgacaagctaaaactactggggaggcctcatctgaggaggaaatccctggggagggaatccagggggaggagcaccagggctagatttgttgaccacagaaatgagaatttgttagctgagttggaccagacaccaggaacgtcacgtataatgcggaaatgagaaaaagaaacgaacaacccagccggaggtcgagcaaatccaggaggaggagcaccggggaaaccaggaggaggaagtcccggcatgccaggcattccagggaaaccaggaggaggtcgagcatagggcattggtcgagctgctaaggagggaggtgggatacctaaaaatatcaaatcagtccaagagaaaggaaacataggtgagttcgaaaattccactgatattttgacatggttcattctcttctgagaagagcgagaagcaacgtaccaccgccaagacccatacctcgaccagcagccaatccttgtccagggcccaaaggaagctacatagaatcgttgaagaagagaccggaaatcagtgacaggcaaacacacaaaagcttagtgcggcagacttaccgtaggagcgtcatcagccaccttgggaggaggtccttcaatagcaatgctgacaacagtctctcctcgaagaataaccaagccaagcgtgcgcttctgctcctgagccggagcagggacagctgaagttccatccgcggcagcttttgactttcgggactatcaataagagaaatgaaagaaaatacgggaaaagatagaacgtagcacgggttagattgttcgttcgacgaaaatgcatggctgcttcatgttgatgatttagacgagattgggagctatcctatatcaggatggcttacgccaatccatccacggcatttccatccatgccttcctacctttccaacctttccgcatgcttcccttcacagttgtttgcgtgagctcccaatcatgcctatcctttccttcgcttcagccttctcgccctcaatgccatccgatcaaccctttcaacgtatcgtattcagaagggagtgcaaacacaccttgatttttcggaactcctcacactcggagagcaccaaattcatgtgcttatcgaaagcaagcatctgtccgatcagacttcgaccgtcgttactgatgatcgccaagggataccgtagacaaacgaggcaagaaaatagtcgagacaagtgatgccgttgagagaaaaaatacaagaggtcgagcgatattgatcgagttggggcatcgaagattggtgggatggaaagagtgtgagcggatatatggtattcagacgacagtgatatatgcagaatcacaagggcgggttgttgccgataggcaaagaaagaagagagaaacagtgagcatgaaatgaaccgtggttatcgatcgtctgtttgtatcctcatcgtgtggtgtagtattaaaaagcattgaaagagaaccaaaaccacgaacagagtgaccttaagccggtagttgatgagggacatcatcttccctccctttgcctttgtgtttccgactgacgaatggatagagaagggatacgtgtcggtggaggacgcgatgaacgcggaaggaaaagagcacaggcagattgagaatcagacaacatgtaagtcagtacaacgaatatctggagaacagttgagatctgttctaaacagaaatagtagaggcaggagcaagaaactgaagacagctgcaagaaaagtagaaaggaaagagagaaggacaagaatgaagaggttgagagatgaaaacgcactagcctgaagccaatgcaattcgtttggcagatcattcaatccagagggatatccaatagtcatcaacaaaaaacgtgtaagattaactcatactttcaaactcatactcaagacaaggagaaacgtaccatgattgaaataaagggggccgagcaagttgagtggaaggcgtttgaaggtgatggagacgatcaagacaagaaagatcaaggaaggaaaaaaagagtgtgtgcctgaaatggttacaaggcttcgttacagatatcacgtgatcttgacgcgtctgttgtacacatcgctcgacgcgtcgtaaacacgaccaaggttgatttttccaggttttctcataaacacaatcccatcctcaatcagtcaaccagtccaggatctctcttcgctcgcagcgcaacgtccttgctctgcgctcttttcattgagggggaatatagattgatcacatatttttcgctttaccggatgagtcgacctaggaaagctcggatggttcaggactcggactcttccgactcggaccacacaactccttctttaactgctcctaccaaatcctcctccagatcaagagcatcccttacaggaccatcggcccccaaggtcaccttcatcaattcagcttccgcttctcctgctggaattaatgacgattcactcgagaaagcacaaaggaggaaacggctctcgatgggcactcccctacaccatatccaatccaaggaagaaggtacatcgagccaaaccgcccttatgcataacacggcgagcaaaagacgacagagcggaagaagactaagtgctatcgtcgctggcgttaatgctgagggggctgcagtcgagtctcacaatggagtaatatctaagccggtagagagcatggaggagatgagtctcaagtttgaggagtggatgaagatggctacggacaacgtgagtctagatctcacaaactttatccattgcaagctgtcttctgtagatgatatcagatatatcaaacattccttcttctgatatcgtgtgtttcctacccattccatacttcggaaaaattcagaaaatcactgtcaacaatacttggaactttgcattgatcgactactttgccgacctgacactccttcggaatggaccagacgaccaatctatcaactttcaaaaagcatcttctacactggacggatgtgtcaaaatttggacgagtcgagttgattcggctttcacagagaccggaaaattactcagcggtctaagcgagacgggagctggagaaggagaaggaggggaagatggtgaagaaggaagtgagggcgaagaaggagaggatggtattgttagaaagaaaagaaaagtatgcgtatctatctctgttatctgaaaaatcctctctcgattcaggtaacagaattaacctctcttcctttgatttttgcagacccactccaaaaattctaccctagcgccttccttccattcactatctaacaagaaacttgatctcgagttctttgttgatccgttgtttaaaaagacttcggctgatttcgacgaaggaggtgcagctggtttgctgatgaaccaccttggatctgctggagggatgcggttaattttcgatgcaggtgatgttgtgctggaggaggagggagacgtagatcttcgagaagaggaagaagaagaagaagaatcgaagagaagacttgccaaaacgaccggaagtggaaaggttgatatccaggctttgagaagtatgtatttggtgtttttcttctgcatccatgcctcctcactctacgcctctaggaatgtagtattgattcattggatcggaatttatcaatctatgaagtaaaattcccagaattgtctcaacatccatctcctattgctccactacagatcacatccgctttgagtggcttcgtcttttcgtcttcgtcctcgaatatgctatccttcgacatagctagtcttaacgccgctgtagcttctgcttcatccgctgctaccgccgccagcggagtctcttatgatgacattgagaatccagacgaaccgggttcaaacgcccaacatgacttcttcgactttgacgacgatcataacggtggcgggggaggtgcaggaggggatgattttggtggcggccagggagatggttatgatgaagacggcgctgtcgatgaggacggaaatccggtgggcgcttctggaggtagctcgggaggaggatttggattcgagccatttgatccgagaagacagccaaatgagaaagacttggtgatggccatggttggtggagaaggtagagaggatagcgctggacaaggcgaggagatgtttgattacttcgatagacagctcttggcaagaaattgggcaggaccggaacactggaagacgagaagaacggtggcattcggaaagaaaggtcggtctgccggtgtctccttgggttcctcattggaagttctgaagaataatgtatctgatcgtctctgtgatccactgatttcattcatcactggcagacgccgtttccgagaacccatcatcaactctggtgaagacgtctcgaaaacctcctccgacgatcgacttcttatcctctgaaccactcatactagcatccaaacttttcgagctcccgagttccaagacgtccatccttctacctgcttcttcgtctaggcgcttggcgagttcttcttccaaatcagagaagaagccttcgaatgcagcggccaagaaaaaagctaaggatgataaagagagggaaaaggaggtcaagaagtacctcttaccagatgacttacatttctcatcaagtcaattgctcagattattcacgaagaaacttttcacagtatgttcgacattggcttcctacacaattcttatacatataaatactgattccgtctgctgaattctttgattcagttgagaatgaggagacagggaggacacgcttatacaggagataatccgcctagtatgttgaccccttcacagcccatcatatttcatgcgactctgatggcacttcgatattcaattgttgacaaccgtttctttacattccatcttagtattccgaggcgatggagaggttgatgagcaattctgggctcaggcagcttctaatcaagctgatatccgaaatgacatttacgaagatgatggctttggttgtgagctcaaactatccttctcagtgtcttgtgccattgtgtcatcctaactccaatttgtcattatcttttactggcatcatagctcaagccgatccgcctccgttcgccactcaattctttaatgacgacgattatgacggtcccgtcgggttcgacaaccaagatatgctagatgcagattccgatgctgagccaggcgcatcatcctcgatgattccccccgaagaacaagaagaaaccctttgggcgggaacacaaggcctgaaacgaacgagacctgattacgtcaagttctcgaaacgagccaaacgagtggatgtcaagaagctcaaggattcgatctggaaaggattagatatttttgcgcctcctatcgagggcgaagatgaagatgaagagattgaggtcggtattttttctcgttctttgtatcctttatatttcagcttaatgcgcgacatttaactgaacgtgattttctcgctatcactgccgtgtcgctttctagtccactactcgtccaacaacagcagaagatccaacccaacctcgtgtgttctccaccgtagtgtcttctctccagtcatcttatccgtcatccaaattcagtgatatatcgacctcgtactgcttcatctgtcttcttcatctgtgtaacgagcgaggtctacaacttgaagctgctcgaggcgatgacggccggaatgctagtaacacctcaggaagctcattccccaggatagtaggagaagatgacgacgaggcaaccgatggggaggaagatatgaatggggctggagctaaagcaagtagagatcagttcgatgagacgatcgttggccaacttgggttcctaaagatcttcaaagatcagaatgccaaaggacatgcctaactggagagaaggggaagagtagcgagtatcctagatagacggatggggtaacggtgaataattggccatatctacgtggcttgaaacttttatttgactttcatcagctgtaacttaaactttttcttgttcttttaatcattcccacatcgttcttcatatgaagaatcgcattctgtacgcggtttgatctatcttccgtctttcgacttttttttactccttactaaaatttacatgtacatttcgagtttctttcataatcctatattgggacatctctattcctttgatgatgtctatttttgatcgtccgggtcccatttgaacgtctggggctagatatttcctcgtcacgttcctttttgagctttggtggctaatccctgaggctcctaaacacctctccggtcctcatctaattcgcccgtcctcacactaatctcgattgtctcggacttgtccggtttggggaagaacgcataacaagccccaaacgaactaaccatcatggtcgctcccgtgaataagattaggggggcatagtcgctcaacccataagctcctttggcagaggcgaatcctttttggcccgcagtaagtaatccagtggagatcggagcggatagaatgttacctaaacctcgggtggagacaaagattgcgtagagaatcagtgtctcggttgggtcgaccgagacagcgctgatgaaacgaggccacatcgctgaccagcctgttggatgcgaagcgtcatagcgcacgagcaagaagagaaatacgcagttagcaaatatcaaaaagctggggcgagataagatgatgttttgaaaaatagtgagaacatactgggtccaaggaagccaaagatgatactgaatgtgagaagaggtgcaagagataaagagaatccccacacaaaaaacgcggagagcgatgacccgataccagaaagtaagatgcctaacaccagatgcttatccgagactacaaacgttttcaatagatatagattggtaagtctgctggctgcactacatgaggctgtgaaaagatagacaaggaaggaagaaagtaacacacgccagcctaacaagatagttccaaagcaagcagcggcgttcatcaaagagagacacagcgttccagagtttgttgtcaatccgagatcagacgcgaaggctgttgtaaagatgagataaacacaaaggatagagtcaacaaggatctcagacaggtgtttttttttgtttaaagacgagaaaactgactggggatgtagatggaagggataaagattccgagcccttgcaacgtgttggccgctgagatagcgaataagacgagaatcaatcaaaccccgtattcgatgagacaacatcttgggacaagtatgagatagaacggcaggcttacccgtgaacatccagaatgcagggtttcgaacaaagctccagtttactcttcttgtaccaaccacttgactctttgggtatcgactctttatgaaaggtagaacagggggaatgaaaacggcgaagatgatggcgagaactcgaagagtggtctcatgtccccattttttgagaatccagttcaaaacgagcggcatgaagagacctcctaacccagttccagcttcatagtggtcattggaaaaaaagtatcgcgcgtgagtttctaaatcgaagcaaggctacaaaccaacgtcaagaagagacgaacagaaaataagtccgtttgccattcctctgtggacaacaaaccattcccacacaaaagtggacgccgaaaaatagagggcggctcctccacatgagaagatgacaccttgggttataacgagttgacctggattggtttattgaccacgatcgtatgagtgttttgtactggttacaacttgatcgagaagaggatcgagattaaaagtcttactgggcgtcttagcaaagcttgcagatagcaaaccgatgacacagagtactgtaccaacgtacatgctattctgcttctggttaggccatctagtgaacactggaattaatactaaggatagcagatagatcaatcctgacgagatagatccaattagaggaagaagagcggatttgtcatccggaaaaagagtggatcggtagtctttcgatcatcagaaattttgatggtgatcagcatacctctgactgactaccaaagatattcaagatacatcttgacttacattcaagaaaaactccataactgaacggaggagaccacaccaacagctctacaacaaatgcagccgccaaatacgcatatgcgtcaaatccgccatcctacagaaatatgactccaatccaaggaagtttgttatcgatctttgccttgacccgaaaggcagagtaagacacaaccagataacttacgactggtggcagttctgagatagacacctcctggtttgcgctgtgctgtgagctcaaaccataaggactttcactgcgcctgctactcgaattgttatatctctgagagtcgagactgggtcgtctggattccccatgcagattcgatgtatccgtatacacagccggaatctggtctagctcaaattctggctgttctgaagaccttgaattgttgacaaaacttgaagccatggtttgatggactttcttgatcgcttgtacaatagaagagaaagaaaggaagatagaacgaaacataaattgttccgtttcccttttgcttcttagaggcaattttgttccgataagcgttcgaaattgaccgtcaaatcaagcgccctttttattctatttgcattgacccggagcctactctatgtttcatggccttggccatcaatagaactcgaggaatactctgttatgatgattaaagccgatatctaccaagcatgggtgttcggagttgtccatcgatcgcctgcctactgagtcgtatgctttctccgtccacactgtccgaatgatcttttaccggccttatgcggtaatgtcttgcacagccttgttcaactgccacactcactcacaccttccccatacaagtttcatctccacacacacacacacacacttactcttcttcccttcatctcattttccatctgtttcgaccctcaaaccatggacttcttggaactacttatcctcatagtcctcgcgcccttattagcgtacgtattgctccattggcgtgtttgtttctcgctttttgttttccaaatcacccgtcacgcccttcgctattagagttctaaccagctcggttcctttgatccgctcgatctgaatgcgctttcgttaattgatgtgtgagaccatatgtagtctggtgctcgtcaccctgagagcaatctttgtcatgcctcttgtgggtgctctcgttcggttcagggcaaactacacccctcgaggagtgggcctagatgaagaagacgccaggtttgtctacagcgccttactgtcatttatcgctggcccgcaggctcaacccttgtgtgcgggtctacgtagatgtcttactctttgattcgattttgtgttcttatttgaaaacagagtcggacctgtagtcaattctctttgggcgatgatgattcgagtaaagaatttagagggttgggacggcatgtacaaaggtaggttgttccacgttaagctcccaaacaacctccctcttccgaaaccttacatatttaccactgcggtctatcgtttcgaaaacaggcgttatcccttatacttgtctccataccctcaccacctctcttgtattcatctttctgggcgccacagtctcgattcttccctcgggtacgcttgccgtgcccgatccatctggcatccaaatgggctttgtcactgttttcttggcactcattaccgttccaggaactatcttgatcaaccggtatgtgatcattttcttggtcgttttgcgttacagtttcctcgtatttaacgtccgacaagtttcacagagcaatcacaacaccatatcagcttccatatcgagagaagagatcacttcagcagtcgcttcagctcctcctcacgccgtatgaatatagaaaaccttggatcctttggcttacgcctgggttgcttgcaatcacagcgatctacgtcgggtggacggtcctcctcatgagaattatgcgaaacgccatcgttggcgaagcgtggagtaacgcgaacagaggcgcgtctgacgaacaggacgaacagctgtttgcgaacgtgagcacattcaggctaattgtattcttcttggtacgtcatcttctgcctctcttgctttatttaacaacaatacttggtgaggtttgagagtgtgcagttaagcttctctggttctgttcggtgttacccgatttgaattcgtccttcagttccaaggcctttcagccatcatcctcacacctcttgaggtaatgacgactcggctatctctgcaacgaaatcgagatccgtctgatccttcggccaccgaagaaatctcaggtgaagtcccgttcattgctgaaggagaagatgtggtcggttacagggatgctggagaggcaccttatgttggcatgatcgtacgtaaatctcactctgattctttctccaagagagtctcatctgatgatcatcgaactgtctctgtttctgtccttgttgctgttggcatgcaggactgcactagaaagatgctagaagaggaaggctggggagcgttcatgagaggttggtggattactctgggaacaaacttgatcagaggtttcccttgaagaaagcgtattcaatgaatcttgagatcgaaagtgaagactttcgagagacgataggagggacgtggaaagagagtcatcttcttacatgatttatcagcagcaagtcagccgctctattcaagttcatgttgagggtaggcatcactatatacaagcatcattgttttaaagagatcaaactagagatttcatcgaccagcggcaagagcggcttcacgaagcatgacttcttgatctagcttgatcaggacgacacttcgttgaggaaatccatccgtagggacggaatgagcagtcacctttgcaggctttaggatatgtacacacgcacaaaagaaatacatcgatgtcaatttctattttatttgaagaagcgaagcagaggaagaaacgaacgaaatccagtccatcaaggacaccttctacgatacccgccgtgaaggcctcgcaagatagtgtcgacatatctttaggaatggagatatgctgggttaaaggagggacgttcatcgaaatttgatctttggaatcgaagatgaatccaagtaatataaattgtttgccaatgagtaatgaattcgaagattgtttcgtggttttctatacagagcgtaaaaacgccttacattcgtcgtctcctccaaaagatttctccagtccatcagcaggtttaccaaaagcagctttgtatacttgactgtgaatgaattgaagggtaggaatcaacctggcttcccgtttcggatcctgtgcaaagcgcatatattcagtatttgatcgatagaacaaaacgcgacgacagggatagattcgtgggttacgctcagtcagctacttctttaacgtactttcagtgagcttgtgtttgagaagagatttcttaacagaagcagtgagagaattcttgttccaacgtgatgtcctagggacgacaaactgtttaatgacgaggcatcgaaggttctgttcaatatgcgacgcgcttacccggagtagaaggattggacatgagataacgtaccgcgactcgagttctgctatgctatctactcttgattggcagtatgagattatctctgatataagaaatgagatggccgagagagagatttctgagcgaagcgatttgttataccttaatcaatacagaaatgcgcaagagatcagcttgtttcaacagagtgcatttcagatctttcgacagctaaatttagacaaggcctgatatccgaattctgacttacggtctttccaaaatgttaccagcttgagacactctcttagatgcattcagagcagagggcgtgctcactccgctggactgatttgttatcgggagcgagaatctggatgatggagacgaatagacactgttaggcggtggtgtaggtgattgacctgctaaatcataggagaaaatacagaaacagtcagctcgaggacaaaagacgcgcagatatagcacatcctgtcaagtcgaaccaaccaattgaaagagcagagagacgggaggccatagtgaggtctaaactgatggtcgatgtggatgatatgatgaaggagggtgagaagcgatggtaaggtgatcgtttcgcttacataagcaatattcgtattttttgcctcttctgtccttttctttttttcttttcgtgcctttctcctcaacatccatcactctatccatcatgtctactgactttgtccttcccgagatcatcgacaacgccgatggatcatggggtccttctggatcccatctctctactggattcaaagagttagtagagtttttcttagccattcatcatacatctgctcgcgcctgcagagtttctcttttcctctttccattctcttctttgtataacaaaaagacgtggctagctcgatggttttataaaagacattttatcgctaaaccacataaacgttttatattctccctttgtagtattccctacgcccactacaacaaggctgaccgaattgagcgaatcgtcgagtggtatgatgctcctgccggtcaggcctcgagctcgtccgctcgaccttcctccgccgcctacaatgctcgaacccgacgagacggagcttcttctggcaccaccaatgatgcattcggatacgttcatggcgaagacgagaagtccttctccctcgttgacaacaagtcatcggctggtctcaagcccaggaaccagggaggacttggtatcggacggattggaggaggtggcaaccgaggtggtcgaggcggagcccaggctggtcgaggaggagctcaagctgctaggggaggtgctcaacagaggaactacactcgaggcggaggcagaggtggctttaacaactggaaccaggtgagttccacctcttcctttcaaggaaagatttgttattcaagatgtgccaacagacaaaattgatcggttctttttatgtgacggctatctttctcttgtttctagaacacccgagtcagggagtcctctgtcgccatcagtcccgaatggccggttcttgaggagatcgagttcaaccgactctccaagctgtccctcgccgtctctgagcccgagactcttgcctcatacggaaccgtttacgcatacgagaagtcatacgaccgaatcaccaccaagacttcccagcctcttcagacgatcgatcgaaccaaattcaatcctacgacgtcggacgaccctattattcaagagttcgcctcgaaagataccgcccgggtttacacgactgatgcaattctcagtgtgctcatgtgtgcccctcgaagtgtgaactcttgggacatcgtcgtcaacagggagggtgataacctctatcttgacaagagggagggaggtgcgttcgacttcatcacagtgaacgagaacgcgattgagcctcctctcgagacctccgagaccgacccctcaaacgctgccaactcgctgtcgcttgaggctacctttgtcaatttcaactacgcctgccaagttgtttccgctgccgaggccgccaagaagaaaccgtcatccaaggtggatctcggcaaggcaaacccgttctacaaccctaaagagtcgacggatccgttggcatcctgtggatacagatatcgaaagttcgacatctcgaccccttccgacgaggagccgatttcggttgtcgttcgaaccgaggttgactcagtcattaaggcggagaagggaagctctcagccggatcagttcgtcaacgttcgaactttgttgaatggaccttctggtacagtcgtcgattggaagcagaaattggattcaggtcgaggagccattgctgctcaggagatgaagaacaacagcgccaagttggccaggtgggctattcaaagtattttggctggggctgaggtgatcaagatggcgtacgttctctctttctccgtgctagatgatcaagtgatctctgatagatattgatacccctggttatgttatcttttaaagctacatcgcacgagccactcccaaggaccgaactcgacacgtcgtcctcggtacgcagacctacaagcccaaggacttcgcggctcagatgaacttgtctgttgccaacggatggggtattgtccgaaccatcgttgacctttgcatgaagcagcccgagggtcgatacgtccttgtcaaggaccccaacaaagctatcgttcgattgtactctgtgcctgacgacgccttcaaggcctctgccgagggagaggacgaggaggagtttgacggaattgatgaagaatagtttggaaagtcttgtggatatatgatggttttgcaatgaatacactatcttagtatatgggaaatcaaaatcagaatcaaaattcataagtcagcttacataagtgcttagttgagaagtgattttttctcaacaaccaaataattaagtcaaccaacgaccacaaacacggcaagacattggaacttctgacgcctgtgtttctcgtgtgagtgtcgtaatcgtccatccatctatccatccatcagcctgtccgatatgatggttaattgcgttgcttttcgttgctagtttcaatcatcacattcgtcatgggaaggcataagggtaggaacctcgttatcttgatagctgatcggcttggctagtgaattcacgctcgatggctagcagattgactgacctgcgcgtctcatatgatccttcaacgtaccttttacaccttcttaggatccaagaacaagtaggttttgaaaattttcctatatacgtctcttacatgcatcgattctggtcatgttccacgtttaggtttcatgttcacgctcgatccacgtacttacgtatcatttggttcaattggttcgcttttacgtcaatttgcgtgtgtagaataggacataacgctggaggagctcgatcaggagctggcagaccgagggtatccaactcgggtgacatcaagggtgaaaccggtctgagtatgttcctcgttctgttatatctatccatttattcgtccatctgctcgcctattcactcttttatgctatttatctgtggtatcatgacgcgtccggtttcttcctttctctagccgtcaactacctaccagtcaactgtccatttgccgtctgtgtccgagtaagcgaccgatcatccatccgtccattgatttggcttatattgtcataatccttcttactaacctgtttgaaacctcaataaatctttttacatcgccgtcacacatcaatagcgcttcccggccaaaggaccgggtcttaggaatcatatcatcatcagccactcgggtgaaagagatgcattgctcaacgatctggcagaacagattcttaccgaagtcaacactcaatacggaaacttacgcgtcaacttagaacctatcgtgtccgcagaaggcaccgagacgaatggtggagtgaacgagtcagacaactccgaagttttagatacttcggaaggacctgaagataacgcatcaaacgacagattcttcctctcggacggaacccccactttccgtgtcactggacctcataatcccctcgaaccttccgcaggctcgtccggaatcaacttggctcatggattagatgacagtggtttcctgctggatcaccattctttccctggtagctcaaaccaggagatgattctcgctctccagtcaattaatactggcaaccatgagcttgcgcgggtgcaggaacggatgcataacggagaaaacccggttggtctgccagaagcagtgatgaatttgctcaggacggcctccgctctgaaggaccctcatctaccggactcggtggctcatgaacatgcacatggtgctcttggcgcacacacacccgacattcatcacgatggtgaggacgatgaggaagctgtcggtgcgacccattctcaagatatgtcgattgatcctgatctagttggcgatgacggacaaggaccaagtaaccaacccggacagtccatggatgtaaaacctcaccctctggcttcaaagaacgacgtcggtggaggtcgaatccacacctctccttcatctcaggatcgcttgatcgcatctgctattcagtcgagtgctcaacaagcacgcgcggcacagattcaatcccaaatgatatcacgcgggtctccttcgccttcgcctgggtcgattagaaatcgccaaccgatgacgccgaattctataaccgctcagctattgagaaagaagccatatgcgagggtttcgccatcagcgcagtctcctagagggccccgaaactgccgacgatgtctgggatatggcgataaagtcggggcgctaatctgccccggtcgatatgttcgagcaaactgtgatctagataaaagagttcaaactgtgatcccttcgtctggaaacgattgggaccaaccagattcgaacgcgacttcatccggtcaacttcacctatctgatcattcagaacatcatcaccagcaacatcatatccaacagcagcaacagcaacaacaacagcagcagcaacaacatcatgcagacgagatatcttctcttaatggatcaatcctgcctgaagcaggaccttcctcccagccattcggacaatactctactcagacttcactctccattcatccgtctcactcacctcttccttcgctaccgcatctatctggcttgacctcccttccagcaattctaccacccactgcaggtaaggatcgtcaacgtcgacactgcagagtttgtcaagcaaatggcggggatggcttagcttgtccaggtcgaggagacaggaaaaagtgtcggttctggaaggagggagaaatgaacggaattttggttgacgctggtttacaacatgttgggctaaatgagaacgatgttggacaaggtctctctcagcagcaacaacatcagcatcaacagcatcaacagcttcaacagcaagaggatgaaagtgtgtcatcagcccatcaggaccatcttcatcatgcccatgcccatgctcatactcatgcccatgctcacactcactcggacgaatctctccgatccgactcccaattgactgagcatcatctggagccttctgattcagatcatcatcaccctgtcgatccatcactcgtcattgtcactcagcaagaacagggacaacaggatgaagggagtagagagacagatgtggaaggtccgtttgggacgtcagcgacagatgaggagttaaatcacgctgtcgccagtttagccgagtaggcttatcttctttattgttgtctccttttcctcttggttttagctgtctgtctttctccttctgatcctctttgtaccaagttccttttccctgtctctcattctttcccccttgtctattgttcgtttcttcgagtcaatcctctgtttaagccaatttgatttcttattctgtctttattattttaggttttagccctctcttcctgctattgttcctcgtgtagattgtcaatgaatcacttatcagctgtcaagggctcataattctcttgactcgaatttcttgagctttctttcgtcgtatagcatcaagtgacccttctgcacaaaactcaaaagatttagatgagaaagccagaggctgaagtctaagagaatgatcataagtccatggcgtcttgagactcaagctcggtctgcccaccagctgtcgtatcgccttcgaaatgcgattcgaaactcgatcgaatctgatcgtgggtctcccgtgcgttggtgagggttatggctagagcggtagtgatctatatggttgaatccaaaggaggttgtagtttttgaaattgatgaatgcaaggtaaaaagagaaggcggatgtgagcaggacaaagtatcatactctttgatcattaggtgtatcaagaaacagcagattcgaccatgcttctttatactcccctcatcaccggaaagagaaatcggtttcaacagaccagcaaaaaactgcacttacgtcttcttcgtcaaattcaccctcaccctcaaaccaaaccacactctctccaccctcaattaatttgccttcctcggcagcgaccctaaaggaagccccaaaagcatagccaaccccgaaaattgccaccgcacttcgttcttcctcgaacgtaggatcaaccacccagcgtttgccctcaccaggcaacaatgcacagcatgccccaaccgcaagtcctaacatccctatcgacccggcgtccaacgcggccaaactggcggctgttatcgataatgccttttcggatgtcggaggcgatcggagaggtcgtttgggagtggttggctcaaacaaagtatgtttcgggggattcgggaatactggaagcggaggggcggagagtgcttgaatggtgaggagtacaagcgaacgagggtgtgcggatagatttagaagggggagtagtgacgtctcgacggttgaagcgagtgtcttagaagcgagacctgaacaaaattcacgaacaagttggtattagcagagagtggttcatcaagaaggctggaaacagcacctaccagaaattccgtctagcggtcgatgtgagacctcaagtgttgctcgatccaatcgctcatcccttattcgaacttcgatgggtccagagaaagaagccagaagggtcgtagctcctgagaccatagaattataatgagattgtagtcattcatgaaagaaatttgaaccgcaactagtcaatactgtatactgagaagaaccagatagactctgactatcgggggaaaagagaaggaagagaaacgaacccatcgatactcgagcgctaccatcagccctggagagcgttccaaattttacagaaaattgacgttgctgagaaggctgccttccgtcttctcgaggagaaagatcgtccatagctttgaattgtggtctagaaatgtggcgtaagaacaaatagcaagtcaacagacaagttgggatggatggttgatggagttttcaagagagaaattctaattatatttcacattattctctacaccattctgttccctcttcttcactctcatcttccatcttgtatcgaaatctctacagacgtaataactcaactcacaaacatacgaaaagacgactacatacgcagacttacatcatggaggcctccatttcaaccttgcctccaattaagctcaagccgctgacggtagctcaagaaggtgtgtccgacgcgtctcctcgcatagattgtttggctcatatatccttcgttttgttcttgtttgactttcggttagaccgaattatcgagtctcggctatccaacgatgaacgagggatccgcaaaactttaaaaaacatccttactttggaacgccgatctaatcagtccactatcgagaaggatgttgacatggaagcctcctcgagtgaaaacccagccgctaaactaaggggaaccctttcggtggaggataagaatactgaggcatactcggtattcaacgtcgaactcaagaacttggagttgcatgttaagaaagctgggattgttgggaggatggaagcaaaaatgagagagacgtatgctgccaaaggaaaggagattggtatgttgccggtattcaatctctagatgttatcacctcgagctgaatattaaactcgactcacgaatttaccgtcaatgtgctcatttttagagagaaaacgacctcaacacactcttgagatcgcttccttacgagaaagacttcaaagtgcagaagaagagcgcaagcaaaagatggaatacgatgacgttgcacaaaaaattttggctgttggcaaacggaatgaccttgaaacgtaggtctcgataaatcatatagcacaacagatgactcctgtcttacctccaactaaaacacatgttcatatttatagcgcgatacaggaacgccaagaatctctcgcatccctcatagctcagagacaggcggtgcttcggtctcttcgattaagaagtatcgctttaggtaaagtccttcaggacctgactcaagtcgaggaggttgcaccggagactaaaggccccgaggatgatgaggtagatacagaagtacttgaagccgaaaaaatgttagttgaggacgcgccgaaaggggatgcatcagatatagccttaaatgatggcgaagatcaggaggaggaggacgatgacgggactggaaaaagaagagaagtagagaggttgccgtcgccaacggcggatgacatccagatggtcgaggatgtgctaccgtccgaagagccacaagagacaggcgaatcaaattcgcaatctaacccctccaacttagtcctcaatccttcgtctccggtctcatccgctctttcaaattctttagtctcttcgccaggtgtcccttccatcgccgacccttcgttcgctgctacctctgtctataataccgaaatatcgccatcactaacaccgtcgccctcgccgagtcagttggaagatgatttcgaaacttctgagacgacacgcatcgtccctacatcgcccacaaattccaacatatccgtcacctctacgtcgtcttctacaatcataatgatctcaaactcgcagcttagaactactcgggcgccaagaataaacaatccgtcgtcctcagcagagacagagccgacagtatcgggaacggagacacaagcgagacggacgaaactaaacacgccgtcagtcgatcaactggcaagtgcagacctcagcatcaaaaacgatatagaagatgcagaacccgaactggtacaaccggagcaagaggaaccacagctttttacaagtagtggacgaccaaaacgacgaagcttagcagcttcggcagatgtgtcttcgttgagcgcaccacaaacgaagaaggcgaagactagaagatgagtggtatgttggcaattggaaaaaggtgtacaaatacatatataatatgatcttcctcttcagcataagcagaaagaagaaagacctatagttcgcaatcaagccgttatctttgaatttccttcagaaaacttccaacttccattccccaaaaggtgcttttctgccaaacatcatcgtgtcctttgccctctacaagaacccatcgtcggagtatcgtgccgtttctcagacgagcggcctcaaacatttctttacccatagaaggcaagactaagctatccttagagcctgaaagaaataagatcggcgtgttatacaacagagaatgtggatgcgaggtttcgagggcggatagggcatcccaggggtcgaagacaaatggagtgaggtaatgatacggtaaatatcctaccgttttggaccggatagaacagaattcaaggataacaagatggaaaaggagtattctcagcgcgctatcaggtgtaaaaaagagacacgattgaaaggagaacgcacgtgaaggatatagagattgagttatcattcttttgacgctcggaaatgcgttttccaacacaacaccttcgactgagtttgactcttcatcatgtttcaactcgctcagcatgcaacaaatcgctgttcctcccaagctgtgtccgtagagtacgatcctgctttgagggtaattagcccaggcgtattcaagaactgtccggtagtcgttcagaagtcccggctgagttggtcgcgtgttagtggagagatagaacgaccgagggggtacaattagtagtttggtatgccctgatgagaaaggagaacgatcggagagaaggagttggcggaagagaggcaatcgggatacaggagaacccatgttgcctaagaaagtcggcgcagaagcggcgaacagcattatgacatctgaattgacgaaaaaaggctcaagattagcagaagatgagaactgaccttgaagatagatcaacactctgtctgggtgagagtctgatttctttgtggtcagtcggttggaggatgcaggtctttcctgcgacagttccagacctctgaggatcacaccttttccatcgggccctatggatggaaattcaagctccttcatatctaaccctctcaaaagccagtttgtcttgtcgattttctgcgacgcatcatattcatcatatagatccttgtcaattatagagatcacccgaccgacggtcgaaagctgagttctttacttacggtcgttcgagatcccggtggtaagaagcccatgtaaagaatctttctctgaaagagaatcatcatcaagcatttgtatgaccacagagtggccggaaggcctataagaacggaagctacaagataccagggaacagatgatgccgtcacgattgtccgagtatgtgacggtcgcgctaaaagtttcttgcgaggatacggggatgggtgtgaaacgattctgaacaacctggcgagagtacagtacatgtttagagtgaggacccaaccgatgcagcaagttagactatatatgacgtgctattatattcaaccaaagttacatgggttggcgttatcgaggttttcttagagcgaacattcggtcatcgacgtagaaggagagtaagcatgcaacacattaccgtgaggaaggttgggaattggttagaacatattcgtaatctgacacctgcgatattcggcgttgataagatacgtgaattctcgtctcgaaggccctccatttccctctccacccatccgccctctttcttccttcgatctcctcgctgctctcttcattcaccctccgtctagtgtctatcttgttataatcgtatagattgacataagtactaagaatccctgataaacattagtagccatgatatctaccccttcatctcacgcggccagtctctctggctcgtacacccccactcagcatcagaatgtcacctacggaccatctgccataaccaagttgcccgagctcgtacacttgttgcttccatccttcccttcggacaagaacatccgggcaattattgtgacaggtaactcgttggcaaccaagactccggtaatcgataatgttatcaagcttctgaacgatgctggaatcgacgccgatgttcacaaaggaatcgggcaacatgcgcgtgagtaagactacatcaacgagatatttcttccatcgtctcttctttgtatattcacgaaatagaaactctccatatgatcttcaacctaatcgaaaaaaatcagctgtcgcggggatcaaggaagctgtgaagttggtcaagtcaaacgtgaacaacatcctcatctcaattggtggagggtcccctatagatgccgcgaaggcgatcgcttacttccttcatgaggaggaagcagccgattcgcttgattatatcccacatatagctatcccaaccaccttgtcagcagcagagttcacttcgaatgctggattcactggaaatgagggcgacaagatcggagtcaattctgcgtatattgtacccaaggtaggagatctgatgttcatttctcattgatatcttagtgaagagaataacatgttgaagcaaagcgctcactcatgtttcgcctcttgaccaggttgtcattcttgaccctgagctctctctctatacacctcaaggattgtggattgcttcagggatccggtaagttgtcctctgctgatgctcaagtcgcaatggggctgaccagcgttcctctatgtccgtatgatcttcagagccttggatcatgctgtggagaccttgtatcgaaagggagctcagctccctatgaaaaacttggctctggtcgccatcaaagatctgttcgaagctcttcctgcttgcaagaaggacgaaaaagacttggacgcgagaggaagacttcagattgctgcttggtaaggatctgtaaaagacggattgagcgcatagagttggttctcacgtatttttggcttcttggctcgcatccccatattcaataataataataataataaataggcagtctctctggctgaacaagctttctgggcctgctggtctttcacactctcttgggtacgtttgtttcatctcaggatccgctaaaatggtttatctcgtatgttaaataaccttttcgctcatattgttcctactgcatacagtcacaaactaggtgctcgatactctatcgcccatggaacatgctcttgcctaactcttccatctactgtaaccttcatggctagagagcttccgacctcatcatggggtctcacctcactggcttcagctcttcccttcattccggctaacttttatcctacttcttctgctcctgactggactcaagaagactctaagagagaggctgcttggaaggtagggaaatccatcgagaaactggtgaaggatctcggagttgaaggaaagaaacttgatgagtacggggtcaaggaggtcgacctacggaaaatagcaggtcaagcgcttgcttcattgtcaggatgggaagggattccacaagatggagaagagattatcgaaaaccagatcttgaggcctctgttctaagctcactctcgcttcaatcgctcgatctatgtacaaatattgcctgatgtatgcctcatgactggaacgcgagccctccagagaagcgatcttcaccgctcgatcaatcatatagtattacgtaagatacgatgagcacatgacttgacgcgtaagctatgctcaatgtggcgttcaaaggtgacgttcctgctttcgagacatccatcgtatcgaccgtgatgacagattgacacattcatacacgcagacacgcttctacacatcttcccaacgccactcttcttgtacggtactgaatgcaatctgtgcatcgagattccgtctctttcgaaggtgagaaatcccttttctgttcccctcaccgatcatttgtccttacgtaggtttgaccgacgtcaggtcttgagattcgtagttccttagtacggacggactttcacgctcgtccattctttaaccatgaccccgaactggctcagtaaatccacgactatcacctcatcaaaccctcaagcttccccttccgaagccggacctaagctcacgagcaatcaaacgtctcttacccacttgggcttcagagggtcctcacccttgtcatcatcggctgctttttctcccctcacagcagtgatagataccgccggtcgaagaagggccaactttccaagcgcacgtcaaactgatctgactgaatactttcgtactcatggatctgaacgaacgagaaatgcctcaggtatgaaaccaagagcgcgaacggaagaggtcaatggaagaggaaaagaaagggaaactgattgggagaatgaaggaatccaggtgatcgggcaccgtctctcccgatcgactacgcctatgtccggcgaccatacagctcgtagagtcgctaatagctcgaccaccacaatgttctcgatgtcgtcccctagtcaagcgcatttgattaaatcatcagtcgcatctgaatggactaagaatggaaggtcgagacttcggcctttgagttcagaggatgaaatagatgtcaagctagaactatctcctcaagagatagcccaacaagcacgccaagaggatgctggatttgagagagccgataagagaagaaagaggagtccactagccgcaccttttaaagaagcaatgacttcgctaaacgaggccgaggataaagggatggaaagcgtgcttcggtcgaggtcggcaagggcagagagattgatgaacgacgagagttcgaccaccggcagtgcatcaatattgagcatggtatctccgaacgcctccaaggaccccgaaaaaccgacgtctagagtgtcacaatctggtcttgtaacttctagaagaacgatctctccttcttctcaaaccgcacatagtggtgagcttaatttcgaccagccggctgccttcagggcgtctactcttcatccaactccgatatgcatcgatccttctgaaccttgtccaaccccagtaccatcatctcctcttttatccgagtcacttctgccattactcccagcgtcatacccatcacctatccagcattctgaatcccttctacgcgtattcgcgccgatgggaaaagattcggcagctcatctgcggatgctgcgaagggatcagtttgcctgggaatcagaccaggcttttgctaaacgaaagaaggagctggccgaggttgaagcaagaaaggcagaggaagagaaggccgcaagagagaaggtgagaggagtatggcaaccgccttccaggccaagtaaaaagcagagagcttcagacgaaacggagaagtcgagagaacagccctcagttctcatcacaggaccgagcaaagacatccaagggagaggggcaagagaaatctttcaggaagagctggaggaagaggaggaggatgcaattttgcaagcgatcactgtttcttcgactacgcctggtagctcttcgaagcatagtcgacaccatcatctctcgccaattcgggttgttggtcctttcagagtacagggcgcaccttctccgaagagagctagaccggcctcttctcagcaaacatattctcatactcaggtttctgaaaattcgagtcaaacccagagccagcctcttccgatcggatcagtccaaggccaaccgatcgttcaccccaacaagttgcaacgaagtcgttctgtgataaatccgttgcgagatgatgataaattcagcacctcatcttcctcccattctgagacacacgatgaatcacaactcccagctataattaccgcgtcaagatccgatcttggtattctacctcattttcacctgtcacctccgttgtcaaatactctggacacaaatcaaccaatctctcggcgactatctactccgtctatgcaaaaacgatctgatcgtattcttgtggaacagaccccgactcctccgcgcggacgcacttcatcttcctggcacataaaccatggcccttctcttgattctggtcagtcgtctgaaccaatcgttcgagactggacgtatgatggttttagggattcagactcagaagatggattggtcgaatcgagtgtattaccggagagatcaagactactatcgagcaagaagaaaggagagattgaacctcagagcgtcgagaaactccgctcaggagatagtgccgttcagtcgagcgtcccactagcgagctcgatgctaccgaagagaagagagaagaaactcaaacaacagcaccaagatgcaaatcttacgatgatgagtgaggaatctggcataggcaacagatttatctgttcgagcgttccgctcgaaagttcgaagcggatggcaagaaggcagtctttctcgaagaaaggcaacgatgaactcgatggagtgcaaaatagtttaaagactgaatcgatggatagaccggatgtgataaggagagagcaagatgaaccatctcatgtcagtgatgccctgcccatcttgtattcattatcttggaaaatgtgaggctgatctcttcctctgcttgttatttctaaagtccacacgatttatgatagagaagcaaacttcgcgcaataactctctctcgcctgacaagtcgtcccctcttcgccatcttccctctagtcatttaatacattcttcgttcaattccacgtccgtcacacaatcacaagaatccagatctcacttgttttccgaagatgatgagatagctgttccttcatcccaattgaatgagcgcctctcacctctccgaagactcggaagtcaaccaatgagacccaagaacaaattgacatcacttcgggtcccgcgctttccattgcaatctgcacgacctgggttggatatcccatcacgtcctcctcctcctgcagttgaatctgtaaaaactatttcatctagaaaacgaaattccagctcatggaatttcagccccctcatagctcaccctctagtctcgagtcaaaaggctacatctcgttcatcgtctccttctgcactcctattctcaccgtcttcttctcagaccccgccggccaaacgcagagcaaagactccaaactctcaacttgatcaaccatcattcaaagatgaaaaagaaccccagcaaagttctctcctggctcactttcgacggactacaatacccaatccaaaacggctcgcgagacttcatggccttgatgaagagctcgacgacatccaactaagtgacgaaggcaatgacgaggaggcaacagagatgttaaaaaaagagaatggggagaagaatagcggcaatcttttggaacctgaagtcgccttgacggaaccggcctcatcatctgaatttgttattcccaatagtcaaccttctcctaaaaaccgtatcgtgttggttcagagaaaggcgcagagagtgatgggcagggttccatcgccacctccaagaaacatcttacttcctcgattggactcgaagcctattatcactcggacgagtgattcagaaacggatgatcaaaatgaggacgaaaatgatattgtgcctgactctcagttcgaagagggaaagacgatattggctgggagaacaccttatacatcaggcggtttctcaagaatgtatgggagagcgatgatgacgggaaatatatcggtaaaagaacccgagggtcgtttcgacaggtcggttcaggaagatagatcgtccatcaggtcgaataggccgtcgatgatcacaatggcagagaagaatgggagtgaatgtatcgaggaagaaggagatacaaccattgttcctgatgaaccaccaacagatgacgatagtgatccaaatgttactgtggtccccactcagtattacgttgtcgatgaatttggatcaacagaacctgttttggaagcttcatccttgacgagtttgtcaagtgactccatgtttgtggacacgctcacgagacgatccgatgagtcaatcagtttctggaagtttgccgctccatcttctgatgatccatctacgtgatgtcatgtatatgattttccaaaatgatctttccatatagtgtaagctagacgttgtgatggatctcattaatgatgtatcttggtgcggcacgctgttctcgctttgcatcccgggcgccgatggttgatgataatgatgcatggttcttgtatgaatgcaaagtataacagatgattgaccgagtaccccaagagagaagagaaggaaaagagaagaaaggaaagcaaaagaaggagagatagaagcaaattacaaacacgaggttcccctatccctcaatttcttccctacctcgccgtacccttgttcttttccttctttgaaaggaagaagacgagagaggagaccctagagtaaaaatgaaccaagacagatgtagatgacattgatgttaaaaaggaaatgaaaagtatcgggaaaacacagaacagatatatagattaagatagcaagactcaacatagacaaacatgagaagctcagatctgatatacagaaggatgccctgcgtcaaaaaaaagaataaacaaaagaaagaagaaaaagtacagagaatgttataataaagtccgcattatccagagtatctaatttatatctgccagagacagctccgacccggcccaactcctgagaccgtcgtgctgctattcaaaagtaaagagctcgtcgagtgaaaagaccaatgaggactgctcgcttaactttccgggctagacggctttgtatagacgacctattgggggttggatgaggcaggaggagcgactggggttggcgtatcgtctgtttccatagctgcggctgaggaactgaattctggtttctcagacgctacgtccgaatacagaacggaagcgatggaaggagatgtagagttcgagctggatctggatctgccgatgacttttgggagatgaagctgttcccgacgttcaatctcttctttttcctctctagctacctcgagtttctgagaaagcacgtcaggacctgaggttggaacgttggtgagcgggatggtctgtgaagacgatgaacctgacgagggagaggcctccgagtcgaccgactcagaagtgccggatggtcggacagctccctcttcatgcggagtcggttgctggatgttgataggtggaccagaagcaccagtttttgtagcaggttcctggacggaggaagatggagaagcattggctgaggtctttcctcgagcacgttcaatcttgagccggcctcgcagcactttagcctgcgcatcggcgcctgctccaaattctcttgaaacatcattggtttcggcacgatcagaccctcgccatcgtttccagccaacgaagtcgatgagagcctaaaggtgaatagaatgaatcgattgagaagaatgatcagtgctcttgatagtcgtatgcaacaaagacccagatcgaagaggacaaaactcacttgcatgcaaccccattcaacaatttttcgttcaagccattttagcgagactggtttggtaaggaagtcattacaccctgctgctagggcggacactcgatcactttggagcgacgaggcggtgagtgccacgataatgaccgacgatcggaagagagctgcagacgccttctccttcgagggcgagaaggttcgagctttttcagaagcgggtgtgctcgggaacacgccgatgttgttcaacttctctaggcgtcgaatctctcgagttgcctcaataccatccatcacaggaagttgaatatccatctacaagtcacaacagaagaaagataatacaacagtaaggaatgtgtccaagatccctgtcttaattcattgttgatatagaaaagacctaccaagattagatggaaaccacctgagctccatttgtccactgcttctcgaccgttgttcgccaccccaaacttaatcttcttcttcttcatgaaagtcatcaagattgtttgattgataggattgtctgtttcccaaagaaaagaatgggccaggtcagatcatgatatgctactgagataaagacgtctatactgaccttcaacgatcaaaacattaattggaggcacaatcatcccatcgtccttgactgctttctttttacccttctccttgacggccttcttgataggtggcaccgatggactcaagactcctccagtttcgagagggggcgagacagataatgaaattggcggagtaaaatcagccgaagcttttctcgcctgctgactcggcaaaaccggtgcttcctccgtcgcgggcgttctaggtcggctggcattggaattccgatgcgagagcactccaggaagcgttgttccatcttgagaggtctttggccgaacaagccttgaatgagtaggtggtaccgaagctcctggcgaaacaacgcgatccagaggtgaggtctgtgactccaacccgggagattttctggagtgatgggatccagaatcccttctggagctcgagacaggaagtccactctcgatcgtactggctcgataagctcgatgagaggttggagagtattttgccaaactctctgctgagaccgagggagagaacgtcgcgatagcaggtcggttcgctccacttcgacgacgttccagactgtccttatcgcgcaaggtggacgatctggacctcccaccagaaggcactcgaggggatggatcgaagaacatgcccattgggaagccatctgggctttggattaacatgccggaccgagcggagtcaccgtatctgttggcggcgtcggccatcaggtcgataggacttgtgaagttcggaacaggaatactgaggtgtagtggctggggatgatcagcagctgaggacggaggaattccttctaaaacagtccctgtcgagactgttcgagggtgaataggtcgggtaaattctggaatctctcccattggtggcgaagtgaatgaaaggccgtgctgttttatgactggaggtggaacattagtagaagcaggtggaggagggggaggggggaagtatccgtagccggtaccgaaacttccagaagggctgagtggcgaggtggcgattggcgtgaagaaagggtccacaatcggtcgatttacagcggtgtgaagagatgtcaagaatcgtctaggcccaaccggtttgggaatgaccatcacctccggtaacgaccgggtcgatcctggagagagtaaagattgtatggcatctctgacttgcgaatagttcgaaagactggtaaaatggatgatgatgactcctcgttttccagagggaggtgaattactcgaagggcctagaatttgtcgaacagctggagacgatttggctcgactaccagccaaagtcggtcgtttgttcgatcgaattcgaagaggcaagttcaactgagtttgggcgcgaacctgaagaagtcgacgtcgaaggactgaaacgtcatcatctatagacatataggagaatagaataatatcagccatacgctttggccaagtctgtatatcaaggatttgaagaacctaccaatcataatgaagctgggagaactatcgtccgaggaacttgttgaggagaccattgaatctgccaggacatcgagacccagtccagacgttccctcagactgggacaaaggactggccatcgactcgaaaggagggttcgaaggggacccatcgccctgacccgagcctattccttgctgagctccataacctcctaggctagaattactgccaccataccctgaatcacctctgaaagtcgtgtcacggctcttccaacattccgcttcatccatttgttcgtctgatgcgatatgtctcatgtccattccccaagaggtcaggtagctggttagatgcttcgcgaatactgaggtctcgcttgcatgcaatgagacttttttgccacggagggtttcggcgaacacatgcagttccgataatgttggctcccgagcgagcttgaacgttgagaaaggttgacgaatggcttcctcctgctcggaaagcatcgccggctccccaacaggggatcctttatccatgaggagcgcaagctcaaacgttcgtctagttgatgttggatcagtttctacctgcaaagtagccgatatatgcttcagcatctttttggtgagcgaggaatccaaaacgggaagtggtggtagagcctgctgagggtgcttgtcagttgtatcggtatctaggggagtcagaccggggaaatacgtcttgcgtgaattgtcagtgctgacaaggggtgtcgagacatctttctcggtactaggagttcggattgggctttcctccttttttaacggtgatcgattgatgttgtgaatgatttcgaatgtgcagagcaaaggactatcctctgaaacaagatcgttcgaggcgtttgagtatagggatgaggtagatagtcgatgttcgagagtagcgaccgggacctcagtttcggagattgctgagtccgttcgtcgtcgtcgagagaggaaatcctggttcaacgggaagtcgattgctcgacatgacgacttctggggagtgacatgaaggccaatctcgatagcatccccaggctggcagactagaaagatttgtcgaatcacctgtgacataacgaacgacaccagtgagctcaatttgtttgagaaatcaaagttgaaaagaagggactcacatgcgacaacacgtagcaaacaccaccctcgtctcctttcacactgaagtgtttcatgcccacatctccatgaaacaacaccaagtcgatcccggcttgagctgctagtccgccaacgagatctcccacagactgaaccatctcccccacgtcaaagtcttggaacattgagactggttcggaactgagcgagttgaccgaaaccgacgagctgtttcttgagtcactcctcctagctgatccgctgattggcaaatgaggggcaggcgatcctggtgatagcttcaaagcctccagaagaggaatggaagaactcaagacatcgctgttactctctcctcccttgttggtgagccacgttcgtgaagattggctggacttgcttcgctctctttcgctcaatggatcttcctccgccatgctaaaagctttttgccctgggcttttggtgagggtctcatcggtacacaatggagcgatatgctctgacagatagtttaggttcttcatcgccgtcagaagactcgtgagactcgtcgctggaatttggactgaacaagcagagaactgctctttggccgagtcgaatagatgaatcggcgtcaactgaagaagtgtttggatagctgcctggatcgagtcggccaactcaagagaaagagtatatagtccggtttgttgaccctcagcaggaagagcaaacggaaactggccaggtattgaagcggatgagactgagcctgcagtagaagaggctggccgagagaggagatgatcatcagctggggagtaggcggtgactgacaacctacgaggcatgatgatgtgcgaatcactcttggaggttgagatgtttgagccctgagtcgtctgtctagttagagatggagaggctgggttgtttatatggaggtaggcttgaccggatccagaagttcttctgttgggatgagcaaggtttctaagcttattaggctggacgggtgcagaaaatgctctcagaaaaggaggaggtgatggaggcaataggccggaggaattaatactcggaatctcatcatcttcggcgtccgaggatgacagccgttgagacgaaggttcggtagacgagtatggacattgaagttgactgtgtggagcatgagctggaattattgttgttgaggccgaagagaacacaggacgatggagatcataactgtagataccagctgatgtacttgccctctgtctttcgtcgcctgtctggtcgtccggtgagctttcatcggccacttctccatcgtcccccagcatgctggcgttggccgaactgtcatctgacggtccatggcttaacccatttgtgttattcacatcttcttcgtcaggatcggacccaccgtcgttcgcaaaaggatcgtgagcgaacgagttgactccatcatcgaaaggatctcgaagggagatcggaggagtcgtgatagatgagacagtgtggtgaagggatgggtgaggcatatgagacattatggacgattggaagaggtccatcgagggagaaacaatgctacctatatggccaactggcagatgataggacggtgccggtgtgaaggtgtccacttgaggccattcgtgggtagatggcatctgggaagatcccggtatagaaggttccgaggcctgaggagataaaaagaagaagaaagcaaaaaggttttccaaaacagaagaaagaagagagaagagagagtgaggaattagtttatcattccatcctcttttcaaacgatgtagggggaaagaccagaaaggctcagggagcttgggaaaaagcacagtaaagaaatgaagaacagcgacaggggcaaggcaacgcccggccagagctgttgagaaagaaagacaacgatcctctcgagtattttgtacacattcgttcactgataaagagaactgtgaaggaagaaagaaagaaagaaagaaagaaagagtggaaggaagggacatatcaaggcgaaggaacgaatacttacaggccgctcggcatctgatgatccagcgatcgtagtcaatcgaggccttgtcagcgattgctgttgttgaaggttgttctcatcttcgctactgatgctggcaggggtgcctgtaggtgccggtgggtatcttccagttgggctgtgttgaactgacggtgtgtgctgggtatcgtgatgatgctcagagctgatggacatgttttgaaggttattggacagatgtgatttggaagacgagccaaggcccatgcgtaaaagagagagaagaacaggagggcaaagacctagaagcggtattatccaaaacaaaaaagagaggggaagaaggaaggtcaaaggaagacccaaagaaggaagtgaggaagaaaccaagaagccgagtcgaggtagagggtaaaaacggttgaaatggatggaacaagaatccggatttgttccggaaagaacaaacacaaaggcaaaccactcgaggggtctggccttctaaacactgcagactgccctttggagaaactgatgacggcgagatggacggcggatgtgtagctgaatcggattgagagatggctgaaggatgagggaacaacgaacaggacaccacacacgaggaaagaacgagggagagagcggactggggagacgcaggtcacattacgtaattttaatttaatttaataattttgcaccccgaccagactgatctgcgtgttgcttcgtctcggtctgatcctgtacatacatatgacattcacagatgacgacaaagtaatttctatctcttctctgttttcaagccgtcccggcaacctccaagacgccttcccagattcctttcaccaacttggctgctttgtcctcgcccgaaccttcgaccagggcggtcgtgagcgtggagaatacgacggtgttgatggtggatgtgtatgttcggaggtgatggacatactgattgacatacatgagagttcgtattcaggtatatcagtttcagtgccaaggtgtgtcaaaagagaaagcacagagagagaaagacaaaccaatcgacaaaactctcgccaccagccccactgtgaccaaacagtccagtcctcttccgtccatgaatctcgtccgttgaagcctcctttgctcaacaatcccgctagaccctgcttctcctcaccagctccagtctcaggcaagagtgaccggatgaaactctgaaccgcgctaacgagcaccgccttctgggtctgttgcagtgaggagagcgcggcaagcgccgagatcataccgttcgtctttttgacttctgtttgggtatcagatgattcgttagcacaagaagtgttagcgttcaagtcaagttactaatgaaaatcaaaaaaccctctagtgatacaacggactaaccaggccgagcgctttccccagtctcgtcctccatcgttgcatccatcgcccgagcccgccttccgccacttcgctcctcctcctcttcctccagcaagacgattttccgtctcaccccgacaactctgccgttcactttgtcgatcgccatcctcaacaaatcccatttctgcccactcatccactcctctccgtcctttcttgcaccctgagcttcatccacgccgaacacccaccgaacgacatcctctccacctataattccatactgcatcagcttgtcggtgatgatcaacctcatttgaccgctttctcgccagaaagatccgacgttctgaagcaactcggccttctcaaccgaggtgatcgatatcgcgcggagcacaggaaggtatcgctcagttgcattcaagaaatgcgagaaggatcgagcaccaatgaacaatagcgtttgcacagcaatcgatcgggtcaacgatgtcaaagggcccgcactcggttgaagagggaatccagaaaggtttgcgatcactgtctcaggaggcgttttggatcggaacattgactgaagagttgcggctgtgttgtggtgctcgtggtctaaggcaaagtgaataggacagttaagagaaagcatctgtttaacgctttccgttccagagtcgagcagaaactgtaaggccatcagaagatcaaagcctcaccttctttctcatactcgtaacagaatgcctcagaatcttcagcgatcacaccggcagtgaaatccctcattgcttcaggcaaggttcctttgattcgctcgtggtacgacaatcgaatctctagctcgaccacccgtcgaatgaatgacagcttgggatgaaggtgaggcgacgtgagatcgggaaccctatctcggaaataagagttgtaggttttcagcgcaaggtcgatgctttggaactgtttcatctcttaaaggctaaggatatatcactgaccagtctttccagagccactggaatccaaagttactcaggtgaacagctaaccaatctgcaaaccgcctagtgcattccacatccatcccggcatccaacgacgcgtagaattttcgaccggttttcccgacgggcggagccatggtaccgggactgaacttacagagttcaacgatcaaactcgtgtagtagagtgtctgatgtgggggtgaaggcagcgcgatgatcatcgaaattactgatgacgctaacagggactccaacgaccatgtcggtaccggagcatccggatcggagggcaaagccacagtcacattaggcggcggcttgaatgtcccagagttcaaccaatttggcaactcgagcaagattcgagcgcagtcctttcggttgatctcgtagatattgatgatatcatgaacaagctgtcgaaggatccaaccaggaggcgtggacggactaggcacgagttcaggctcgaaaatttcaagctcgcatgtagcccagccttcaagctttttttcgctcgaaccgggggtatcgcccacatcaacaagctcaggtggaaccatgacgagcggaagcgagtatgggccttgagggtcggttgctcgatctgggaagagcgcgtgtggtcgaggaaggaaccgagggaggacaaagttttccgctcggagttcgcccagcgccttgttcagatgcgtcaagatctatcatttatcatttttaagaacataaaagcaaccaggtatgggatcagattattgttcaaacaaacctgaggttcgaagaagaagatctgtaagaaaagcactcacgtcaacctcttcaggaatatccttcgcgtcctcaccatccaatactctagccccaaaaggtgagactagatctttcctcgtctgcctagtcatcacatacacctcaatagcagccaacatcgcgctcactccttcgggatcaatctcgttcaaaactgctcctccctgaggatagaagcgtaaacaacaccaaacgcaaagcagtcgtagatataatggatgatgataacaagcatgtcagtaaataagagagaaagatctgacgaatacaaaatataacagttgaatgaaccttgatgattccctcgccgacagcgatgatcacgcgctcagcccgcgcagggcttactccaagttcatccacaacagcgaggaagctttgaagaagtgcgaggaacgatacgggagtgacgtctcctgaaacagctagattagcaaatagatgaatctacagacgatttacatcatggttagtacgacaaaactgagaaagccgagtaaattctttgaacgaaccatgagtctagtctctctccatcgtcgaccatctacatcggatctgaaagtcttcacaagatcctctaggatgatcttcccaatcgagggtcctgatgacgctaccggtttttctgcctcatctctggcctctgagtgaccgccctcaatctcaactgggcaagctgccaataagctgatcagcgtcgcatagatcgcgatcttgaagggctgctcaacaattcttataatttcattgagttgaggaaaatagaatgttttgttcagattagagtggtgtaacttcaagtcggtaagcaaggattaaacaaaggatgaaccaacccggctctgaaaccctcgagaacggcttcagtagttgaaggaaattgacgctcaatcatattaaccaatctaggaagatcgtgtaaaggatcaaaatcgtcctgttagatttatccagaggacatcaagccccggagaacacgcatacgaagaaagaatagatcagcgcgatccaagagcacatatacgtcgtttagatgtcatcacgactcacagctcctccaacattcaggatctgcttgagaatcttttccgaagaagattccggaggaggttgagcatctctgggccgaggtccttggtggccctctgtccaaagccgagagaaaatccatattgatggattgatcgtgagacagaggttgcaacaagtgaagaaggagaataatcaaaacttaccataaggctgtcttctaggtcccctataaccacctccagcagctcctcctcctcgctgccagtttcctcctcgagagtttcctccagctgtctgccaggaagatgatggagactcttgccaactcatgattgtctgaatgggttgatcagtatgataatgatggatggagaacttgtagaatttcaagaaagaatatgcgatgaaataacatgaaaaattcgatattcagcttccatcaaagccagccgattttactgttagggttatttcctctggtaccgccaagattctacttgtgttatttctgtccgctcttacctcttcgtcccctctatcaagctatttactgaatcccgtaccagatcattggcccctgcctccgacctcaatattgtgttcacttacacctataccttcatataatgtagagtctgcacctggtttgacatctatgtcagtgtatccaccagtaatcagttgaaaattaattaaagtctatgatgcaagttcttcctctagttgctatcaatcagcagcgtgcacttagtcttttctgtcccgttgccttttctggacccttgggctctttggtctttctcgaatcttttctcgagtgtggatctgattcgttttatttgatcttctcagccaaaggcgtctttaacagagacctgttcgttcttgatcaacaatccaagggatcctaaggctttctgaatcttggaataccatctcaagggtattcattccactactagagggttgagccgttactggctggcaattcgttaccttgaatttaacgatgagagcagatgatatacagagaaaccagcatctcaatgtgatatagataacgtagggtgaaatgattgagcgacgggcatgtataattatttagcacaagacaatatgcggaagatactatctaatgaataggcgagaattgtgtccttcccttctattagattggatgagtatcgatctataaaggtcatcaaacgaccattcgacattatagccgttcctcgccaacctcgttccatccttccctctcacatcacaagaggaagagacaaatttcaggtaggagtgtagaagaggaaaaattcgagaagtcttctttttgtttccttcagtaccagctgaaagaaacaatggcgaagcgttggcctttttcagtcctttataacatgttcagaccaggattcggtgcgaatgtttatcttatcttatccatcctaaaccgtctcaatctagcccctgttcacgtcttgttcgtttaagtcatcctttctgactatctcctctcgaatcatgctgatatgatatctctcagacgctgtatgtatgcacaagaactgatcggaagaaacaacaaggaaaggaaccgagcgatctatctgtttaatatctgtcaattcgagctctggtctcaaactctctcattattagtcggatacctaatgagcgttcgtttctctcgcttttatcattcccggtctccgatttctaatgactgttctacttctcgtttccgtgatgtagtactgaatgttatgaccgctcccatagcatctcttccttgctctattgtcccttcaaataagtcattccccttattcaaagaaaagtatagaattattgttaataacaaggcatacatccctttgtagagtatacgccttgtgataagatgaaatggctcaaagtgcgctaaaaactcatatattatcatggattgtcagatatccaagctgatacaagtagtcaaagacagaaattatcacttaaccttcaacgttatcaagtacagatcatctcgtttttccaattgcgacaaccggatgtctctaagatagattccggaagtaataagctttttacacatggaacactcttagatatcaatgcaggtgagaaaaaggcaggagaaatttttagacgatattcctagcttttgcaacgagagcaacccgtcctggatgttgatcagtatacacagaaaaggttttcttaattcaaggttacacctcttgctcgtgatatattcatgccaaccatcagagatcgactgactcttggtcaacttagtccatcggaaccttcaagatatgtagcaaactgcagttacatttgaaagggcagttaggcagatacggagctcgccgtttcatctgcttctcgttgatgacgacagcgataatagtatcatgtacgacataagccacgatacatatagacgagaaaagtgcggccatagcttcggagagaacctatgatgaactgtcctatatctattcccagatgagtagaatcgtgagatgtaacaaatgtaaggtgagcccgatggagaagagacgaatgagtttgcctgttttggcgctcttacgtaactatccttgacactatccctctttttacttcctttcatcatcgtcactctaccttctatctttcactcttacacccttcatcatctatacaactactttctctctgcttaactttcattgctcatcatgggacaagcaggatcagtcaaccaggcattcacaggtccgtatccactttcttggaagcttttcaccccgcttggagcgtgcttgaatgttgtttgcctctaatgcctcttgtctgttccttatgacatctttctgaattgacaatatataacatacgaattatataaagagatggagcggtcgtcaaattgttcgactatttcttcaaatttcttgcgtgcagctctgtttctgatcattgcactacctgtcttgtttcccatctttcacgacgacatcataatcagtctcggcccaggagctccaacgtcttaagaagaggtttatgaagcttgatagggatgggtctggttctattgacaaggacgagtttctacagatccctcaaatcgcgacaaatccgctatcaagtaggatgattgccatcttcgatgaagagtgagttccacagttccacaattcatatatgaagaatattgaaaccatcatcacaaaggaacggcggactataagcgtcaaggtatccttaatcagaggctgatacctacatatcttgggtcttgtttgacttcttgttcgcgatcttagtggaggagggaccgtagactttcaggaatttgtcggtggactatcagccttcagcagcaaaggagctcgagaggagaagctcaaatgtaagggcccttcttgtcttaacagtggtcacttacagctgcgatccatcctttgaaactgaccttgtccgtcctaattgtatctttgatgacggtcggtgctttcagtcgcgttcaaggtgtacgatatggatagagacggatttatttctaatggagagctcttcctagtgttgaagatgatggttggctcgaatctcaaggttcgtatcgtcgattcttcattcaagcactgttcacatc

SEQ ID NO: 2751 - DNA, 7570 bp, Xanthophyllomyces dendrorhous
ttcaagcactgttcacatccactctgtctactgaccgactttgagctatgctctttgttgcttcttgatcgacataggatcagcaattacagcagatagtagataagacgatcatggaggccgataaggatgggtaagcgattatgcgcatatcattttcggctttggtgactcaatcttctgtctttatttaaaatgtgtagagatggcaaaatcaactttgaggagtttacagcaatggttgaaaacacagtaagagccgttttatccgacctacttgccagttggcaacttccgctaatgacttcacatcaaccacctcctcgtttttttgtcgatttcctttctaggatgtaagtctcctgccacttgctcttctcaaagatttttgcgacttattcaacctttctattgcctaaaaacagctcatgaagcaaatgactatcgaagatctcttttgagggtacacatatgcaaatatatgcatacgttccctgacgctcttttgttcctgactacctcatactcttctacatctacgttcttattctttctcgtgccgtcttgtcatctcccaacccctcggccttacacctctgtcatcacagacacgcatatcttttctctattctcgtcttctttctcttccttgtataggtaccgaatgccttcttcgttttgtgtgtttatcctcttttgctccaagactcagaggcattggttataccctcttctatttatgtctctttggcctgtccttatgaacgagattgatgtcgattgagtagggatgggatggctcaaatggacgtaaccaggccggtgactgcgcgtacctagcttgttacccgttgcgatcatcatttcgttcggccatctttgatccacaccatctttccagcccataacaatcatccatctgatccttcatcttcttttgtcttgtacacttattcccatttgcatcatctcaccatggcactcccatcggcagcttctgttcaacaaccttatgacacccgggtaattgacctcccagaaggcaaaggacgtgggtttcagcttccttatcgttcctttcaacacttcatccttatttcgcatttggctttagtttatatgcttgaaaacaagttcattcgacatactcatcttcattatttgatttctatgcttctgcttctaatgttccacgtaaatctctgggcatgggttcatggatttaggtatcttgtgtatcgccgatattaggggagatatcgaacagtacgtctctgatcgcacgtgtcttcaccatctctttttcgtcctccaatcggaactttgcgaggctcgcctgtcgagattgactaggctgaccgttttctgtacttgacgccgtcggtatcattgcggtggttgtggttgccatcaacagactcaatcggcttgtcagagaaacagaagcagtcgcgtgtatccataccggagactttggattctttgaagcatctagtctagatcggatagccgacaagtgggtttctacatccatttttctttctacgtccctttgattgatacgtgctcaacgtgatgcatgtttgacttctaattcacctccgctcgatggttgaagaactctcaagcatctcatcacctactcacctacgatctctccgtccctccgaaaccgactattattacccaacatacaacgagccaactccctttctcttctcgcgccttcagaatctcagttccatctctcacagttcccccaactgctaggaagctcgccgagacttaagttgctggtccctacatttgtgagtgatcagaatttttatatacatcacgttcacgcggtgtgatgtgtagacaaggaggaccgaagctgacttcaaactcaattttttataactcatgtttcaggttatctacggagcgtgcgaagatgtccgtatcattgagaaattccggacgaaggaacaccaagttgacaacctgactgtcttggacgaggctacaacccgggttttagaggtcggaggagttcgactaagactcttcgggttggggggcgcagtggtaatgccaaagatgtttgataatggttcatacattttccggtttgattcacaagcgcatacaacatgatttacccaaagtcactaaattttactgtctgaaccttttgtacaaatcaggtgagggtagcgctactattgctggtggaggaggaaccatgtggacaacagctctccagatcggggagctgatcgatactgctcaaagagtatgctgcacggtacttcttctagcacgcgtcaagcaatctactcagttgacacgtcctctctctcatatcgaataggtctacgatccttccgaaacacgactgctcatcacacactcctctatgggccgagaaccagtgctatccttgctggctctggctctgaaagcggatcttactgttagcgggggtttacacttccgatatggagcgagtttcaacgaattcagtgtccaggacgaaggaggagggaattggtgggcaaaggttcagaggggtaaaacggccttctcagcagtatacgatcagattcgaacacaggtcgaagaggtcatcgagtgagtctacttctcttgcgcgctcggactttaagtaaaattcgtcggatattgaccgtacacctgttcttatgaagctcggaacagaaagtcttcctagataaaaccttagcagcattgaatcgatctcctccgtccacagggagtggaactggtgctgaggaagcttcatggaaaaatacttggagttggaatctaactgactccacgtacggtcaccttctattggatatcaaagagggtcgtgtatcggccgagctgaagagtcaaggtgtgtcttctctcttatatgtgtcaataggcgcgtaaatactgatccttggtatacgatcttcaaaacattcgcataggcttcaattttgctcatcggaaagcttctcagcatagcattaaaccatctaatgtttctaaagcaacaacgaacgcatctagttcctcgtcttctatggcttcagcggtgaactctgtccctgtctggaaaggtcctaaaacagcttctgcagcgggaacgaatgggccctcccaatcaacctccaacaaactttcgtcgtcttccgcatctgcttcaactctgtcgacacccgtgacatccctgtcaacccaactgccctcaaccaatactaatactaccagcagcaccacgaacaagagtgcgcccaacggcgtctcaccgtcttcggaatctaacaaggcggaccagcctccaccctctctctcgacgacatcgcctctggctactcctgtcggggaggcgccgccaggtggaacgacatttaagcctaggagcccgcatacgctatacatcagtcagatggtgccccctgtgagcgaagcagagctcaaggagttctttggagacgcctcggagggaatcgtttcggtcaagcttatcatggacaaggagacaggagctcagcgacattttgcttatgttggagttagttcccactttcttttaacgtcaccctgtcttctacctgtatttttcctttcctgagatacggcttgactaaacaagaatgatacatttgactgaatcgaccagtttgctgacgcggctaccatggagaagggcctgtcgtcccatgcaacaactctcaagacagctacgcctaatgttgccatatctaagcctcccagctctggagagttttcaggttacagccgggggcggggcggccgtggaagaggaggtagaggagatcatagcggtggaggatccagaggacgaggggctagatcgtcattcaacaatggccaaagagggtcagaggaaggaggggcggcgcgggcggattagaaaacgaactagattgcaaagtagataggaatgcacgttgtatatcgtcgtagttatccgatctgtatcctgtttatcgcggttaattccgctcaagttccggcacacctttgtcttctgacaacaactcttcgttttacacgtgtgaccgtcgtctcgaactcttttggtgcaattcttggttacagtagagaagacctctctgtcaaaggctggtaaatatcagaaagacaacatggtatcacaagactctcgaacggctggtatcaatctatcaaacggttttaattatcttcatcgtcgataactctgtcgtccacagatgtcttcgcagcccattcatcccaaagagatttgagtggctcttccgagtccgaatcgagaaggccagagtcccaagtatcttgatcctcggacgccgaagatgtagagtttgagatagagttggaaggaaaaagagattcatctagaggctgagacgaattttcaagattctcgtcctcatcttcgtcctcgccatcatcgtcgtcgtcttcttcctcgtcgttttcctcatccttgtattcttcgtcttcttcatcgtcggcctaatcagattcgtttttatacaaaagaagtagatcggggtacaaagatgttaggaacaatgaggagaaactgaatggcaacggaaacatacatgaacggtctcatcatcttcaacttgctcgtcctgaacttcttccttttcatctccttcatcaacctcattgtctacttcctccattgatggatcctcttgttccatctcccaattttgtagagtccgctcgatgtcattctgtctagccgatccactggctgttggggcggtggcatctgctatagctgcctctacctgagcctctgcttcgtaaagaccttggaagaaggatgcctcgtatctgtcgtgttgatcggatgagatactgccctcaccgagagcccaaagagagtcacaaacgtattgagtggcaaagccgagccgggaaccgttcgtttgagcgaagaatttggcagtttctgtaattcagtgagaagacaatgaaaagagacgaattatgtcagcattcaagacagttgaaaaaagatgtgatatagaacgtacggaacccatcagagtagcccttagcgatagcagcctcttcgaaagacatgacagtcgatgagtttgaggaagatattgttgagttggatttagaagtcttggacaaaggaagagtttctgatccatcatccacgcaatcagagccatccgctccttggtttggcttcccaagaatggcggcggcggtggtagcttcttcccgcagagctcgagctctgaactttcctggcggcagcttggaatctcggaacagagcctgtttggattgcacatctcttccatttagtatttgaaagataccaaaggcggtcttggtcaaggttcgcttcctcgattcgggagcttgaacaggctcctgaccaactttgtgtgcaaagctaagagtaagattggtgatgatgctggccagaggttgtattttgattgctttgatagcatcaacaagggatgacacaggggagagaatcgcaggcaaagagtctatcatgagattcccatcgacgaccgaagagtttttagcgccatcgatagattgagacgagtagcttcctgggaaactgaagaaggttgagggaagtgatttgccaacagcgttcttgaagcaccagtcttgatccgtatcgcagttttcggtcttgtagcctgcgcatatcaagaacgagcaaataagatcagagcacgtcttgcatgaaagcgcagacgatggactcactccagaatgcccatccagccgaggtattggcataagtagccatctgacccgtcgtataagcttgtcgagcgccgactggattggtttcttttgctagagaagcctgactaagagctgctgaccattctccaattatcatattgttccgagtcgagagagaggccgtgtttaaagaggtcgatagtgtgttttttatctttccggtcagatcagtggtcgattcatttgggtcttgaggcgcgaacacaaaatactgatgatggtcgacgacgacgaagtcaggtcgctttgcgacaaaatctgcgaatttaggcagatcaaaagcatcgtgaatgctgtatacacggacaaacagaacgtgttaataaaatatctgattttatccttttgaagactatacgtactagaacgggaaagaagaggcggctggagagatctttcgaagctcgtcgagagcccgtgtatctttacaaagggtaatcatgatcgtcagcacgtgtcctaaaaccatgagaagtgaattcgtacttacagaagtctggaagacgcccatcattggagggttcgttcaaaatttgaattcctacaacgttcgtcacgttgacgagctgctctgtcaggaatgtcagagcgcagatagtggaatcttggtcatctttagagtcgaaaaatccgataacaccatcggccagtccagagtgtgcttgtccattctgagagccaggagctggtcatatcaacacatcaagacttgtcaacggctacactctttgagtggtttaagtagatggttggacatacccccatgcatatccacaaggacaccaagaccatatttggcagcccagttgatggaccgaacgactcgcggccaagagttggcatataccgaagagaccttctcaaagggagtgttcttgacataatctgggccgagtgaccagtatccgatcggtagtctgactgtgttgatacctagatataaatgcatagcagatagtatcaaaaagtgaactgaatataaagcagcggaggctgaactcgatgacgaaccaatcttttgaagatgagcaaaatcatcctcagtgatccactcgtcccaatgtctctctaaagtatattgagcgctcatagtgtttccatcaaatccggtagcgacatctagctcggcggatttgtttcctgaagcacaagcaaacagactgggattcatccaggcctcttgcgcaaacctgaagcagaagaccaatgaatgaaaagtttcagaatttcattctcgaaaggctatatcagtttagctagataaacacaccaagagcccagattgacgctttgttgttgtctatatctgtagacactcgatactgcctggtcaaaaggcgcgaattcctccagggaaaccacgctcttctcatacgcctagatatccagcccgacaaaacatgtttgaaaacaattaaccataccgttcgtcgagtgttttcgtcggaaaacagatgtactaacgtctacagcagaacaattggcagtccgataaccgatcccgagacctccgtcagccgagaggatgtcacctatgagaggaacaggcttcatgatagaagctactagacccatggccgagaggacagagctcaacgagaaagaagaggagagactcattgtttttttgctgatgagtttgttgacgaagaagaaagggggtaagagcaccgagaaagcaggggttaaagattggaaagcgggaagagaaaaaggataaagtgagactaggtcttggatggaaaggagtgaaggtatatgtgggggattataa

SEQ ID NO: 2752 - DNA, 44969 bp, Xanthophyllomyces dendrorhous
ggaggggaggggatgaacgaaggaataagtgaaggtgatgaagagaaagaaaacaggatcaacattgctgaacttctggcttttaagacaactcaagtttcaatcagaagaacgtccctgagaagaactaagcgcgttcctttgttgatatgtgttttcattcggatgacgataccaagcctctgaccaaacaggtccggaacgaatgtgtaaaatcataacgatcgttcacagcatcgagagtggatactcgcaagatcagtttctgggttaataacgatatcaacatgagtgacaatgggtggtgtgaaacttgggaagacgagtctcgttgttagcttcggaacacagcatgcgggtcagtgaatcattcaaccctccgatcaacatactctcagcgcctacgggttcaatcatctttgtatccaattcaggcttcagattcagcataaatcccggcaacaatctgttcccgcgatcattctaaccacaagatgaaggtggctctcgacccctttattccttcgagctaagaccacgaatacatgctcgtttcctgaatgtccggccgtgtttcatgattcttgacgcgcacgttgagttcgagataataatgatatccgaagcttgagggaaagagaagagtaggtccagataggcgatagtccagccgacaggtaaagagcgaagagctcttcgcgtcgaggaggtccggagagattcacctccttctgttaagcttgaaatattccgattcttcacacctcgaatttatctgttgaaaccgaaactgttcatccggtcgcttctatcaggtgcgattcagatcactcgagaagaacaaaagcttgatgtcaactcactgactcaaagccgtcgacgtcctaccgtgtagaaatctccagatgtcctgtgagaatctttcatcaactcgatcccatgtaccgtatcatcctccgtttcttttttgtattcctctttctctttcccttctttcttcccgtcaaacaaaattattctctttccccatccgggttcgatatttccaaaatcttcattggcctgttccaaaagctctctgaccttctcgctccttatccctctcacaaccttcacaagctcggcgacttcatcagcagagcaagatggatatggtaagcctgaaagcttatggagtttatgaagagtctcctccggtaacagactggtttcgaaagaactggcgaggagatcattgatcgagtaagagccggtcagagggatacaatcagagtcgactgaatggttagattcgtgagaacgttgaaagaccgctttggagttgaaacgggatgaaacaataatccttggtaacagacaggagcgagatgaagcaaggcgggctaacatctgagcgagatatacgttcggatagtcctttcgagaatgatggtctgtagtaggtaatgcttcaaatgagagaagttgatccacgtggggattcaaccctaacgtttttacttagtggccaacatattaactcttcagccaggtcttcagaacaaccctcaagcgcaggggttcatagataactcagattatgatacatacataaatgaaaaagacagaacaagaggacgagataaacaaaaacaaaagaaggaggcaagtatggaaggaaggaagattaggcttatgtacttctagtccaacgtaccactaatatcaagtaatccgatgagatataaaccatgatacaggtgagaccttattctttttggcatgtcgagaggatcatggaaaaaaagatttactcacataaatgtcggttcgattcgcctcttcttcttcgcagcaccttccgccaccggcttatcagccaaacgctcccttggcgcacctacctctacgcctattcctaatcctataggtccttgtgtcgagggagaatcagatacgtctgtcaacagagacgataggtttctctggccgtcttcctctgctgatcgtttgagtgtccctccatttgcagcgctcgtttccgaggggttttcctctgtctcctttgcatccatgatcagcaggtcttccatcaccacttcttgagcggctggcaggggcactggggcagacaaagatacaggtgccgcaaacgaaaccagcgggacgggtgcgctgtgagtgagggctggggagggaggcagtgagacagagtgggagcttgatgtcgaaagtgtagcggccaaagcctgaagctgtttttggtgctgctgggttgggtgaatcactccgagctctccaggatcgaaaaccttatgaggaaaagagataaagaatgacagatcatgtcagacaaaataaagaaacggaacagcgagattggatctatcacatacgacaacagagcagtatccatctaacgaagataagatcaacgactgtccatccggagacctggttgacaaacataccgtatccaaacattagctagaatacttacatgatacatagattgagaagaagacaaagaaaatcaaccgagaacgaaccaagccagatcggtgaacccagagtaatgcaatcctttgaagatagctaggggagaagtctgctgcgtatcatagagcaatacagcgtcctgggttgcgaccgcaaagtacatcctgtacggtaaactaaacacagcgggcgacattgagcctgtagggggcgggccgacagtattgatttcagacacttcactccctcctccagctatacccgatgataggtgcgatggctccgatccttctgccaactcatctaatcctccttcatccagttctccagacggaaggtccttcaccacgtcaacgttatcgactgttcccagatgaacagtaatatcctgttcgctatgttcgtccaccacgattgtcttcggttccctagtcccagtcccatcgttgaatgtattcaagtcgtaaagcactggactaaacttgacggcgatactggctgttttctgacctgggagatgagcgatcggtgcgttcgacagattggccctcgaatatatgtatactgtcggtctcgaacctgtctctcctaccgcagggcgtcttgctttagaagaaggcacagcagagtcgccggtagcagacgagacagaaggtgagggcgagggtggaaatgatagaagttggctttggatctggccagctggtgtgaggaggagtgcaccgtctggcgagaaagacagtcgtcggaaatagttggtaaatgactcatccccgaaaagcgtgttggatataccttgccttggagtaggggtagaggtagatggaccggagcctccagtcaccgttgctgtcggtccgccactgcctcctggtcggactgccggaagaggggagggagaccgaccgtatctcggcatacctccattcatcctctccatggcagaatacatagggggtggggaagcggccacagaacttgagaaagaatctcgacatgaaggaggtttcattgaggcgttcgctagaggagtgcccggttgggaaattgtactcgaaggcgtaggcgggccaggaagactgggtgcactcgagaatgtagcagccatgacggcggtcgtatcggtggtggtgttaatagcagtagatatttcattacatccatactcagacccctctgtgtcggacacagcagtggagcctcttcgatgaaagtttgggcgagtggatgaggatgacgaagaggagaaggagggtgttcgagaatggtgaacatccatcttctgagtccggctgtatggatgaaactccaatccgttctttgtttgttggatccgatggatatgaaccgttctacagatataggacaaacgattaattctcgttcttctcccctacatgctataaagcggatgtcaaatagactcacctgtcgctgctttgagttgctatgtattcgttcaaaggatcccacgctacaccctggacgtagtgagaatgctcggcgatcaccttgatgcagctccctgttcacatacgaatcagcacgtattgatacgttctgtatgatgagattaagactcgatttgaatcaagacataccagtagtggcatcataaatctttgcgctgttgtcagtgcagccgacgatgaaatgagacccatcgggactccaagcgagatcatagatctccttagaggtaaccctatatcaaggatattggaagagcagtgacagtcgaatgtgacagtcaggaacagtctcgatttcttcctctcagacgggggccagcctatgcagtagacaaacctgatctctaacttccgcttccagaactccttttggccaacctccattccaggagtctctccaaagatggttggcacagctgtgtcgtttcctacgtttgtcttaggaacccagaggagcacaactccatctgagcaaaatcaagtaagaggagtatgtttcagtccaagatcgttcaacatcaatatatagccgtataaacttgctcaaagatctcattcagttcttgtatgcgtaaccatagaaataacttaccatcgcctgccgacgcaaggatctcctctatagttagccaccagaatgttttaattgacacagattgatcaaaagaacaagtttcaatatgctacaatcttattcccttcaggaacgctagaaatgaaagctacagacctttaggactccatcggaccacgttaacagcggcgctgtgtctctgcagggtcgctaagaactcggctcgaggaggcgggaaggttgctgagccagacgtatgctgtagcgtagagctcgagttgattagcgaagcatcagggatgttgggatgaatgagccagagctagacatgttgataaacaaagcacggccaatggtgaattatcggttcgcttgatcatcatggaaagtaaatgtactaactcgaacgtggttatcggctcctgcagtagcgagcttgtagcttcttccaccagcaacaacctgttctttttctttctgtttcccgtttgactgagccgagtttgcactgatgaatcgtttgaattgctgaggtgggaaaggttgaaagtcggaagagtagatggcgttaagatcgtgccatctgatctcgattgttttggatcgcattggttgttatagacggtcctatgcgcggatgagtgtttgtgtgaactatatatgtatatatgagggtgatcagagagatggatgacgatacaaagagtcaagaatgctgttccggatgagaaggaagaaagagagaaggaggtgaaattggttgacttatagaggaacgatccactcaactctcaaccatctctcaaatctaacgtctctgtaagaatgatcgctttttcttggttgatcttctctatgcgaataggtgtagatctcatctgattgtcatgtatcatcctcgctgatctgtttatatccatgaacagacctattgaaaaccatggctcctactgctgattcacttcccaaggcctacacggcccaaggtgctggactccgagtctgtatccttcgagcccgatggaacgatgccatcattcaggctctcgtcaaaggatgcagagacagacttcttgctgccggggttaaagaggaggacattgtcgaggagactgttcctggaagctacgaactcccttttgctgctaaggcgtgagttctttcctatttttttccttttatcatctaaagaaacacagatagatgactcgtcttgatggatctgtagcatcatcaatggatctaacactctttcgcccacgacccttcttggcggagcaaccgatctcctgacctctggatcgagcacctctctctcctcgctcatcaacccgtcgaccccttcagcctcacccaagccgactaagccttatgatgttctgattgccatcggtgtgctggttaagggctcgaccatgcatttcgaatacattgccgagtctgtctcgcacggactgatgaacgtccagattgagactggaacgcccgtcgtgttcggtgtgttgacctgtttgacggacgagcaagcattccaaagagcgggaatcagcaccgagaatgttgacaagaaccacaaccatggggatgtaagccaattgagttcttctggctgaattcttatttctaggtgcatccatatctttctgtgcttcctactaaactttggactgtttcctcttgcttgctctaccaggactggggaaatgcagcagtggaacttgctttcaagagctcgcagtggaagactggccgggtcgtcggcgtctaaaaactcgctttccccgcttcctatagacatgctcatttgatttctcatactcctgaaagggatgggattgaacagttcgttgaactgttgctgggtcacacctggtttctttgacccaggctatacttggccaggatttggccaaaccaggcgtgcgtgatggtatacacgtacagggtcgatcgggtgattaaccggcatgtgtgtatgcatatgtttcacttatttttctagctatgcttccattctctcctttcctatccgactgggcggtgacctaaccaggctctcctcaatatgaaggatcacccgctgcctccctcttgttctgtttgtctctattcttcaccctttactcttcagactgactaagtgttggcgtatggactccgtgcatcctcttactaaccgagttgcgtccaaccacttacactgacgtctccctcaaactgtaccccagccaatgtgcacattttcctcatgcttgatacctcatacctccaagattgactgagtatgtcttttctgtctccagacccctccgatttgggtttaaaaggatggcctcttcatgcattcgttgttcttcattctcccctcatcctctcttctcttccctgccttcaacactctcactctcgctctcactcacattctctctcgattaacagtttactactcttctctgtatcatgctctttcctgccgcctttaccgtagcttgtctggctttggtgaatacccttgtcgatgcttcacctaccgtaacgtcgagttcgagcttcattcatgcgcctcgatctgaggtagaggctcaccagaagaagtccagtcgaatgattcctcttcccagatggttgcaagaccccaaggaggctagttcttacttacctagggacaaagttgtccgaagggcaggtgagcgaccgtgctctattcgcttttgtatatagctgtatcaccttgagatacatgtcacgctaatcacggggtttctatcctgggaacttgcttttgatctttttctcggatgttggaacaagctgcccaaccctcggtctccgctgttccgaagacctacaagggacagatttatgttgactttgtcgataagagttccactgataagtctggttatctttcgtcatacttggacacctttggtaggtctcgatgactcaacctcacaccaaagctttgtgctgatggctagtgtctgggttctcatcatcaggccaatatggtacgattgtcgacaacaagaccactcctctcatagttgacttcaagtaatatgcaattccttttattctgttcagttttgatcgagtgctgagacgtggcttctttggtctgtatgcagatacgggaagaacgagtctaccaacatcgagatcaagaacggcgaaaaagattacactgatcttggttcgtttcgacctcagatgtttggcttcttctatctccagttcacggcgcttattcattttctttctacttcttctgtaggtttggttttggcttatggcttaaagggagcagactttggtcccaagaatcccaagcacgtctctccttttgtctttcaaactcgttctgattattacagactaaccgttactctctgttctcgattgatatctagcgttctggttttggctggagtatctcagcgaacggtccctatcaccggtggatctggagataccctcaagagcactgttgggttgtctactggattcaacctccctgctcaatcaaaagtttgggtgggtgataatgttgttttcaagaagtgtgaaggagacatcttgattccctactggatcgacttggctggtggtccgtttcccttttatctattctttttctcttgtggacaggccaatttcacgatctcacaaaacttctctttctatgtatacagaggccatcaaaggaaaactttactacgtcgagtttgatgacggggagaagcctaccatcatcgttaccagtatgttcaaatcttgcttctcattcttcctcaaataagtgacctttccaacaataatgctctatcttttctggttgaatcagccgatgtcaccctgcttcccaaggaccacgtcaaattcttcgagattgttagcccttttcctcttgatcatctcttctgccgaaagcctaagctgattgcaattcaccttcctcttcaaatccgcaggttctcctttatgtctccaagccggacgtctgctaccctaaggattacttctcaggtttgaattaagcttggaagcaagcattccatagcctatggacgacacgtatctgcttgatctgtctatatcgacttaatatatctctggtggatgaaacttttgcctcctttccgtctgttcgacctctttgtaactttctgtagatcatcttctgttgtgtgatcgtttgatgaccggacagttccctctttcctttatcttctcgttttctctcttgctcttcttactctgtcctttctcgttctccgtatgccttgtctcaagccttcagcgtacactgccctgtcggtggtatggtccgtgttgttctattctggcttgctgtgtatctgtctcttctccgctacctccttccccctccgacctgtatttcctcttcagttgtctcaatgtattggtcaagaccgggccttcgctcttcttcactttccgtctcgacctctttttcatcataagaaagagagaaatgaacaattgagatgaataaactcgaagtaagatgagacgatacagaaaggttatagtaagcacgaaactcgatcgaggaacgatggatggaagaaaggaagaaaagaatcaagggtggagaggaaaagagaggacacggagagaaaaaattggatatctgacaagacggaaagaagagttgggggaggggctatcgaaatagaagaggaggtgaatgagggacgtgaagaagggagaagggaaaggaagggcaagagagcgtccaaggaatggaagctgatctacgtcgaatcgaacccgaactgagaaccaaacccatacctgaaaagaaaccggacccgcaaagaaacaaaagaaacggcgacagaggagtttataaatggaaatgacagaaataacaccttcttgactatatctctctactttatacatcgacttccgacttggcatagaacagaagggagaagagaagaaaaagagaagaagggaaagcattgtccttctctgtctctcctatcatctcccggttcctgatcccccgatccatctacgtctctactccttgctctctccctcaacagccgccaaagtctcgtcctttccatcctcagccatggtctgatcctcaccactcgccggaattccatctacagcaaacgaaccttcggcaggcgcagaattggaaggagccgttgtcgtctcggttcgtgatctacctgaacccccgttgttgtttgcccgaggagggttcgcgcaacgatcttttccgtatgagatcttgagggacgagtactctggtttctggcggatggctttgtgagagagagagagagcgcgcgcgcgagatgtttccgaaaaaataaaaaccgagaactgcgtcagaacaagggaaaattgctatgaaacgttaaggaggaaaagaaagaagcaaaaagaacagaccttctagagctttgatggcgttctgaagagacgtgaagttgacgaatgtgcaccctttatctttgaggtgattgataagctcgatcctaatttcgaggacagacgcggttcagagaatagaaatcagccgaccgcctaccttgcttgataacgaaagaacacgggaagggaaggatttgaacttactctccgtactccgagaagtccctacgcagtcgttcctccgagaatgcatcccaatccgtgatgtttccaacatctgatcggaccatatcgacgcgcccagataagccattaggatctccattcataccagatagacggacgaacagactattagaagagaacaaaaggaaaactaacagatgttccgactagctccagcctgaactgcagccagtgtaggtccgtttaacggtcccgagtgctttccccatccgaccttgagtcttctcgagttgatctgcagcccttggagagtcgcccactggaaaaacgaggcggcgctcgatggatcaacgaacgtcacgaactagtttattgtatgtcgagggtcatgtagttcatcagcatccttccagaacaacaagttgaatgtaaggagatatgaagagacacaacagtagtacttacagcaatgtgtttatcgggcatgtatcgaatcctatgatccacgaggaaaaacttcaaattcagtatcccaacggaggaagactgagacgagggaaggagaaaagtagaaaggacgcactgagcaatcattccacccctaatagcattacaaagctcctcggctgttgtttctgggtgaaggttacccatgtaaatctatggggagaatgtcctaggttaatcccggacgcactgtagaccaagaagtaatcatgaagagggagacgggaaacgaaccgtcctgtttccggcttgagaatgtagcaatcccaactgtccaacgtcgccaccctgtccaaatgcggcagctccaccggctccgacgccaatcggtccaaatccgggaggactaggaccaaacatgaatggcgagttgttgatgggcaggccgacggccgcttgggcgtgtgcctgggcggcttgaacagctgcctgctgagctttcggactgttcagacgaaaacgaatgtgtaggcaatgagttcgacggacaggttccatgagattaaaggaaacgcgcgagatggagactaacacgtaggcacatcgatcttttccgtagttaactcgcttgccctgccaggccggctcagtgggaagcgtgttgacgacctaagaaaagttcccatcaacccaatatgcgtgaattagtatacttcgcaaatctccgacggtgcacgaaaaaaccaagaaagatggaaaggcaagaccttaccttcatagcagtggcaatcgagaggaaatgaacaaagccgatgttcttatctctaacaatcttgacctgatcgatgggtccgaaccgtccgaggtcatccctgagcgagctctcgtccacgcttccctcgagtccaccgacgtagacgtttctggtagcctggctctgaacaatggccatagcgacctgacctggcagactgcttggcttaccccacccgatcttgagttcttgaccgtgaagggcgagcttcttgaccgaagcatcggcgtggaaagcagcggcggtggcaccatcgaggaacgagataaacacgcaagacttttcggggagtaatctgacgcattcgatcggaccgaatcgaacgaggttgagaagctcgtcgaccgaagcatctagagagcagggatgtaaaatagaacgttaatcatcagaagacaaatagagatggacgagcgaggacaaaccagcaggaaggcttccaacatagacggttcgacctgtttgattgttggcagcagcagctgatgatcggaaagaagggggtaaacagatgtcagactatgtttgtctccatatgagatctggtacaacaaccgaagacataccagcagcggcagcagcagcggcagccgggcctatccgaagttttcaagtccatcaatagaaagtttaaattagctatgctgcacgtgtgcgctctggcaccatggccatgaagttgagcggcgggacgaaccgtagtttccagtcatctgtacacatcgaccgagattttttccgaatgagtatctgtttgaagcttcatggggagaaaacaagataacgagacgaagagtaaactcacctgggctggattcattcctcctagtcttggctgcccaggctgaccattagcggctgctccgggtccaaacaccgggccaccattggacgcggctgccagtccattcgggttgacgccgacacccatgcctgcggccattccgaggatttgctgattctgttgttgttgaatggcctgaatctgggcctgcatttgctgttgtagctggagttgctgctgttgttgttgctgttgaacttgttgctgctgttggggaatggaagatggtccaaaagggcttaggccggatccagctaagccaacggaggatagcgaatcaaacgcaggaaaagaatgcggggcggagggagaggtagacatatgggaatattgttgttggtgaggatagagatgggtcgatggaatagagggtgaggtctggttggtccagcggggtttcttcgaatcttgattaagggtttgatcgagaagcgttctctgaagaacgtgatggaagagaatgtataggcttcagttttggttaaaatcaaggtatctcaaacttgaggatgagtttgagagagcaggcagttgaaccgcaaaaaagacatagcagaaacagagatggagatggacgtgcacagagagagaagggagaaacaggagaactctagacagaccttcatactatcgttgttgtcaaaacccggagcgtgggtcaggtggaaaccgtttcctccttgaaggccaacaggagtcgggtagacgtgttcaggcgagagttgagaagaaggtagcggtgatcgttggatgtgaaaagggttcatggtcggacaaacggtgtagattgtcggagatggaggaagaccaggttcgaacgcaaaagatggaaggagcagaatgagagagatggggagagaacgaagaagggaacgaaggcggacggaagaaacaacggccggatagtagatgtgttcacacgcacagaaagcaagaaaggagagaagggagaacaaaaaaaaaccgaagaatataagccaaacgaaaaggaagatcaaggagagaaggtcaagagaagaaagaagagaaggccgagaggtgagatggaaagcaaagacgacggcgacgaagacgatgacaacgacaacgacaacgacaacgacaacgacaacgacaacgggtgctgaagcgaagagacagagatgtctggaccaaggctgaaccgtgagaaggtgaaggagatctcggaaggattgagtaggagagatgtccaggctcggatgaccagcaggcagcgagtcgactgaccgatggataaagatgagggacaacggatgggcagatacacacagagcacagagaacagacacacagatatacacacacgcaaacgcagagcacactcccaaagagatcgcacagggagagcgatggaaccagatgaaaaagaagggagagatagaagagaagagagaaaaaaagggagagagaagaagaagaagatagagaagagaaaagaaacggatttcggagcaaaacgccttacaaagatttgaagggaacgagtacgaggatgtgcaagaagactcgctatccgacagagaacagtctacaaggataacgacttgctggtgttgaagacgaagggaaaggttcgacgagctcgatgaacgatggggtgtatccgatgggaaggaaactcgaccgctcgtccaggcggaaggcgagagaaaatcggtgagatggcgattggcaacggccgagcgtattggaatttctaatcgttctaatacgcgcccagtttgatttttgtagtcttttgctggcctgccgtccatctggtcgatagcatgcaatccgttgatcttggatggcatacctgtcctggtggtcaatctccggcctctttgtacgtatagatcgctcttcggaagatcctctgggtttgggtgttgtatttttcggcgtgtcttctctggccatcgcatggctcagccagaccatcacacaaagcctatctggcatttagatgtgtcagagattcggccatctgtaatatattttagacaaggcctacatcatggaaacccttttctttgcccttcttgctacaaaactctgtttgtcttgttcataccgttctcccaaccctgggaacgatgagaataacggacgaactctcagagatccaggcttgaccctgtggggacgcgaacgcgtcgagttcacatcacgcgctgagacgcgtcgtgcatctctcactctccgaggccacgtaggagtcttcatacacccagcaccaagctgatcagactcagaacacagtgtccgctcaaatgaacatgtatgagacgtgttctgcgcatctttcatgcttgttctgtctgggttgtggccggaagcttgactggttgatcacttacaactgagatcaacctatgtgattctgaccaatagtcttctttgtagttactgtattctttatagtctgtgtagtgaaccgttgtagtcctttcggtcaattgagatatctcaattcgactacaaacattttctgatcccaactaccgacaaatcctaatgattttttttgtctcagttcggattcgctccatctctcttttccgcctttttacatattcatctcccctcggacaacaccatttttgtctcatcttgtcgtacatccccattccgcgtctttttcccgtatacaagcacctcactaaatggatctcttctcgaggtccttcctcacaaacgccacggccgcttactcggctctccagggaaaccttgcggcgacacagacaccaaatgatactattacaaagctcgtcgaccggcttgcaaacgcaacactcgccgaagaccgtcgggccagtttgctcgccctaaaggcgcttgctagagatctcaaacaagacgttggcttccaggcattcgatcagatcaaacaagtcctcacttctcctgacgtccatcaagatattgagatcgccaaggcctgtcttgaaacactaaccctgctctgcgagtcggacgacgtgcaggccacggctgccgaccaccccaaccctccccagagatcggtatgctcttttacttctctatctagtataacccggttctctcgtgtttcttattttctttcatctgtctcatcttctgtcctcttctctcaacaccggtctgctattcaatccgttcacctgccctccctttctccctccctccttagcaaaatcaacaggatgtcggtctcgtcctgaccgtccaattcttggccgaaccagaaccgctccatgcgctccttgctctgctctccgttcaacacttctatgttcggttcttcactcttcaactcattcaggtccttctccagaacagtccggagaaagtccaagagtacgtgctcacctctcccggaggcgtccgaaccgtgatggagtgcctggaggaacgaagggaggtccttcgaaacgaagctcttcttcttcttcataatctcattgtcaccaacgctgaccttcagaaaatcgtcgcgtttgaaggcgcgttcgagagactgtttgacattgtcgacaacgaaggtgggatcgaaggaggtgtcgtcgtccaagactgtctcgctgcgatcggcacattacttaggtttaacagttccaaccaggtttgtcctcatgtctctttcacgtgaaactgtctctggatcaacatatttggtggtctaatcacctctttcgtgcactctctctctctctctccctgcctcatcggcctttggctagaactatttccgagaactctcccagattgctcgccttccgcctctactcatgtttccttcgcccaatccttccctttcatccccagcgccagataactttgcgctccagttctggccggaacaaaagcttgtaaacgccagccttgtcgttggtctcgtcaaactcatcctcggctccggtggctccggcctcggaacaaatcagcttgcaatgctcaactcgggcatgactaggtgtttgatcgaattgggcatggcaagtaacgcgccgatcttgctcaaagctcaggtaaatacagatgaaattcctacgagagtctatatgcgtgcgtcctggaaggaagaagaaggcaactaaacttttgggttgtttcatcacgttcccttcttaggctttctccgcattgtctgccatccttcaccactcccctcccaaccaagcactgctctccgctctccggaccaccccattgctaacccttccgcctgaagatcctactcaatctgtcggctacaccagactctcccttcgaccggcgacgtctatcctgatctcactcgctatcaatggagaagaagacccggccgaagaagttggtctcactaccaccggcagcgtcggtggaggctggaaagggccagggttgaagctcagaaaagcagccgtggccgtctggacagcttatctcagcggagggcttgatggaagcagagacacaaaagaacagatcctccgcggtctacagaccgtcggatcccaacctcagacaactctcggtagtcaggatcttcccccacctccgaaagctgggagtgagtaccacgaacagacttccggagaggccaacgaggaagaggaagaatctgcagaatcattgttgttggccgctctgtccgaatttccggcggacggcgagttttacgatccgtaccgacctacgttcgcttcgttgatctggcaacggctgttgacaaactcggagatcgccaagaaggtcgcgagggagatctcgttctcttcaactccaccttctgagcgacctcccccgccaccgccctcggtgcaggcagctcaagaaaagactgacgatgaggatgaggacgatagagtcagcttggtccaggtggtcgtcggtaacttgatgatggctcttcgagaacacgccgaggctttgaacagggaggcagccgcacatgccgctgccagagctcacagtaaatcgaaatccagaccaatccatagaagattgtcctcgattggggatggagaatcggctgccaatggggacgatgccggggcgaacgatgcggcagcaaggaacggggccgagggcgaaaatcaggtaatgaaggccagagattgggatagggccatggtcggctggttgagtctgcttagcgtttggttgtgggatagtccgggtactgtcagagagttccttagtgaaggtgctagcgtccaggtcgtgcgttcattttttttttcaaatcgattgatacacccgagatcactgccaacccctttcttcttcctttttacatccctcccctctgtcttacagctcatccaaccgataactcaaccatcagggatcgatcccctccttcagggtctagcagcattcctccttggggtctgctatgaattcaatcgagacccgggcgagatcacccgatccacccttcatcctattcttcacggtagaatcggaccagatcagttcgtctcccgaatggctcggttccgggaggatcccaggtttagagctatcggtccgacagacagcgtggacgaggacgagatgctggttggtgtggaggtcgatacgtcagccgctgtaggcggcctcggattggaaaaagaagacataggtgattggtggttcgattgggaatttgttgaattttggaagaacaattactgtccgttgtttctcttctacttcttcttcctactatccttcatgtcttgctttctttcctttggagagtcttttggacccctgacagatcgtttccaatacattgaacagatacaattcagagatcaatcaactctgcgcctgaatcaggctcgaaacaaaatgagttagatgccgacacggccagtctcatcgcttcactccgaaaccaactgagtatccaacagaccgagctggcagatgctcaaaatgaattagctactgctcgaaaggagattgaacatgaggtgagaagatgatcttccaccttctctcttttccgcgctcatcattccttgctgacgagttatcccctacctctcacgcattcatagcgaacggtcacccaagaagagattgcctcgctatcgttatccgtctcaactctgactgcttctctccgtgctgcagatgagaagaacacagaaaacacgaaggaacaagaggatctcctcgtgctgttagaggagcttagtgtgaagaggaagaaggataaagagagattgaagactttaggcgagaccgtcagtgaggacgacgatgaggatgaggacgacgatgacgaggaggatttagatggagagcaggaagaggaagagtgatctgatgatccatctgtttcttggatgctctctatcgattgggcttctattatagattctgtaactatgtcctactctgaccacaaacggaagagagcacaagagatgtgcctgtagagacgcgtgttagatgacgcgtcgaaagcaaaatgacgcgcgacgcgacgggaaatcaaaggaaaataaagaaaaataaaatatagagaaactcgatcaacgcccaggacttatctctgtttgaactcctgacacaccgacaaccttcttgcttctaaaccgactcttatcataccttctaattggttttacaagatggacagtcagtacctttgttaagtttaacacctgatatatagtccgcttaactctttgaaccaccttctttcggacggacgttcgcctttcgtgcgcttcctcggttttgatgttgatgttgatgttgatgttgatgttgatgttgacgttgtcggcattgaagacattgggagtgatcttcctctagtaagtctctcttcttctggttcatcctcttttcaaaaagttttctatttggtacaaatcggacgcgctgtgctgatgtacaaagctgatgtggaacgcgattgtagctgcaagatgatctgacgaaagaccggatcagagtctttcaagagtttctcgaagatgaggttcgtcctttgttcttccctcttttctctatttcttttccttcgctgactctgaattatccactcgatcgatggaaaatttaagaacccaaattataattatcgagatgaagttctaaggatgcttaggttggaacaggtccgactgattgtcaatcttgacgatctacgagattacaaccgggagtacgcggatgggttcgttttactcctcatccctcttcgtgtctgccgtttaggaagacgcgtcttcaacaaaggaggtatcacgtataaacgcaaaaagcttacggtgtttgggtttgatagtcttttgatgcaaccctcggctttctcagcagcattcgatcaggcgttgctttcgctcgtccaggccgttcacgaccctctaaaagatgagatttctggaaaacaatgtatgtatatcaaacgaaactgacttcttgtccttaagatttttatattgaccctgtccgaaatacttttgtcttttttcagtctacgtcggtcttcgaggaagtttcggagagaaccacgtgaacccaaggacattaaggagtgctcagttgggcaaaatggtcagcttggaaggaatcgttacacggtgtaggtccttatcatttctgttgatctgaaggatctcttgttatgctctgtactgatcctaacaatcggtctgtccatgggcatatatcactacgtgtgtgcgcgtttccaggctctcttgtccgaccaaagatgcttcgttcgattcatttctgcgaagacacatccttgtttcacacccgaacctatcatgactccaccacccctggcgccccagccggtcaagcgtcttcagtgacaattcctaaagacgatggagatggtcatgccgtcacaatggagtacggtctctcaacctttagagatcatcagagtgtgagcattcaggagatgccggagagagcgccggcaggtcagttgccgaggagtgtagaagtcgtattagcagacgacatggttgacaagtgcaagcctggagatcggattcagttggtgggaatttacaaaagtatgggtggaggtggtggtaccagagggttcacgtacgtttccttcgttatagtcttctctcttcattttcgatgtaaatcttcatgggttctaatacaatctttccactccaatcttcagaacatctttgttagccaacaacgttatcctcctttcttccaagtctggaggtggtattgctcaaaccccaatcacggataccgatatccgacaaatcaacaagctctctcgaaagaagaatatctttgagcttctctcgcaatcgcttgcgccttcaatttacgggcacgactatatcaagaagtctattcttcttctacttctcggcggaatggagaagaatttggcgaacggaactcatattcgaggagacatcaacatcctgatggttggtgacccatcgacggcaaagagtcaaatgttgagatttgtgttgaatacagcgcctttggccatcgcaactaccggaagaggaagttccggtgttggtttgacagcagcagtgacaacggacaaggatactggtgagcatgctcctcctcactgttttgatcttcggtacaaacgtttctgaggacatcttgcaactcgtctgcgattcaggtgaacgacgacttgaggccggagccatggtcttggctgatcgaggagtggtttgtatcgacgagtttgacaagatgtcagacgtcgacagagtagccattcacgaggtgatggaacagcaaacagtgaccatcgctaaagcaggaattcatacatcactcaatgctagatgcagcgtggttgctgctgccaatcctatctatggacaagtaagcgctctttcatatttggcggtaaccagttcttgcactgtgcgcaaaagttgcccgggtttctgattcaatatatctgttccttcagtatgatgtgcacaaagaccctcacaggaacatcgcccttcctgattctcttctctctcgattcgatctgctgtttgttgtgacggatgatgtagatgaacagagagatcggatgatttcggagcacgttctcagaatgcatcgatacttgcagccgggagtcgaagaaggtcggtttctgatatatattctcgctccaattcttgaacactgacatttgagattatatctttcgtgtataggtacccccgcgatggataatctcgagcagcatctagatgtcggaggggagtatgaagaatctcgtttagaaactccagtatttgaaaaatactctgctctccttcatggaggagtcaccactacatccggccgagggtccaacaagaaaaaggaggtcctctcgatcgccttcgtcaaaaaatacattcagtacgcgaagaaccgaatcttacctgttctaacgaagggagcggcagatcacattgtctctgtctatgcgtcattgaggaacgatgacctagcgagcaacactaaacgagtaagatctcttcttgttcacagattgtatctgtttccataaattagagttagaagactcagactgaataattggctctggctgaaataatttgtagactgctcctctcaccgcccgaacgctcgagacactcatccgtctcgctaccgcccatgctaaagcccgactatctcagaaagttgaggagcgggacgccgtagccgccgaggagattcttcggttcgcgctcttcaaagaggttgtcaagcctgttaagaggaaaaagcgaaagctcgatcctgctgcgatggctgttgattccgattctgatgacgatgaggatgagtcaggagacgaaacaggtggaaggccaagagatggaaaaaggatggagcttcgtggatcaactcgacaagcttcggtaatacccgaaccctcaacatcatcgtcagtcgcgactcgggccgaggggagagaaacatcacctgcgaaggatgcggatcttgttagagaagaagacgaagaggatgaggttaatgtagatgaaatcatcgcagagaatgaggatgaagaagaagccttggcggaagcagaagctgctgaagagaaggctgccgctgtcgtcgcctcccagaagcaatcaccgatgagctcagcgaatgaatctcaggggggcgtggtgtctcctgaacggttcgtctccgccactttctctctttgatctccttttacattgaataggtatattaacaattggtcttatctatccatgcagactggcgctcttccgaagtcgactcggagcattattctccagtcaatacgctgatgaagagttcgtacaattcgacgatcttcttccagaactgaacaccggtctgccgccgagtgactcttttggaacgtctgaggccagagctatgattgatacaatggccaaggacaatgaagtgatgttttcgggagagtgagttctgtttttgagattcgattactctcctcgaattttgtttcgctctggaaaagacaactgatcgtgactttgaaatcttactctcatagcattgtatacaaaatctaaagcaactcactcatttcttccttgcgtctgcatccagttttctcccttcctctgatagctgttacccctttatgcctcgtgcattagataccttcctgttctgcttatctcttcttgattatactggttcagtcttctcatttgtatatttagtatcttcgatccttctctcttatgtgcagtgttattccatctttattccaaagccgaaggattagtgcaaagaagtatcaaacatatatatatatatatatcaatcgatcgatggctcgttacaaaaggaagatccgatatctatcagcaatattacattaaacgaaatcatttggaagaaacaatggcagtcgccgtcgccttcgccgtaggagatcctgctggtgcctcgatgaaccattcaaccgtgggcttcacctccaagggagaaaaaatcgcagtatcttcatcagatccgacaggaagtgtatctttgtccaatcgggtcgaattagaggacgccttattgacgcgcgcgataggagcggacatggacgattgtcgtgggtgtttggatttccgtttattgcacgctttggttgaccgttgaggatcttgagaagagacagttgcagattcagaggggataggcgagttatccattctctcgacgcctgttggggaaggataggacgattcgctagaatcaggcgtcgatgactcagaaggaaggggttcgaattcgtacggttgatcgctcgatgtaggcgagggtgtaggaggatcaactagagttgggttagcaacgacttcagtgaagttcaaaggggtgaaaactaggaccacagcgtcttgatcttctccaatgagagtctcggaagtgaccttcacatctcgtttcgagccttggctatgatacatcccgtcatcataagttggatcaggatggtacatcccatcgtcataaggctccgatgcatcagaatcagaatcagagtcggagtcggagggggttgaagagggagcttctggggagtccgtcggcaatattgtagagtttgagacaggactagccggaagaagatcaggcgatgtcgagttgaatatgtcagtcgagttgaatacatcagtcgagttaaacacatcagtcgaattgaataagtcagtcgagttggagatgttggtgaggtttggtaaatcaacagaatccgccagggacgtgctgttgttcgactgaatttcgaccctcgattggtctagcgtatcatccacccatttaggagaaactacacctgacatggtgttgtatgtgaacgtctggcatgacacatccgagttgggatctctacatttctcgaccgagatagatgtagatgcggctaaagattttggatcgaatgtcgcacagtaagcgacctaagaaataaccagcccatgatttgtttatgatgaaaccgatagtcagaatgtgttcagtttcggagtttcgataacatgcgctgagaaacgtaccgtatttgcagactgagcatcaaagataggaaacttgagaaacacttcgagaaccgactcatctgaattttctgaatgcagcgaagtagacggagatgagtttgacgtcaccaaatagactctagtccggattgtgttggaagcattgaggatgaaggaaggagacttttcgtcatcatcattgtccatagccgtcgtgttggatgctgaaagaacgatggacgcgactcgttctgaggcggaagattcagtcacaggcatctggatcgatcacacatcaaggatgttagcgcgaagcgggagtgaaagatgaattagtaaaagctcaaactcgtaccatgatgtcaatgaagcctgctgagccttcagacatccaactctgatctgtacgccttgacattcggattgacgccggagagtgacgaggactatcatcctgataagcagatgtcagtgtagtgtagaagatgtgaggaaaaaataagagaacgaactgagacggtttgagttgacacagcatcttgtcgaggtacaggaaccgctcgagcaagagataaaagcgcccagaatacgatagcaggatgcatatctggttaattgataaacgatggaagggtagaaagttcgattaaagagagtgattaaagagtgggttgattaaggaaggtaaagatcgagaggtccagcctgtcgagagaataaaaaaaataaaaaggaaaggatagatgatgagagaataacgaagagcttgaaagagaaggtatcggtcagcataacgctcttcttatatcgttccctgaagtcttcccgtcttttgagcctaagtaccccgaacttcagccaaacagcgggtagagataaaaggatgtgaacgttcagagcgggagaagactcgtcaatacgtcagtcatatccgcatttgagtttaacatcatcattatcatcgcctcttcccgtttttcagtgaaaatgcccgatgtaatggaaagaagtatcgaatcagtcagcagggtcctgctaaaattaagtgtatgaagcatggtcaagtctacgactcaaagtaagtgtatccaaagtttgataggttagtcgcttgggtgatagtaacaaaatgaacactggaggctgcatccgcattcgaatagcctgagaacctcgactgcgaactctgccgaaatcgcttgataaacgatgagatgccagccgctgcttttggccttcttcaaggcttttctcgtgtgggacatcgaccccggaatttgatctgaaactatgatatctctggccaataaaactatatcaatacacagacatacagaatcgattaaaggtaatcttcttcatcgcagaggctgtataacgcggcatgccattatatgttgagaaatacaatatttacaaagcaacagcaatcagatacacaattaggcacacagagaaggaaaacagtttaaaagacagatatagattcgtggtatctgaccgatattatagaatatggccttcgtaccaaaaaaaaaccagactgctgtgaaaggttgagacaaccgaggactactccactctaaaaagcttcccactatgggccaaaaacgttgcgcaaagctcaacttgtccttgaatctgttgctctaccattgacttcgtccccgatatcgatcctccttcgtcgctccccggtccctgagattcccctccagatattatctgacctgcttctttagccctctgagcgcgctctttaaggaggtctaatgcaaattgaacaggcacgtcgatcaaagggctgatcgccgctagacggagatgatgaagggatgagattgtttctagtgttgtcgagatggatgtcgttgccgaactagaacggtgggacagaagtgcaaaatgaatcaagattcgagagttgagctttgcgagccaggtacaaaggaagaaccacttacagagcaacttcgctggcgtggtcgtcgggcaaaatgctaggaggtaacagatcctccgaattcaagagagcactgccgaaccggaagaaaggaaatttccttcagtttgtcgtctgctcctcattgcacgattggaggatattgagacatgaaacaggaaatgaagcaaacacttacaagaccccttgaacccatgtttctaacaaaactttcttcccatacctcacgctttcaatcttctctctcttcccgcctgcctggctttggtccgtgctcaaactcaacataccaccttcagccttcatctctccccaaaagtcatagacccctttcaagacagcccctaccgtcttgctagcttcgttcggaacgtccgatcttgtctttgcagcgtgtaagattggtaagagcggagtgaggagggaaaggagatgagatatcgcttgaagtggatcctgcgcgggtgcaggatgtgaggctggaagaatgggaagaagtgtaatcggaaatatcgatggtcgacaatgtcggagggagagaagagttgagaggatgaaaagggaggcaatgagagatctggcgcgtggactagactcaaaattctattaagagacagccggttcagtaggcgatcccttataagagttttaaagacaaaccagggacgaactatcgagtatatttcaagattctctgctaatcgtagtgctagatcacaccagatccaagcgctctcgttgtcttctgaaaagctctcgctccctgttcgcgtaaagaaacaaacattccgaccaaagagcttgatgtcagtcttcttgacttgtttcttagaggtagacggaaaacttgtacgaatgaaaaggatttgggtgaatggacgactgacaggcgatcaaacaactagtctcgagacctttgatcccctcctcatttttaccagcaaagaacgactcgattgctactctcgctttgacaagatgtagatatcgtttcgagagagctattagattaccgttcgaagatgatctaccttcgtcgtcccatcggatcaacctcgcgctgtttttccatcaaagaggaagcaaaaagaaaagagaaacagtaacggtcaatcgaaacaacctcttttttgtgggaaattgaatgggaggcatactgaactcacccaagagaccaaaccaccgctctcgcgttctctcccagcgagtctagattgtccgaggcccaaggcaagatccaacctaccgacttcttgaatgtatcttcgaattttgaccggtcttcatccttcccctgtgccgggattttcaacaaatcgatgatcggtccggtagaatattcgttatacacaccttgaagatgttgtctccgatgcagaggcacaggtggaggatccatgggaccgatgttcttccctcctgcgttgtaggcaggctttacagatgtcgttgaggatgaagacagagcgggtgaagttgaacctggtactgacaaagggcttctagactttggcattattttatcgttggatgggctccatggttgaaggaggaacgctaggctcgagattgtggactttttattataaggtggtttcttaccagacagggtcgaagagctctgcagtattctagattgggacgctccgattaaatcttttcctcctcctatttgtgttgagctgtcaatgatagagcccgagctagagttggaactagactcatggctggctaaatttagtcgagatgtctgattttcgggcaaatttagagctcgacctcttgacctatctgtcaagttcgtcaggagcggattttggaaggtcgtttcagaaaaataaccaacattgggagagaaatggctcggaagatcatctcttaggatcgaatatgatgattcaggcatccggcttttggacacaaagtgaggcggcgcggttgaggagtggacttgagagtatgtgaacgctgatccagatggattgtctcgatggattgatgagagttcctcagaatgaggtgtgatgtagacagacggtttgtcggaagacacgatatgatcgactaatgtcgagcgagaggtggagacgaatggttcagaggcgctactgattgagttgaaatttccccttatagaagcatagggcaaacttgccctgatgctaggatatcgctgttgatattcctgctgttttgtggagttcgacatgtttggaaatgataacgctcgccccttctcgctcgatattttgcttgaaagtagaccgtctacgcctgcttgaaacaacgatcttgagttcagctcttcaatcgccgaagacgagtttcttctactatcaattgctcctggtactccaacctggaacttcgtttcaacgtcagttgcacctccggacccgaactgagtgtggtagtgagcaagatggttactcgtcatgcttcctgtcgacctagatctcttccgactgtaagctctttcagcccctaccgaatctacctcctccatgacagcttgctcgtcctcgcgtgaccctgtaggtgaggacgatcctggcgagggcgaatgtaagaaggacgcttcatgactgaaactagctcgtttccgtcgctgtgtagttggtggtaggttatcgtgtgtgtttgggtgagtaagtcgcccagaagatgggcctgaggtggtgttatgctgagtcgtatttggatatagatgagagaggtacggtatccctcgagtttccgaactttgccatggttgttgatccagacgttgagatcgagggtaagaattcaaaacttgaggtgaacttcgtcgttgttgttgctgattatgaatgacagcagatggatgaggttgtccatttagttggctcgtgggttggataggtttggttgaactggaggtacccgatactggcgacaacgacactgttcttgttgacacatcaagatcagacttccgtggtcgtttcttgggaggaatagtggtgtcgatcatgatatcattttctatcttttctcctcgggcgttgggtttcagtccagttgaagccgtccgaccttgtgagcttgcttctacttctatctctttggtcttccttggtttcgtctttcttggctctggcggtttctttacgccagacgtcatgtccggaggcaataacgagcatctggacagatgaaaggaacggggagaaagcgtctatccgtgtcaaactcctatatcctttgggaatatcttccttgaaagatactcactcttccccatagagaatacaaggctcgcatggtagtgtcgcattcgcgcaaccgatctttcgctgaagtaaccgaagtgtttacaaaacacgaggcacattaaagtgatgtcaatggaatttttgatagaagaatttatggagaaaagatggttaaacgtacccttcgacatgaatcacaggaggtaatcggacggggcttccgttttcttcgatttcatcattccaacagatcgaagcgatcgttctacaggtcaaacacacttctgcggctatgatcggccgaatgaaaacttacttctttctgttgatgtcgactttagtgtttccgcctgtggatcaataccaagaggaggatactcagtgacaaatgataccgggagaagaattaaggggagaagatggaaaaaggggtataaccttcatcaaaagtaacctgagatttaagaggatgcattcaaagtatgatattcagattcgttgggtatgtcaattccgtttcagtcgtgcaaatgtatgttcgtgcgtatttttgtcatcagtgtttccaagagagagggacgttgtgcatcccatccaacaatcgtcgtgtttttcccgggaaaaaatgtgatccaattggatatcagtcattctattcgtatgaattccaagaccatggacaattataccaagcggagatcacaggcccgtgtcagaggaggaaatagaaaattccggacaaaacggacaagacttacgttgacaaacttgaagttattcactctggaactggtctggttggctctgtccaggagattgtccacagatgtgctactctcactcatttaataagatgagaggatgatgggataacgggatgatgggataacgggatgatgggataacgggatgatgggatgatgatgggtctaagtgtgactgagtcgtccgtccgggatacaagtgctgggctaaacatatagttctgccttgccggatgagccgggccggaattgatccggacgttatagttgtatctctggctggagtttactgcgattatgaccgaagattccaaccaatctgtatccacacatcttgacgtccagtacctccctctgtccatctttcggttgtttagccttactctacccctggctttcagaacaaaggagcgtcgcgggagaaagatgagaacaaattgtcgatgagagactgggcgatcgggtggcatgaagctgtttgataatagttgatgcatcagttgttggaggtgcactatcgttcaaccacagctattctagactaatctgcttcgtatgaatcatcagttacactatacccattctgtgcatcacgaaggaggaccagtacgtgggctcggcttatgaggctttctgaaaacacgaaatagcaaaatatctacaatttggttccaccagaacgcaccactatcatcgagcgagggagaaactatactctcagttcgtttcttctctcattctacatacgtcagcttgattcatccgaacaagtgaagatcggttggatgggaaggagaaaacgaaaggaatcaggactacctgggcttcttcgatttttatcttatctcatgccttgatgagaagaagctcttgcttacttaatcctgacctcaatcacttacgtaatcaggccacgtatgcttacctaatatattcatcatctcggtgtcgattcttgtgggcgttcccaacgtcttgaccttagccttcacatactctctcgatgatacaacctcgttctactcatctcgttctctcccatatgtgggccagatcagcaacgtctctcctcgctaccaagggctcgctctcttgctcctcatctgctttccagtccttccttcgtcgaccacctccgccggctatccgccagttctctcttactccttccctgttcaatagactcagtcgaccactcaaaccgtcccggtatgcttcccgtcaaccacacccgatccaacaacccttaggttctgtgggggcttctcctgcagctgatagaactcctattggaaggattacgcccacaagagtcagtgctgccgaggcgatcgacggaggcggccgtcatacccgggagggaagcctcttgaccgagcatgaattcgatgggtttgacgaagaaggcgcgagaagctccagagaccgaaacgtctttcgaccgttgattgtgagctctctttccttctctcgttttcgtcgataccagaagaacaacttcttatgcgtgtcggtacgtgcatgcaagaattaaggaaactaactgatgaaccaatcaatcgaaccattgctatcgtcaccctgtcgcctgatttgtaaacccgattgcagtggtcactcgcagtagtaggcggtgtctacgtgggcgctgctctcctcaccaatgcggacaccgatctttgggcagaaaaactcggagctggctctttttggagacgaaatcttcccagtcagaaagaaatgatggacgcaaaacggctggaactcatgagggtttgttttcttctgcctttcttacccccttgctgtctttgctgtatgctaataccatctgttcctttgcacaaacaaacttacagagccttcaatcgacagttcaatcactccaacgccaagtggcttcctttccagatgtcttcaagacactcattcttcagacatacgtctccgtagccgagtattggctcaacacatctgaagccaagcggttcgctaccgtcgtcgtcggagtcaacggcttaattttccttgggtttaggtcacctaggctcaaacataagatgatggaagctttcaggcatacgccatcctctggaaagagctacactttgctcacctcggctttcgcgtgcgtatcttgcctgattcaacagtgtcttctttcttatgcataagcgctgtggtactgattgagcttgaacctgtttctttctaactgtagccactctgagttttggcactttgggttcaacatgtttgcgctatggtcatttagtaagagtttttcttttctgaaggatttgtcatttggccgagcaagaccataatctcgatctcttttctacttccaacagtgccatcatgctacgcgttcctcgtgcatggagatcgacatgcgctctcgagcttccctgggatggcagaatccacagcaatttatcatctagccgctttctacgtcgctggtaaagtcctttttctttccttcaaaagcacgatgtaaactcaaaggaactgaacgttctttctctttgaaccgatatcttctctacaaagctggaatatttgcctcgctaggttctcatctctacgtcaacctgttcacccttcctcgattcctctcatccctccgacaatcagccctgcttcatacacctctcccccgtttatcccttctggcgttagcccgtcaaacaggcaacgtcccaactctaggggcatccggtgcattatacgccatctttgctcttagcgcgctttctttcccccatgccagtgttggagtcatctttttaccattcgtctcgctgccaatcacctggggtttcggagccatgatcggattcgatatccttggactcatcagagggtggaagatgtttaaccatgtggcccatctgagtggagcgatcttcggagcggtctattggcgatacggcgttagttcctatctattctttctcctctgtctttccccttgtttcgttagccctctggctctttggataatgaaccattctaactttggtctccgtctatgttttctccaaagtgcgacctttgggactggctaaggatgacgctctcaaaccgaccggctaagcgaccggccgtttgaaaatgatgattcatagacactaatcgacgacagagtagtatgtaggcatataaatatattaaatgatcaacccccactcgttcaggaagcagtcatccatgcgtgttttgctcaagagagaaaaaagaaagaacatcaatatcgtggcttgtatagaggaggacttcataacacaaatctggacacgagctatgggtggactcaagaaaatgaaaaaaagacaagaaaatatctcaaagagcctatcgagctcggcgacgagaatagttggttctgcctttgacctaatggaagttgataaacttcgactcagcaagtgacaatagattcgcatcatttggatataaacacaaacagttgaggtggccgaggtatctgtagatgttgcagggccaggttgaccggttgtcttacattgacaagatgttgatgcaaatttgaagttctgccctgagtttctttggatcaagctttcaaaaaaaagaaaacaggctaaccttggcccgcttcggccgactctctaaggttctgttagtttctaactctgcccgctttccactctgaaggccggcggatgttagcatgttgtcagctgtaccgacggccgttcgatccaaggggcttgtatcagtagcggtgaagaggtcaagactcttgcctgcggaggcagggaacaaatgagcgtgatgtgtttggatcccatcctgatcgtcttcgacatcgttctcgctatgttaggtatcagagcgtaaattcacatcagttaaggatctaatggttcaattatatggtgcgttgggcgtacaggtcagatagtcgcttaaaatttggtgctggaggagggagcatctgacagatcggttgaatagctcgtccatcagccttcgagtaggcttcggtgagaatgtgatgctccgtagattcgtcttgatgagattttacgagtacctgtcatcaaaccaactctcttagcctgttgaaacgcacagatttgatgtataaagggaggcgcgcaagacaaacatctacttccaagctagtgccttcccaagaatcagagctggaaccattattagaagacatctgttggaaaacgataggatccaccaagcttcggggctttgtcgctagaagggagcgatttctaaacacaacagttttctagtcaacttatgatcgatatcgaaaaacaattagctgggtaaggcgtactgaaacttcagatccttcaattcgatctcgagctccatgcgtcgtttctcaagatccttcgcatgattttcactctgcaaactcaaacgatagaccaattagaagaaaacaatataaccaagtttcgactctggagatagcccagtactcacacgtttgaccgagttttccagatctactatacgcttctctgttgtgcctatagtattcagaaaatcagattaagaacatctacaaatcgggggagaggagcataccttcagtgacacgagtaatactaaaatcgtttgagtaggacatgctctgtcagttacgccttgttataacaatatatgatgaaaacggggcgtacacttgaacaagtttagtttcctcggcatctaatctctccacgcctaaagcgcctctggccttaagtcggtcaggaagagacttccgcttctgttctgactctcccaatcgttgctgaagtgacgaatttttatctttcacctcatcgatctcgctagacagcattgccttcgacttgcgcaaccctgtaatttgttctttaagagacttgacgtcagcttcggcggtggtctggagctgttggttggtagagacgctctcattgagttcatcgaggcagcctctagtactgttaagctgagcactcatatccttgagttctttatctttggctagcatttgggtctcaagaagttgaatcctctcctaaaccatccaagaatgactatcaggtgtgagacttgagacaagctgaactattgaaaaaacctacttcggctaactccgacttgttgctctcatttaaggagagaatttgagaactcatgctctcgatctgtttaaaagcctgtaatcataatcgatcgagagtcattcgattagcccagcagcctagaatcaacaatgaagcgcctacatcttcagtttgtttgtgcagagtttcctccaaagtacgcttttgagaacgaagactctcatgttctgctcggacgctctgtatagcttctctgtgctctacctgagatacacggttgaaacaaaacgaaataatcagcttatatggaactatatgatatattggacttcacatcacctcaagccgggaccgggcagcatgttgatcattctttatggtctgttaaagcgattgtcttttagttatgtctacgcctatgttgcacatgaatgatactcacgtccatctgatgttgaagggatgatatactgcatccagaatcgatatatttaacatcacagcacaattgatgaaatagttttatcatgatcgggaaacttacagctcctcagcttggttgacctttaatcgtagttcttgattattcttctcagacatctccttggcttcgtcgtaagaaacttgctgtgcagtcctcaaggcaataccagacacgagctgggcttgcagatctgtcaattggcagcgaagtgcttggtgttgtaagccagcaccttccacccgcgagagcgcctcttctttctcggaaatcgctgtgttgaggctgtgagatgcgcatagacaagtatgaggttgtacatatggaagactagtctgaagcatcgaataaagagtatgatgcttcaactgacctgctttgatagatggcttctttttccttcagattcgaaatctccgccgatagtgtgaccaaggcagcatctttatcctgcaaatacgtctgtgtgagagagagctcatcctttagtatagcaaaatcttcaggggttgtaaattccgtcaatttggtctgaaggagctgaatgtctatctccttcaactctaaacaacgctgcgcttcctcaagagactttcgaacagagccaagtctacagaatcgatacaagatcagtcttagcgaggactgagaatattagaagcttgtcactcactgattattaagaacttccacttgtcccaaatccttgtttgtttgagttatttctttcttcatctcttctcgagtcgtcctgtttgaagataaaattttgttcagtattcccccttcgctctgagccggatgggaaatgttttgtactccaaggtttgaatccgttcatctaagaaaagatatgttagtctagtgcggcgcgcaatgcctcggaggaaagagatgaatgaaatctctgcggctaacttttctgattaacttcaagcaaccttctctcgtcgagcgcttcgagatcagatatcctacatgtcttctctgcaagctgtcctgtggcttctctaagttcgtctttgagaagcgtgattacttgtctttgattttccgtgatcgtctcgagcttctcttgggcttgctcgatcgccacccggtgttgggaaacccaggatgcatcggaacccagtagcccaattgtatctgaagcgtgtgtttgcacaaaattgattttaggcagtgtcacatagtcaggcgagcaatattcaacaggatccaccgaccgtctttacagacctgagactggttcttcagactgatgaatttgtcccagagctctgattgttcagtcttcaagtcctgctgccttctgtttacttcgtcttgcaaagattgacttgatcgacaagaacaatagatagtaaatcagatgttcgtggcatcagtttgagctttactcgaagacttacgttatcttctcgttatgatcgctcctatatagcatgagcgatgaacccatctgtgagctcttgataatctaaacggtcgcatagctcaacacatactttgacttgatatctttcacgtatgcccgcacgagtagcatcttcttgtccttcgcatcgataccttgcttcagatgttcgatctctcgttgctaggttaccattccgaaaggcgcccaacaaagatacaagagtatatgcgatgagtcgcatcaaagatcaaagataagatgagccgaaggaccatacctgcttatccaacaaagcgctcttgtctctcaattctttctgaatcttgacgattgaagagaccaactcggacgggtgctgttccgggattactctttgatcagattcttctctatcgccggtttcctgtgctctagagcgcttcttgatcggtcgaggcggttggtccgatcgatgtccttggtagttgtcatcatctccacgaccataatcgtcatcacgtacttgatcatgcttaaatcttgcttgaggctgcttcggcaagaatctagataggtcatcttcatgaagagaatggtgtcgatgagtttctttggtaggaaggctgccagatcgagagagagggagggccggtcgctgggactcgagggctgaatcaagctgaataggcacagtaggaaagtgtccaccccggtcgacctccccagagagggcggtgtgacgactaacgggtggatctaggaccctatcattagcataaccctcagtatcttcccacaccgggtcgcctgcctgagtgatgactcccggtgaagccttgtccaaaggagacccgtctgatgctcgagtgttggggtgtctggccgctgaagcttttgagttttgagacggctgattcagaggcgaagacatctgatcgcttgaagagctttcagcttcaggacccatcatcctcttgagctcgttcactgctttcgtgagatcctggtttccttctaagggatgagaacttgatcgtcgttctcccggagttttcaactcggaaggactccccactttgagatgagcgcgcgaacggtgatcagatacagaggaaagagggtttcttagagaaagagatgagtaaatgcgctctcaaacctaatcgaggacgagtatatgcgccttagaattgaaaaaggatagaaacaagacctacccggttgttgcaaaaagagtcgctgacgcctactctttgcaaaggtattgatatcttggctaggtgaccatcgacctaccccatcgacttgtgccgaatggatcgtcgatcgctgaatccctactccagtcgtgtccacaggtaccttcccaccggtcaccttcgcactaataggaaaaaatgctctaggctccgagacctgaaatctagagcccatcagctttgagggtttaaatctgttgtttgggtaggatgaggtatttgaaggggaaggggaagatttaggtttaggtaccgagaacttgaaggtggtggaaacttcatctcggacatcaagagaaccacctggtctgggcggaggctgaacagggtcagacacgaatgtaggttgggatctctggtcaatggtcagttctctttgtgtatgcatcgagcagataagatggcatcagtctacagaatgtcaggaagaatgagggcaaagtatgatttccacgtacgaggtgtccttcgttgaatcttccgtaatatgcgagtcgctgctcatgacgatgacaagaaatccaagttgtgtgataagatggccagacagttagctccacggtaagctgatacaacgagggatctttcttctatcggatgttggaaaacgcaacgccagaaatgagaggtggtgagttagagggagaaggaagagttgataaaaagaagaaaagcgcaagaaggtataaaatccaatcggggatgaactttttgatcatatcaggggtaaatcaaggcacaatcgggaaattaagaaaagttgggagaaaaacctgtcagtttgatcaattagcagaagtcttctccttatttaaactctaatcgccttgtcggcatggtcaattcagccaaatcacggatggcacgagtgatacaagaaaataagcatcacagatatgttcgtgtattgagaaaagggcaagaaataggaagggaaggaaggaagaaaaaaggtagagaaagagataagagataaaagaagatggatcctctcaggttgatcattttgattgggactctagtagcttctccatctttttcattctgctctcgagttgaacctattcgctcgagcatacatggacaaaaacaagaaactccctgttcagaaaaaaaacagatataatggacggattcagagggcagagatacgtacgatatggttcacgatcgtagcttgatctccaagggtagtattcgggaaattttctgtcaactcttcaaacgaccaggcagagattttcgttccgtcctcttcgtcttcaggatcttccatagctgaggtaactgtttatttatattcacaaaatggatcagtacaaatagtcacgtttctgtcagagaaccacgatggatcgaagcaccaagaagataacttactgtctccatccacatcgttctccgggaacatcgcagcaaaccgtttagatggtgcaatctgagactcgtacactgcgatgacggtcaaggggatgaagaacaggaacctcatgatccacaggttgatcttttcatacgtctttttcgagacgaaccacctgttgttcaaagaggataagacagcaaatttaagctctacatcctcgtatcccaaatagtagattgagagcattcattctcgaggacgtactctataggggcgataaagaagaactcgacaatgttaaaaggcgagggataaacaaaagaatccggggctagagaaaattaaatgagcacatgaatgatatgaacatcggtcgtgaagggaaaagggaagaaacaacccaggacactgacctcgaatcatcgagatagtcttgtatgagtaggcgcataggtactcgttcatagcgttttcgctgatatcagagtatgccgtccctgtagaaggaagacgggagcatcgttgttaaacctcgagtgagtccagagcgttctctcttttgtcaagttttttttaatcgagaaagaaccaagacgaaccgaacaaggcgatcaagatattcaacaggatcaacagcgtgaggaaactccagaagtagtagatgaccattccgaacggaggactgaagccttcttcatattggtcaaacccaggagaacccaacagggcttggatgagaagattgataatcgcccagaaactgtcgattttggagtcagcggcgtccaaggcaaggagactctggatgaagccgagtgccatgactaaagataaagggtgagacgcagtgacatgagtcgtttttgatctctcaagaagaaaggagaacgacggatgactgactgccgagtaggatgaaaaagatggcactttctctaagcattcgagaaacgataatctgcatcgttccgacgactctgtacagctcaaacacggtgattaatctgatccacagaagtggagctgatggtttccaaggagcaataacgaaaggagttagcatactttttcaaagctagacttacttccttccctcagaaatcaagatagagactaaccgacgcaagcgaggacctggaacgacttcatgcggagttgcatggatagatcctgtttggatagagccgtgagacgagaggattatttgttgagcatcttgaaggaatcaaaaaggacaataaagggaatgggagagcaaggaggagtaaggaatgtatacaaacagtatctttattacagattccctcaattcggagaccaagagcggacaacaagaggacatcggtagtaacggtgacgaccgtccaaaagtcaacggcagagaacaaggaggaggagagtctgatggatttaacaagcttgacgcattcttcgagcatctgagagaacgcaaaaaggtagagaacatattcccattgatcaagctttgatatcgaagagacaggagagagagaggggggaggaatgaaaatcgggtcagcctgttatagatcaataaagaacttgcgccgagaacaaaataaggaaatacgtacactgttcaatggatccgatctccagagaggactggctacagcctgtgaatacacgacgaggaaggtgatccagacgatctgacggaagatgttctggtatcttggaacaccaagtcgctgtgggttgacatgtccccaaaaggtatgtatcttgctggcgtcgtatcggatgtaatcaatgtcatccgctaagatgggcaaaaaaaggctcttgttagatggacaatttgtgttctctgggctgattaaggaagaaatggagaaagaacggagcacaagcaaagaacaagagagagtagtaaaaatgacaggacgggatatagagacaaaccttcattgttctgctggatccactctccgttccaaagagaagtcaccacatgttgagcttctgtcgaactcaagaattggatggcatggccatctatagctgcttccagcgcggatgtcggtgcggatcgatcaccgtcatcctctcgataacggtatcgagtacttttgtcgcagacaccggagagagagcgcaaacccaaaaagaaagggaccaccaaggtctgcaatcagacgcgcgttcaccgaaaggaaaaggaagaagatgagaagactgacgacatgacggtctgtaaagtctccatgggcaacgcatgaacgatccttcttgccaagacctcacaagccaacgctctcccaatgttctcgtcatagtccgtcggaaactttttagaatcgtgaaggaacgcacgcctcgaagcgagcagacagaacgggacggcgttcgcgtaatctcctcctgctctggtgaacgatatgatgacttggggcgtgattattggtgatgtggccgcagagatgagctgcattatgtgggaaataaacaaagacccagagaacgagagagagagagcgcgcgtgcgcgagaaggaaagagcaaacagaattagagagatcgatcgtttgatcaaatataacgggcaaactaaagtgaacgggaacttgcatccaactcgacttcaacaggtaacagcttaagaatcatcgctcgaagtcttttgatgagctctgtgatatgaacgtagcgcgatcggcagagatgtgcatgaagacgaacagacgggatagaacacagagattagttggaagataggcaagagaaagagaaaggaggcgagactttactagtcattgtgtctggctgagggacaagtgaatgagaagagagcaagctccccatatcggattgatcttctgccatcgcttctacaggttcgaccagggtttggagattctggattggaagtaggtgagcgttggtgttgtgaacggagtggaataagaaccaaggatggatggtcagtcgacaaaaaaactttcttctttttttcctgcctccaattcagttttggtaagaagacgcgtcattggattcgcacacacctgttagggttatccacctccttttgatagtccgccggttcctattcacagttgaggttgttttgatttccctggcgttggcttggcttggctttaagattaggtttgaacatggactgatttacctacatccttacctttctacctttctatctttctcttctacctacaacccccatatacccctcctttctctttgtgatacctcctctttcttttctgtccgttttttttctcatctgtctatctcgacaagcccacactctttcacaataaacaagaaaaacaataaaatattcatcatgatgcacctatcccaactcgttgcgctcacactcacgctcacgctctctctccaagcgtctcttgtctcggccggtccttctctatcgactggctttgggttcaagctggatcgacgggtgagcgtggtggacccagggacggatgttgatttcaagtcgatctctgagaaagagccgacatgcaaggtcccttgtaaggggttgatcaatctgtctgtacgtccttcatgtctttcgatcggcgaagagagaggagaagaaaaggaaggacagaagagagaaaggaagaggaggaggaggaggatgagaaaaagagaagagaagaaagaagggcgaggaccggagagaaaagacgaaaagaaaaagagagaaagagataggctgacgagacgtgttctgtgttcgctttgtaaacgaaattcaggattgcgcctctacagagtaggtcttccgaaacacgataaaaccacaagaaagagactctggttgttaaactctttctctccttttgaaaactcgatggtgcttgaacagctatgactgcacgtataaagcgttatgcacggaatcaggactcaacgcgctcgtcacctggtacgcgcgctctctctctccttctgcctatctctcgtctgagatgtgtatttgaaggcaggcaggctgacaggatttcaaaaaaacaaacaaacaaacaaactaaacttgtgtgaccgaaacaagtaataactgcatactccaggtggccaacaggacaacaggcgtgtcgactgctctgtatgataatgtgacggctattgatcaaaagatggacgagaaatgcgaggaaatatctcaacctgcgaatgctacggtcaccgttctttcttgggctgatttttatcctcacgggaacgccagtacgactgttgccagtacggctgatgccagcacgtcggcgacggcgacagatcgatctgggatagcagccgctgcttcttcccaggctgcttcctctggagcgagtcaaaggttggggctgccgactgtgtcaggcgtaggtttggcagggttaatagctctctttatggcctttgtgtaggtggtggtggtggtggttggtggtgatgatgatggcgatgatggcgatgataatgataaatatgttgtttccatctatacgagtgtatgtacgtgtccgtattcgctgcacgcgcgtacgcgaatgcaagtacgtgttttctttggatgcatatacatgtatcatgatagcaggaaagaaaccgagcgagcgagagagcgagagagagcgcgggtacaaactcaagaggcagagagagcgctcgctgttaatcagctcaagagaaaacacgcacgcaaatacacatacacgacgcccgtccgttcactcaagggcactcacgcagagaccgatgacgcagtcgagagttgtgcgtgtatatgcgtgtgacgctggctaacgatctgacaaagtgtttacttggtctgtagttcaatccggaccaaaggacgcacagttggaaggatcttccttagagctaacgcaagaggccagggcaaaaaaggcaaaaagagagagagacagactacacacagtcacaaggcttgtccgcgggtctcggctttcggctgatcccgatcgaattttttcacaccgccaatcgctagagcaatatgtcacgccacaattggttccttgtgggggtgcctgtatgtatgtgtgggtgtgtgcctttggggccttggccttctctctcaccgttttcccccctctgtcccctttcttctgtcttccattgtgtctcttcccttgtctctcgctcgtcccttttcgtccccccctttccc

SEQ ID NO: 2753 - DNA, 18855 bp, Xanthophyllomyces dendrorhous
ggattcgcttccttctccgttcgctctgccttttctcctttcccccccttttgcactcttttccgctcgtctcccctcgtcttttgccttctctcgccttttctatctttcgccttccggaccccagccgattgttagtgtctgttgtgttgtgcccttttcgttcgttctcccgtgctctcatgtgccctgcctcagtgtgattccctcaagtctgatcagtgtgccttcgttctcccttcggccaatcactccacctgtgtcccgatcgattccatccatcgccttccgttctctgtcctccgttctctcgctcgtcttccctcccgctcccgcctatctgcccctcgtgtgtgtgcgtatgttccgttcgatcgatcacgtcttgtatctgtgcctgtgcctgtaccctttcactcttgtactaatctctctctgccctctcgttctcgtttacttttcctacctgtccctgtccctgttcctccctctctgtgttctgctctctctttctgcggattgaatccctccgtcgcgtcctcaacgcgtcttgtcgctcgtcgcgtacacacacacacacatccacgcatccaacacgttcaatctatcccacgctcccttcgcccctcccccgtcgttctccatctggcggcggccctggttttagtcgcgtacaaacacagcacacgcgtcactcgctctcacctctagtacacatccctcctgctcggcccacagatggacaccgacaattcatcccctcgtcatcttccctcgttggcgccgttaaactttcctggtgggcagcctcatcatccacagcaaggacagcagcaacggtctcagcagcagcagcagcagcagcagcagcagcagcaacagcagcaacaagggcaacacatccaacatcctcaacatcattcacatcacccattgagcgcttcgttcgctaccggtccagccggaagaagaaatcatccagaggatgctatccatcctcaccagcatcagggcggccagcacgtgcccggtggttcctcatccgtcgttccctcgtccttcaacccagcaggcgcgcctccaggctactggcaaccgatgtttgatgtcccccagaggtaagtctgtctcgcgtgtactgccacgcgcgatctcgacgcgtcaagctgatcttgcttccttgctacttatccgcacgcgtccaaagctactctccttacgggcatggaaatcccaatccggcagcttactctccctggacatcgctccatccatcgtccgccaatgctgccgctgctggcgccggtggcgccggtccaaattccggcccaggtggcaaccgtccccaggaaaacccggaccaaccgtcctcggcctatggcgtccaggcataccaactaggaggacatccatcgttgcagcagcaacagactccttacggctcttaccagaatagcccatactatccgtcctacgaccaacaggcctggccatccagaccatcacctcagcaaccaccaggccagaagagatcggcagacaaggagacagataacgacggccgacagaccgatccctcttctgcatccgaccatcaccaggacggagagtcaggatcgagagccagacagggaaccttccagaaccccaactcgctccctttcccgcctccatcctccggtgccgccggcgcgtcctcctccggccagccacaccatttcccgccgactttcaacccgaacgatccttacggtccatatggttatcctccctcctcctcccaacccggtcaaccgcaagccggcccgtccttgccgtcgatgaactttggaccaggcggtcagaaccagccatacggccagcagcctaatgggtattattacccacctcaacctcagttgccccctccttccgcccttggtggcgtcaacggcggcaataacaatggcggggtcgacatgtccatggtcaccggctcctatccccctttcgacgtggagagcggagactggcaaggaatccatccggccgggaaaaaacagaaactctccggaccgtcctccgctgctgctgccgctgcatttgctgccttcaccgccggacccgctggggccggggccaaacccggacatcacgctcaaaccggggagggcccgacgggaaaaccaaagaaggaaaagattccaaaagcaccaaaggagccaaagccgccgaaagctccgaaggagccaaaggtgaaaatcccgaaagagccaaaagagccaaagctaaaggaaccaaaagaaccaaaggagccaaaggcaaagaaggaaaagactggcaccgccaaagatgccgccgatggtaagtctctttcttttgtgtctgttgtcgtggtcgtgtgtctgatcgttcatgctttccttttcctccttctagccagcgtgccgacaaagtcacatctaaagccccctaggaaaccactctccgcctggcagatctacttcaaccaagtccttgccgcgagaaagaccctgatcaaaccgggcgagaggttcaacgtcgcggagatcgcgaaggaggcgggcaaggtctaccaggacctaccagagtccgagaaagctgtaagcaatatcgcctttgtttttcttcttctttctccttccctcgcccgttttaacaacattctctcctcgtccgcttgattggcattctcttccttcccaggtctacatcgcaaaggcaaaggaggtcaaggcagagtatctagcggctatggcatcctacaccgccaccctgacaccatcagacatccgacaggaaaacttgttccgagcatcccaacgaaaagccggaaagtccagagcggctaacctaaaggatccaaatgcgccaaagccgccgttgagtccttactttttgtacctccgagccatccgagcaagcgaggagatgacgcgagagatcttcagaggcgagaaggagacgacaaagcagagcatcaaagcggccgaacggtggaaaactttaaccgaggatgaaaagagggtaagtttctggatcagatcttctcctcttatgtcttttccccttgatctcgccttctcgcgtacctttcttgctgacgactgcatggtgctctgccgaaacctacgcccttttcctagccctacacctcggcagccgaggcagagaaacggtcgttcgagatcgctcagagacaatacatgatcgataccggtggaccggttcccccgatccatcccccccggacacacaaaccaaaatcgacgtcttctcaggctgccgccgccgctgctgtcgcatcggcctcggcctctggcacgtatcaagaatctaattcggtaccactcgtcccggaatcgatccagtcgttcaagcctcaacaacatcatctccagccacaccaactccatccgaccgttcctctctccgtcgggttcaacccgaactcgtcatcctcaccatcccgttcgtcaggcgaacacaacggaccagactctacgatctctccttcccatccaggattcgacgacccacatgatctctcgactggctatcatcaccaccaccatctttcagccgtcggttctggatccggaccggaagatcatcttggagagttcgacccgatttttgcaggcgtcgacgtcgacgtggccgatcatgctcacgacgaaggggatgactcgggcccaggtggctttggaggttggtcgattggagcttctgaacctggacgcccgacagactccaggttggaaggtaacaagcgacagaggcaggacgacgacgatgacgaagacgatcggggcgaccgcgaagatgacgatgaggacgacgacgacgaagatgacgatgatgaggacgaggaagaggcgagcggaagtggcggtagttcacatggtaacaaatgagataacctggggatgtcttctttctttctttcttctccttcttctgatctttctctcttctgtgtatgcgtctcttcttattctcatgtcgggttgggtcgagctgagttggcttgcataccttcccttttctattccctttggcttgtttatatagtcctcaacgaaggaaattgacctctcgtctcttctatcactacgtctttatctcgactttttaataattctcctgtcttttcattttctatataaccggtaccatttccgaattatgtatctattatcctttcttttcttttcttttcttttcttttcgtgattctttcctttttcctttctcctttcgatccttctctcttttcgtcctttctggtttctcttctcgctcggtcatgtgtctttaggatctattcaaccgccttttcttgcacatcctgcttgtgtccgtccgccttggtctgagtcgagaaggaggagtatgatgagaacgataggaaaaggcagagtggacaacatgacgcgcatgcgcacgtgcagttcggactatcatcatacgttttgccgtatctttctgttcacccgttcatctttcattctcgcctgcactttcgtcgtcggactcaactgcactagacagactcgctctttcatcaacccaatctaccggctagcttgtcgacggctcttacgggtctttgtctgaagccggttctggtatacgatagatggcaaccgaacacgttgatgggtttcatctatcgctttcaccttcacccttaccttcttcgtcgacaacgacaacgacggccacaggctcgaatacgccagacgaacgaaacgcagaaggaacaatagagccattatctcttataaaccaacggatacggaatctcaagttgaatgagcttggtggtgttgatgacattgaggtcgatgttgacgaagagcttggttcgttctttccatcccttctcgaagcgtttctcttcgggcgctcctcgtgatatcaaccaagtgtatagaaggcttacctccgtgttcttctctattacccttgttcttgtctcccttgaatctgtagaccaggaagcaagaaagcgcattcatggcgtctcagacagaaacgaattggtagatagatatgtcttgctcgtgagcctctttcgcactctcattcctctgcgtctactctttcctctatgacctcggacggcaaagagagtcgttgcttaactcttgtgttcttgtttgtacgatccgggtccgatgatgctcttcgtgacctgactctgatcgtgtttgtgtttcgtcccggggaaacgggtatggggttggtagtataaagagttcaagaaacagagtaggttgtccacaaaggacagggcgcatatcatcaacgaacgggtccgccacttcctttccttcctcttttctttgcctatcagccattctcgttcacctgtcgccgacaagttggtttgtatccttttcccccccttccttgatcctttggatcgtcggagttgattatagaacgaatgtacgtctttctctggtatagagggaacgatccccctcctaagacgcctttttgaaaagaaaaaaagccataaactgagtggctcgctactatgtcacgtaaacgaacgatctagacgaacgcgcgctttcgaaaacgaatgcgatgaggtcaaagatcgaatcaagtgctcgagatttagcaaaagtttgtccgaccctcttgatttatatctctcctttttatgtacagcgtgaacgaacaggcggtgaactgtccacttgttttcctttctttccttccctggcacataaaaccgtataggagtcaaagcggttgatggtaagttttcgatcgtaggtcagaccttttatagaaagtataatctgatcgtatggtctcttcggtcattgacgtataccgcgcgatatgctcaaatgacgaatgagttgataggcagagaatagaaagtatgtgtctcttcctcatgtttctgtttgtctgatgatttattcgtcctgcgctggaacgacgtgctctcttcgacgactgaaggcttgactttcttgattttaatttatagattgaagttaatgtccgagatcgctcgacaagaagtacgtttcgttattctttacgttaaatgcgctggatcatgaccagaacaatttcttgatcctgtttattttccaactctcctagatcgatacctgcaaaacggaattgaggtctgctttctcagaagcccgcagttctccattttccattccaacagcggcaggtgcaccttcaggtccagaggcaattcatgttaggatcttttgtgagagccgtaaacacgttagtattctttctcttctcttcatctctggtgcagatcgacctcagcccaaattaaacatatcctttctcgacttgactagcaactctatttcaaagtgcttcgacatcggcctctcaaacggatgttcgccgcctggaccgaccgagttcaagacatgtcacactccactgccaatctcgactctgacgtccttccgccttcttcaagctcatcagctcgaaccagaggaaaaagtcgagcagacaccaaaagggctagactcttaaaaaccacatcggaagaagcggcagcgaccatcctgaccaatgtttcgctggaacagcccggtccgaaattcatattctgttatgcaggaaaagtcataggtgatgaaatgacaccagatgggattgggttggatgatggtgattcgatcttggcgatcgaggtggttgatctcgctagtgatagagacgacgtatgcttttcccttttctattctctccaagtcttgtttcttgattttaacatcaaaaacaggggaacgttcgaccgtcaagactgaattgcgtcggatatcgcgtgttttgaaatacaggacggtgtaccgaccgttccaggcaatccactaacgaaagctgctaagaaaagtctcaacgcgtaagtattcaccctctcttcgtttcttctcgactaagcatacgttgaacacacaagcagacctggccttcactaccttcttcgttcaattcctttcttggccgtttaatgttgcagactaaaatctcatctggaagatacgtttgattctatgtatgtgtagaactcattctttttctggatacactctcgctccttttgtatgtgttctgagtttgctaatcaccactccatcgatgaacttgtatgcgcgcgccatccatctgaatatacgaaccaatggatatacaaatagaatacaagaacgtctgaaagacgtattgcgccaatacgaagttagagagcaacaattcgatgccatcctcaagtcaaaagagcttgaaattctattagcaaaagctagatcggaagagtgcgttctcccttaatcccctttcccttcccctccagatggggagttaacttttcgtggactctgtctcgttgtgaatagatcgaaacgattggtactagaagctaagaaattaatgaagcagcaagaacaactcaacatgaaaaccgtcagagcgctggatgaactgaaacagagccatcatcgtgtaagtctggctcagattccagtgaaaaagaaaggaaaaaccgattcaaccgttcaccttttctctattttctaatcttgtttgatgatctttcaccctaatatcttgaaaacagctgttggataaattattagatagaattttgcccgtcgctcggaatccatcacccgagaatacggcacaccttctagtatgtgtcaaagaagagattgatcgaaagggtctgttagtcgaggagatcataaaaggcggaaaccagattgatttatgatcgtgctcctatgtctcgtctgatgggtttgagaagagattgggcttctctgatcataggcatcgtatgagaatatttctataactacaaagaaaggagaaagtagcaagtagatcccaactttgaggggcatcatcctcgtttccagactttcccccgctctattcgacctctctttttggtattatagaaatccaaggaacaactaaagagaagaatttgtggacccgttcttctttcaagaaagtacttccactctatttataacactcgtcccttgtcggccaacccaattccagtcttgggcgcgttatcaaacatcttcgccttctttgcgccaatgttgacggtacgaacactagtggttgccttggatagtctgatcggtcggtttccgacgtattttccatccatttgtttccaggcgagtactgagggagatagagaaggaacagaagaataaaaagaaagatcagttggccaggacaacagaggatacacaaaagagcaagaatggagacacacagaagtcctcaggatcggagaaggctaggaatgcgtatttagactgagaacaagatgccgtagcgttcgtgaagcaagagtgcatcaagaaatgccatatcagacaagcacagacatgtatggatagtaaagcgattccaaatcgaaagacacaccttgttgcttagacgatccttgacgaccctagccttttgaaagcttttgtacttgtcaaaggcctcagtcaagactttttctgtgcaatcgtttgacacatcagacacaaacagccggaaccatttaggatcccactctgccaaggttgggctttggtacaagagaaaggctaaggtcaaacgacgtgccagacaacatctgcatgtgacaatttagggacagatgaatgccagaacagaacactcactcatcccacatctttcctcctccctttcggattactgtggtccgttttcctttgatctttccggtttcttgttcaggagcagcagcatttggatcgggtgctgaataggccgattgctgttgagcagcctcaggatcccacgaattagctaccgtattgtaggcagtggagttgtactgtcaatcatgatcataaacagtgccaaaaatttgttgtcgtgacgagaaacagttagtacatgatcgaaatcagggtgaggaacaaaacgaaagaaagacgaacccaatcagtggaaccactagcgacggagctgtccgcgtatcctccataagctgcaccgctggtacctgctaacggagcagaagacgctgcaagagcctgctggtaggcatagtaagcgtatgaggctgctgtagttgtgtcatagccctggctctcgtagtactgaacagaagagagagatgatgttcgtgtggccacataaagtgacaaaacaagaacgtcagcagagaactcgagtgaagttggacaatgatcaggaaagtccaaagaccatgaagcaaggagcccataagaacacaccgtctgccaagcctttagatcgtatcctgatgtattcatgactgatgtatgagagtgttccgatggatgaagaggttggcagtcgatagtcgacgtggttgattgaggtaaagatgaagagagaaggaaaacgcgagaaaagttcgaaagtgcaagttgaccgtcaaccatctcatccacaacgacgacgacgacaatagcaacggccgtaaccaagccatgaacattgacaaactcttcaaggtggggtttgaatcatctccgctcatgctgttttcttcatcctgttttcccacatgatttttgacgtccgctgcctccggatatgtcctctaggtcccagccctcccctcttcaagcaacaagcgaaagtttggtgatcttccttcagctggttggtctttggtttcaaggctgttatcttaatccgacgcgctctgaacagacacagggctgactagttcattaaactcatctacgcgtacaactgacagaggagctcaagcggttcaagccggcagaagaagaacctactgcttcaaacctagccaaagggaaacaacgagcaacagtagaagactatgacgaggacgaagaaaaccaagacccctacggtaagtcaactccttgaatctacccatattcaagaatcgtgcccagattttctaatggagagctctggttgtaggtacagggcttatagaggattttggagacgaagatgacgaaggaaggatgtttggaggtggtctgaatgaggatcagaggactattctagatatgtctgtctctcctcctctttccttcgtgcttacgaaccctactcttctgaactgtctcactgatcttcctattcggtgctcctttgctccactaggttcgaccgagctggtgacgacgaggatgatgagccgacggtggtgaccttgcccacgctccggaagcagctcgttcaatttgagcgaactgtcaagaagaaccaagagatgcgtgtgaagtttccagatgaacctgaaaagtaagaatatcatgtcttctctctcgactcgttattggccaccgtacactgatcaaccccttcatcatacggttggtcggtcatcagatttattgattcggaatccaacctggatactgctcttcatgcgcttacggccaccttgccgcaaaaccctaagctgttttacccagagttagtcaaacagggtaccgtcaaagtgctttccgagttgctcagtcacgaaaatgcggacatcgcgcttgatgtcgtacaagtgttgcaagaattgacagaggaggatgttgaggcgccggatgatgatggtgatgatgatgatggtgaagaagacgatgcccaagtgacgagtggaatgagggttctgatcgatgctttggtgagtttctcgtcggtttcaaacttgtcctcaggattttcatgaaccaaacatgtctaaccttttaatgaatggaatagcttgaagttgatatcttccagctcttgattgagaacttgggacgactgaacgagaaggaggatactgatcgacaaggagtcttccagacactgggtacatctatttctttatgtgttttgattcactgaagactcatttgataccatgccacctttctgttctcctaggtattttcgagaacctgctctcattcaatcctactctagccgaaacactcgtcaactcgacaacagcgctcaagtggctgctctctcgaataacagtggaagagtacgattcgaataagcaatacgcaagcgaggtatcttttatttttatttttatttttatttatttatcgaagtcatgctttttcctccctcattataatgtatcgagctcattcgtcgcgaacactctgggcttcttactgttggttaggtcctcgccatcttgcttcagcaaagccgatcaaatcggctgaaactcggcgagctagaaggaattgacgcgcttcttcgcgtcctcgctgtacgtggctgatctacgcatctttgccgtaattttacatcaactttctgctaatcacgcagccaaaaacaatctcgcgtttcatctatgggtgatcacagcgatatcgaaaatcagatccaagtgacccagaggaagaagagtttatggagaactcatttgacgctctttgctcggcactagcagaacctgaattgaaacagcttttcttggaagccgagggggttgagttgatggtaatttgtatgaaagagaaaaagctggcgagagcaagatctatcaaggttcgtggaggcatcttcaactcactcaggagttctttgagtaaggttttcagagagcacaaagtgtactcacgccattgtttcatgatgccatgctctattaggtcttggaccacgctctcagtggttcggagggatcagacaattgcgagcgattcgtcgaaaacctcgggttgaaaactctatttgcagctttcgtaagccatgaatcctgaatctttactcttgttttactcaaactgactgaaccctgtactgtcaaatgcatcgatgtcacctcttcagatgggtaaaggatccaaaaaatcacacgtttcggcagaagacaatgagcacattctcggcattcttgtttcccttttcaccaatctggcttctgaatctcaatcccgaatgaggttgctcgccaagtttatcgaaggcgattacgagaaggtagatcgacttttagagttgagagaggaggcagagggaaggctcactgtagtcgagagagagatcgagaaggaaaagcaggttcgttcgtcgatatggtttcgaaagattgctctaaagtcatatgatgtctcaaattggattcttgtatgggctttgtatccacacagtcgacttacaacgcaggtcaggaggttgatgttgaagatgaagtaatgttctaccttcgaaggctagagggcggcttgttcacgttacaaaacatcgactacatcttggcttggctcattatggaggatgacggggtacgtctttctttctttctcctctgttcactttcttcgtactgttccgattcaatgtccatagattgagaagagccgctaatttctgaatgacgtttctggtttctcatctacacacaggctaaggatcaagctaaactcttactttcaagaaaagatcaaaccttccaggagatagtagacgtccttcaaggtaagcgttctctttcaagcctactgattttatccctattggaggaaagaaatattgttctgatgattcgtatccacgttctacagagcaatcggacaatgttggagatctcactccagacggtaagcttgacccaaaagcggagagtcaaaaaatcatcttggacgctctcatgaactacctcaaaggatcgatgtgatgcacgctttcttcctttctcatgacgatcgttcctaaactcatgggtcatggaccacacagacaaggttctagattaaagtctgcaggatatgttcaataacctaccaacgcagtgcgtggtgatgtcggtgaacaacaggtaaaacagtattcgaagagcatttagttcacgtagcgaaaatcgagcaaacagtatctcatttcaaagaaggagacaggacagaaagaaaatggcaacaggaaaacagagcattgaagcgcgaacgaacagaacacaacttcacatagccactttagcgtctagagaagaactctatttgccttcgttcaatgagctcatcgaacttgtactggataacctaggtttcggaacacgaattcctagtcctaatatcggctctaggctcgatcttggacttgggctaggtctccttcccgggttatttctgggagttgaaggactcagttcgcccggattgtacctggttatcacgctgagcgacacgagaggtgaaccgggactacttggatgtgctgggctggactgatcttctccgttgagactggacgaggacacggatgctacaatcgtccgaggtgtgacaaatgtaggcggatgtggggagagtgaactttcccgtcgatcacgcagattacgctgaggggtatgcggaggaagggaaggagagagcgtcatgaattggcgagagcttgggagaggtagcgactgcctatcaggtcttctaggggttgagaccaagggtggggataaaggagtctggttccctttaggccatgcatcttcaagaagagcaggtgataaaggttgtaaatcaccagaagggagctcgtagccaaaatgatcttgcaaaaatctgataagtcagcaaacaaacgaacagatgatgagcggatttgatcaacaacggcggctttccatctctcgtcgtttgtcaataaagaggtttgaacaacccacttgctgagctcaacccaaccacctccgacctataaataagaaaatggatcagaatgttgtcgataatttcattagaacgatgacgttgactgagtgttctacccactcgaaccatgactgttttactcctaaggattctacagaagcatagcttgggaggaattccaatccaatattttccggcctcggtcacgccatcactacgtacgtgtggttcgataggaatctcgacctagatggtgatataaaagaggaaagaggggattgtaaatcgactcttcgtaattacccgagagggacaagaatacgcactttcatatcgtttacgattttgttgatcgcgcggtctaatgtgtcatccttcttgggtacagaaggtttccgccgagcagtgggaaccctaccttcagctttatcattcgtcggtttattctgatgaccagaatagctctcaaacggcatttgtcggtccgccggagtgattgatgctgtcgacctgcgtaatctgtactgactagaggcaacagggcctgcatcagcaggagacaacggtttgttcagctgggaggttggagatttgtatctgctagctacaggaagcgacgagttgattcggtttggcggtggactgagttgatgaacaggagatagagggggagatatgatagatgggccaagcgacctgcgtgaggaagctggggtatgttttacaacaggggtgcttcgcagctgtcgacgagagttggatactggaagtggggactggccatttgctcgagattttgacgctgaggatagtgtaggcgagagagcatggctatcgagtgagatgaaggaagaagcgctactgcttcttgaaattcgagctttggaggtaaacaggtccggaaattcagatgacgaggaatccgagggtaattgtgatcgtggaacgctaagctttgcatgtgtgagggaaaatcgactcgagttacgagagttggatctgctagatcttgaggaagcaacggagtgcacgctcgctactgagcaagatcgagacagactagcgtaggtgcggatatcgttttcagagtcggggtcttcgcgtatggacattctagaagttcgaccactcgtcatggtagaggtttctatctttgcatctatgatgtcccgcatctcctccatggcagtagtcaaccgcttgacctcaaaagtaacccgacggtcttcgcctaatgttttggaagctgacaaaactgactggaaggcaacattcgcattggaaaaggtcacctcaagagagtcgagggagacatttgagggactcgaagctcttgaaacagaatgctcgaacggcgacctatgttgaatcaggtcgatggagtccagaagagcactgagagagtcatcgcagcaagtcaccgccttcttgaattctgacatggtttcgatattcgtcgaagttcggctctggctgataagtgattcggaagtgggcttgagcgatattgagaaagtcgatgaagatcgacgggataacttctttaaatgtcgttcgatatccaatatctcgtcctccatagtggcaagagtagtagaaggaaagcgcttcgaagaggacattgcctgcgaagaggaatgttgcggttcttctgagttgatcagcccttttgattgaggaagaggaggggctacagcctctacaagtctgaccagatgcttttcaacatcataagtaacactcgtgagccttgcagccaaggtattagcatcggctcgaacaagacgatcgatatcagaagtatccaagggcctctctgtagtatcttgcgctgtagaggaaccagtaaaggatatagtgatgtctacaggctgtaaatcagaaaattgaagtggcggtgaagatgtgatggtttcgcatgtgatgctaccagctcgattgctaggggtaagtgtaaatcttggggaagaaataagagggatccgttgtggtatagaagaaacaaggctcttagttctaccaacaaaggatgtaacatctcttgacaagagggtcagaggatcgtctaacgaagaggagtccaagactagatctgatgcagacgacatccgctcgctcaacgatgaggcttccttgaaaagcatctgagcctcctcgtttacagcgttcatctccttggtctgatctgctattatagatagcaaacgaaacagattccgaagagacctcaacttggcgcagagtgattcaaaaacagacgatatgtgatgaatgaccttctccagtgggtggcctgcaggtgaaaaagatgaagccaatccagccaaagaggcagctaaagatccagaaagagttgaatgcagatccagaatacgggactcaaaggaagcaataggagattcatccccaaggctatcgccaatgttatcaaggccactccactgaattcgcttcagagcatccgatagttgcttctggagatcttcgaacgtacacgctgtagagcttaaatggccattcagctctctacagtgagctagcagctcagtagcattactgatagtctctcttatacgagaagcagtcgacgaagactcctgaaagctgtccaacgtggcttcaaccgacaatcggaaggtcgcatcgatcccgatatgttgcttcaggacaagaagcaagatagtaatttccttaagataaggagtagactgtaagcgaatatggtcgatgctagcccagatgcgcggaagttgggcaatatatactgcgtaggatccaggctgtaagcaggataggttcgagaagtctactgaactccctttgtcttgatctgatccctcaagcaaatattgggtgtcttgtttcagggtcagagtaaattcttctatccgatccttcgctgtgttcaacctgtcgacctgctcagccgccttgctgaactcatcaactagcttccgagctctagaaagctcttccttattcttgtcaagctctgcatctagcagagagacaacatgggagtggttctcttcctgatcgggaaatgcagggtgcgataggcaaagaaaagaaggatcgtcacggagggaaacgaattcgaatagctctgacgatataacggatgccctatcgctatactgtttcgaggtttcgatggatgggtgtgaggagaccgattgcaagacctcgctggataagttgatggtttccataaggatctttcgtaaagaatggtaggacttgtcgacactggtccgtagaaaaggttgaataccatttgtagaggtcggctcggacagatatcatttgaagagagaccatatctgactcactgtttccattgttgaatacatgcccgtaaaaatgactcccactccgtcaaaacatctactcggtcctccaggatatcttgctcgtcaaggaaaaagtttggaaccgctccttgactctgaacttctttctctgaagttttgtccaaagcgtatccttctcgaattggtccgtcggtgctccgctgagaagaatttagtgaggtgcttttcagacagacattatacgattgaagtcgggccgcctggtcgatcatgcctgtcaaacttttgtcgagttgaggtatggatacatgacggaggttggcaatccgattccgaaacgactgaaagtctagctccaaggtttgggcgaacactgtatgattggagtacaaatatttgtcgttcagtattttccgttctctctactcttttcttcgtcaatcattgtacataggaacgtacagattctttgagatctacttgctcctcttcctattgccgcaggtgctcgaacagattcatcggtcaactgcctactcctacttgactcgcctgttgtttcgtttcctatactcggcgcatcgtacgccttgatcgaccacctcaccttttcactgacgaattttttcatctcacgctcgagcgcaataaactctttcgctagcgcgaaacgcatggtgtcccattccagtcggtaagatagaaggtcaatcgtatccgctcggactcgcaggaggtgcattagcgtatcgagcagacatagagtggacagcgtgattgaaagaaggtcggtgtcctctcttgacaaagatttcttcgaggcagctatctcgagtaacgaaaaacgtatcttacgacgcgtggttagctccccaagataaggaggacaagtcagtcgttcgagtaggcagctgttcaaaagcagactaacctctcgccatctgtcttaactgaacaagctctccggcgtcgaaaattaccgcttcctcctctatccgatcctgctcatcgtacatgttctccagatcctcgtatgaaggtagttcgttatgttctactaaatcttgagttgagatcggctgagtatctggaaagctagggatcattgctatgaagcaatctatgtgacgtagtccccgtagaaactagacccaaacgtaatagtattgaatccaagaaagcctttcagtctctttgaatctggagttctaggctctagaaggtgaagagccaatgaagctcggaaagacaaataggagaacattcggatctatccgacatacctctattttctcttctatccaattcttcttttctacaaaggcggagagttctagcacatctctagagtccaacgcaacattcccagagggagatgctggagggagattcacgtcggctacacttaaaggggagtcggtaggtatcgcggtcgccattgttttgtctcgagcggcaatctcagaggtgaagtcgaccgagcccataacgggagaccaaagatccagtactagaatccaggccaagaaatcacaatgtattccagtctccttctctgttccttcaggttgctctttcctttatgtgaacgcggcccggtggtcttgtttcagccgaagaggcttctgacgtttgctctaactagatgggaatgatgttgaccagtcaagacatttatgtagcgcgctttaacgtttgcgagtaaagcggtgctcgcacatgatcgtcacgtgatgaagttccaaacttaattctcctcattacctgctaaaccgagagacaaacatgctatgtgattatgtggtacagacatacaaataccattaaagatatcgtttctaaataaattccggtttgcatatttacaaaaatct

SEQ ID NO: 2754 - DNA, 10220 bp, Xanthophyllomyces dendrorhous
gtttagaagaggaaagcgaaactagcaaagagagcaccagcagtcagagcaaggttggtatcaacaccaaaggtcgaggcgtggcttgagccggtagaagaggaagtagtcgtgttcgagctggacgcaggagcagcatccttggcggaaacgttgaggaaagaaggaggaacaccgacaacaggctcgtatgaagcaggagtgctctcatccaccgttccgttcctacaatgagaagatagaagggagcaaggtgcccagaatgttaaatcaagtaaattcaagtggaaaacatgggtagcacaccacataagcccgacaacatcaattatgggatcacgcaccagcaccacgtagagaagcaatcgatgcatttagtagatcggttgtttcctcctcgggcgacagctcggtcggccatggcgcaagccaagcaggtggaccagtcctcgatcgtgttgttcaacgtcaaagttcgggctccgttggcgatcatctccagtgcggcgtcaacctcaaactccaaagtgaatgtactcgagttggaataggaactgctccagggatagttctagtataattgaccaattaggttaacatcgtctctcgtgatttgtccatgagaggcaaaaacagaggacttggaagactaagttgaataaataagagactagacgtacaggtacgtagataaccaaaggggaagtagtgttaggagtagggtttgcatcacatccgaagaaggtaggatgttggttgagtccaaggttgacgactaacgatgcgaatgaaatgttaatgagaagagtaagaaacagaggcacaaacaaggctattaatggggaagaaattacaataaacttggagactcacaggtgttcatgctggggacgtaagggaaaagaggctctacatcaagctcagtggttaaagagataagtcgcatagcagttgttcggatagcagttccgttgggctggattgatagagacaaggacaaataaaatcaaatgaaacttttcagcattgagaccgtctgatatcacgtacattaaaagcaagaaaaaatacaccagacatacccagtagtaagtcgtatcagccgagttatcgaaggcgaagatagcatcgattttccgggcaggaacggtcaaaggctccaacggaatgttttggttactctctcctccatcaacaagagaaatagtggaccagtttgcagtcttcagaagaaacattgagagcgctagtgtcagtcgccaggaagtgaggagcagaggattaaggaatgaagaaagtataacttgagaggaaactgacagggttggtatcagcggaccatcctatgaaagggttgggaaccgtagctacatcgtttccgtaggatccaatctcggcaaggatggccttggcggcattagtgagcaagctatcggaacttgatgagttcaactgaaggaaggcctggttgaagagcgtgctgctcacaccagtcacccagccaagattgtcgaaccctttgacacattgatcggtgtttgttgaattgggcacaccgttgttgagtgatgtgccgaggtactcgatgagagtgaaagcacctgcatgacgagcttcttttacgtcaactcctcctccgaaacccctgtttaaacgaaacacagccatattacaatcgtgtagaggtcgtcagcgtacatgatctttcataaacatgaggatgcgcagaagagcagaaagtagaggaacgaaccaggtcccgaactcgttgtaagagaattcccaaagagtagcgttctcgctgatcgaagcggtgttaggaagtctttcaacggcgatgatgagaggataaggcacgttctctgcaggaaggtttttcaagtcggcaatagtcaagtttggagtgttggaagctcggtactgatcagggaatagatgatcggatagagcaagggcccaaacgtccgtctgtatttcacacgagagagagacagagcatacgacaaatcagcatgcgtgcgcgaagtacgtctttagagaaatatgagggattgaggaaccaaatacgaacgatttgaatatcgtagccagcatcctttttatcataagcctgttcggtgatatcagtgtagactagtgtgtcgaagcatacagactcatcagctgaatacccaatcaaaggaaggaaggaaggagaacaaaagagaatgtacattctatggtgtcaaagaacccatcggtaggaaggaccaggttagaggagatgttccagacatattgagccagatagggaggcgtattgttcgagttcgcatagtacgaggtcaacatccaacttccgccactgtccaaatggaaattgaggaaataagagatggttctactggctgatagaaagaaatgaaagctttcgaaaaatttgacttacgagagaccagccatatatgaagctacctgtccaatctgaccagttccagcatctaccgcttcagtgtgtctcgaatcggttccccaaagccctccggctccgttaatcatagcccggtaaccacctccagagctgaatgaccgcgacagaggttggaaagaaaagaacgcataatgggatgttagctaagcttttcatgcttgcggcgcaatatatagaaacaaggcaagcacttactaagcgagagccacgttgggcgaggctgacgtgttcgaggaagtggtcaagttgagattcagatcagacgctgttatatttatagaagccaagtagttcaggaatcgatcaggctggagtcgagtttggatgtgttctgattcgacgtcagagataccctattttgtcggcaataggggattgttagcgtttgacggaagcgaaagaaatatgacgtgagaaaatgcgcgacgaaccgtagcttctcggatgaatgtgacattagatccgcacgcgacgttgtagggagcatacgacgttcctgttatccagaatgagtaagaggtgaagaaatcaaaggttgatgtcagacaaataatgatgtcgatctgccctttgacaaatgaaaaacaaagtccatacccttcccgtcatcgtcgtcgtcatcgtctccaaaaccgaacagtcgcttctccccaatgatctggatcatctctgatcgtagggcagtcttgtcgatgtcagaactctcgtaatctccgagagctccccgcctagcaaggacttcagcagcaaggtttcgagcgagagcatctcgtttcggagcgctaagcgagcgaaggtattccgagttcaaaggttggttggcaggaagggcaaacacttgggtggacagagccgagagaacgactgtcgcctgaaggacggccgggaaaatcattatctgtctaaagtgatgaacggtattgctgttggatgttgctctctttctggatgaaggtttttgtcaggaccaaactagagaaaaagacgggaggtgaagaagaagaagaagaagaagaacgaaacgtcgagttcttaaagtttcgaggaaagtaggcaagacagatagcacaagcacagggtttgtaacccgtattacgtactcctcaacgaccgatccggagctcgaccggcgagtcctgtccgccggcggttccttaacaccaatgcttgtcactgatgacgtatgtgcgctcgattgccaagaagtcacgtgattttgcattgattgatgtcaggaatgtttcctgagtgttacatcctgacatatcggctgtcaggaatacgggttaagtatcacgtgttctcttacgtgggttacccctacaggctattcgttccctccatcccttatgcctcttcgcccattttccatcatgctctagtttgcatggttcatgcttcatctttttagttctcgtgatctcgagcctctctaggctcgtcatatgtatatcttcagtggcagaccaaatgcgcgaggggtcctgatataaaacggggacgccctcgcgccttcttggataagagttttcttcaagctgagattcttgttgaaacctcttatccaaagtatattgttaatagtttggtctgcttcagatatattaatcgccagagcctaagtgtcaccccgcgaaccaagtgattacacttggttaccttcttaacaaccgagccttacatcggcatagctcgttcttgtaaccaccgttacagttcgctctcggaaagaagcagttaccggcccgtatgttgggcaagagctcgagtgattgtgtgttctttggttgatctacatcaatcatcaacggcgataccgacgacgacgacgacagcagcatcattattgttaaaagaagctcaacgacattcacataggatacggagtgttgaagtatatctgtagtgaagttgttgctatcggtttccttacctactctgcctcgaccatggaccctcaggatgtcccttctcctcttactaccgcgttcgtccgatataaccaccctcaaccgacggtttctctactaagagagttgatagaccaccactcaccgtgttcctactttgcagtcagttcgatcgtgccgtccaggtcatacagtctctgcccaaagtgggtccaattcaatccagttacgaagagaagctagccatgtgtgagtactcttcaacaagtagagagcaaggttaattactggcaactacagaccgctgtttctaatgacctggttgtttacatctcaatttcagacagtctatataagcaaggtaggtctcgactcaacctcgtcacgcatggctctgcaatccctatgctgtcttgcctaatcttggtctatcatcatacaacaattataacaacatacagtcacgatcgggaacgtcgttggcacacgtccaggcatttttgatatgttgaagcgctcgaagtggtatgtcggacgaccaataagtcagtctgcctattcaacatggacaactgattgctaatgtgactcttgggattatagggatgcatggaaatccaaggaagatatgacgactgaagccgccatgaaggcatatgttaggacacttatgacagtgagtactcctgataaacatactccatgtttgttatatagaccgatcgcttaaacttttctaacatgttgatatttgaaagatgctcaaacgatataaagatcgtaagcgagcaagagatcttatcagagaattcaacatgtactcttctatcagcctgaatgatagaccagaggggtcatccaataaggagtcgattagagacttcggtgctcattcatctagtgcgcaaactctcttttataattccgttggccttcatgatttttactctagatctcaatctcccactgttctagatacatacccaaccgactcttcatccgttcattccgactcgaattctaattcatctgcatccacttcttccacggacggatccgctctctcctacccatcatctattcccgcgcctgttcctgcacatattccatcattgtattcaaacacatcttctcaaatcaattttcaaccgctatcgtcttcctcaggtgtccttgtaatgcctccagacccacattcgccagcccctgatgttagtcctaggttgatgaacctctcccttcccaagtccggaaaggagctctctcaacagataggcctattcgatgatgagggatctcatctgttgggatcatcatctttacctcttcctatgccagccccaaagccagaaatcccctcgtcctcagctacgcccactatcaggggggcgccaacctctttcacccaccgaagcgatcggcaatatcaacgccacgcgtcgttggatcgacatcgccctgttcgtcaggttctcgactcaatagacaaaccctccactcaacccacccctccggcggaatcgacattgttacctccaccaccacctcctttaccgaatgccccagatcctcagtctctttcattagctcttgaaaaaattcaaacctctctttctgccctgcatgaacggctttcaacactcgaagatgcctcaacgatccaatatcaacaagctcacccactcataacccttctcctctatccgttcaaccgaatactctctccgatactcaacacccacacccatactgaatcatggacactgtctagactgacatcaggatctaatcgcgccaaggtttggacgcttgtctggagcctcatcaagaagctctttggggacgcgctgttccttggtatatgttttaccctctacgtcgctcttcaggccgggaagggcaaaggcttgctcggcagaagagaggccgttcgattgttttggaaggcgttttggcgttcgctgagaaatcaacagggattgagtgcgttgggtgctggggttaccgggttaggattgagggcgggcgctagagagtttcagcagaatgctttaggaggtagatcgttaattgggcctggtcgactggcaaacggtttgcgacaaactggagtttcatcgacctgaggatcgtcgagatctcacattgaagcggttttcataatttcctttggtctctctctcttcatcgctttactgcttcctacctctctctattaattttgaaaatggtggaatgtccatgagaacgctcctctcaaagttttcttctgatcttcgtttattgagggttataaggatgaacggcttgaactagatcaatgatctcgatcccatcaggaaacgaaaaagcagtagaccgaattgagggatagagatcatcgcagatatgcccacatgaaatacgtcatacgccgatcatacagcaaccgagatttcggtccatctctcataattcattctgggccttcttctacaagcgtaccgtctcggtttacaaactgatccgactgaacttattcgaccatattcatattcgcatataccagctgaactcacggacatggcatcatcatcatcatcgtcgtcgacatcctctggactcattcgagcgacggtagcgttcgatattttggggacgtgtttctcacttgatgctgtcatccaggtgaatgtttcgctaatgattttcacaacagagtagctcagaaattatacagggtgtatgtcttttactttgtgaaattgctcatcaggttctttctttccatctgggttgtatcatcttttctcatctggatatatgctccaaacaggcagtcaaggagaggtacgcagacgtgttggagtcggacgaagtaaacgccgagtcgttcgttctagactgggtaagcctttctcattcttgacatcgtgggtcttgatcggaatgaacttggactccaaatcatctgaactctatgaaaaattttgttgggatcttatagtggcattctgtacagagagattacgtatgtattcagtcatctctatctgttcgaggttacgtgatgttgactcccatccgatgatcaccgccatctagacatacctctctctcgtctctaaacacaccccgatcgctcagatagctaaatctacgttccctcgggcgctcgcttgtcattttccatccttaaaagtatcctctgagagtgacccgagcggagaagacgtcgattatgtgatgggaaaactgaagagcttgactccggttgatggactgaaggaagctctgaaggtgttgaaggatggtggggtggaggtatgggctgtatcaaacggtgggacttcagtttcttggttctatatcagcaggggttcgatagtttggtctatcactaactatttggtaggaaatcacatgatacaggagccaaggcaaccaccgagagctacctagatcaagcatcccttctttctctcttcacaggagggatcatctcttgtgacgagattccttcgcccttttcgtcttcttccgcgcaagggatcgcgaaacctcatccgacggtttaccaacatgcgcgaactcagctccttgcttctcagcctgctaaaccgacttggttcatagcagcgcatgcatgggatctactgggtgctcgagaggaagggttccgttgtggatggtcaaagagtcacgagaaagtttggccatatgacggatttgatgttgggggacgattcgatgttgagggagcgaccgttgaggaagttgccaagggtttggttaggtgtcttgaccaaatgtaatcttctattccgttgttcagcctctcgatgaatgtgccagtcagccagttagccagtcagtcaaccatccaagatgtctatcagccaactctaacgcactctgttctggcagtatgtttatccgactgcttctcttgatttacgagtccatctggtggggaacaggcaaccacgaccgtaaccatacttgtgatattcaccgtggccacgtgtgtaaccatgaccagcggttgtataccgttccctcactctctcaccatctcttcttccataagaccatcctccttccagtgcattcatacagcagtgcatcccagaggtatacacgcacgcatacatacatacccttcgtcctttgccggttgaaatactaggaagacccattcaaatcctggttggcatcttgaattggataccgtgagaagcgtcttggtcgtgcccgatggtatctcgtcctccttcaccaacatcgtcatcaactctgtcttcagtcgatacattgcctgtttcttcccagacatcctcccggccaccctctccaccgtcgccgacgacaaagagaccttttcagaagaatccaaatgaggcaagttcgagccaggccggtcttccttcgaggtccagccctctcgatcaatccctgtcaccttcttctgatttccagcagtcgagagtggggttcaaaccccaacggcctctcccggagtctgctacaacgtcatcttttatgaatagaagaagatcctcgggaagagttaaccctatgtcgagcacgatctcagcggacctcaacggcaaccgtcctagagaacacgagaagcatgggtttgtctctgagagagatgttcatacctcccatggactgagcgaaggcagcagtagaacggctttcggatcagaaggctggtcagccgacgctacatcgtcgaacacaaaccgaaagaaatcttctgggtttctaggccggttgggaggaaactcttcttctgattctttgcccccttcacatccgtcatcctctgcttctggatcgtcgccatatacccgacattctagtaatcctcctccagttccatcaaccattccataccgagatcagtctccgtcttttcgatcggtttctcagactctgcaacctccgattgccttgcctacctcttccctcaacggtcggttttctatccctttccagtcaacccctatgcgttcttacaacccaccaccccgtcagtcatctcttcctgtgggacttaatatggaaaccctgccctacaagagagcatccaatcctgaaagctatggaaccacaagtagcccttatatgatctatcaacctgggcggacaaatagggcaggcaaggacatcgagagaactttagaagaatggtcgttcaattcaaacgaactggatgagacgaacggcggcaatagagaaggttagtatcgttcatctgtttactcacgatcaaggctttctgtccctgtcaaaattgcccatcctcattcagctcggctttgttcattctgtttccttgccacgattcagataacagggtcaggaagtcttcagctcatggatctgacatcagttctcatcgaaccggcggtacatatagtgatcaatccaattcagaacttagtagaagaccatcctggtcttcttttgtcaacaccacgtccacacatgcacttccatctctcctcgattcatcaccgttcattgacatcaacgagcttcgcgctccctcaccatcgtcaacgaatccatcttcttcgaccatgacgtccgggtcgtccggttctaatccagcatcccgcacctcgctttacggtcctctcctgggctcaacagaggcttcggctagtccaggtgcgtattctcccgcagctacaccatctctctactcaacacatcaattgtcttcatcaaagacgtctccatccaaaagcaaaaaggctcctgcgcctctcgcgattcttgttcctgtatcaaaagatctgccgccggtagagtcatctgcccaaccctcccgccctaaactattc

SEQ ID NO: 2755 - DNA, 31053 bp, Xanthophyllomyces dendrorhous
ccctaaactattcacgctttcctcttcctcatcttccattcaccatgtttcgactccatcagatgtgacgcccccttcgggctctagcccgtcgacaaatcttcacagacgggtcatgtccacaggatcaactccaccggctgtccctgccaagaacccactccgtcatcgaagtgtatccggaacaagcgtatcaactcgagactctcctgttataggatacccgagctcgccgagcgctgggtcggtcgagtctttctcaaacagtctaatcgaatcctcaactgaagaaaagccgcaatatgagcgcactggagaggaaaatgaggacacgatcagacagaagcttcagagaacggacgcggcggaccagagctcaggtgcgcaatggaaacctcggggagatctagagcggacgagatctcagatcctggcaaaggattcattctggctagatgaagaagatcaatccgcgacagatgggcaaaagaagcaacgaagagtgggactgcttgagggggctcacattcttaatggactgaccaaacaggtacgaaatcatctttcctcattctcttggccttgtgatgtccgattcggtcctaacacgaatgcatttcctttcttcgattagacgccacctgtgcgactcgaggttgaacctgatcagactcgtcgcttaccttcagcttctgcctctttaccacaatctcgctcgcctagcacaacggctgtaaatggtgattacacatttcggtccatttgtcccttctgctcgtttgttgcgtccgtcgttgcatatatctcatcatcttgttcattccactctcacagatcatgtggtttcttcgccaactcgttctcgctcttctagatcgcagacagcttctgtatattctacaaactccgaaaacatctctcctcctccttcttcgtacaaccgctacgtctttcaacctcttcattctcctgttcttccatttacgtctgaaaaggactcggcccccacctcaaaacgggctcatttactcagcgagattcgtacgactgaaagatcttatgctcaagatttagcggttgtcagggatgtctatatttatcaactccagccttccactatttcgttgactcagaatcctcatccagaagatgttgctgcctcggagagtcagacaaccttcccttcggtaggaggaagcagacggagctctatggctacatttgaaactggtcaaacctctctcatggatatcgtagggagctcggtcgatgatggaggctcttcagcggataagactagtaaacactcgttctcgttactgcttatgcgtcctgtatcttcctctggggtgtctctgtcaacaaacggagggtacgcgtcgccccaaccgctcagatcgcccgcctctcaaagaagcatgagatccaatacatcttcctcatactttccctccctgacatcacccaagactccgataaaaccagcttcatcgccttcgccttcgacgatgacggcctcattcaaaggcgacgctacggcgagaccaccttcgacagcagagttgaggacgatctttttgaaccttgatgcgttggcggtgttagcagacgagtttgcatctctgttagaggatgtctgcgggacgactgcccagacagaggggtgggacatggtcggagaagcttttctcaacatggttaatttttccaatttgtttcttcgtttattcaaacatgtctgactgtgtactaaatactcgtctcaactgttttcttctcttcttgacagatgccccgaatcaagcaagcgtttacctcatactgcccccggcaagcggctgccaactcccggttgctcgagattcaatccaacaaacgatacatcccgtactttactgaatgctgggcgcttgtccaaccattcacttcctcctgggaccttccatcgatgctgatcaagcctgttcaacgattactgaaatacccactccttttggacgatctcctcaaatgcactccttcatctcatcctgattattccaagatcaaacaagcttcatccgatattcgacacctggctgatgagatcaacgagatcaaacgacgaaaggatactgtcagcagtgtgatgagaaaggataaggagtctgcggtgatcagtgcgagtcatcctcactcttcggttcttaaagaccatggcggaaagttcaagaaaggaggggttatgactgctttcagaaaagacaaggtttctgttccgaccactacaggggcgacctcaacctcactctttacagtcgccttccatgaacaactccgaaggacggaaaaagagtatgctgggctagtcaataagttgatatcagctgagacagctgggaagcggatgagtgggttgatgaatgggttggcgtctagaaccaaggatacctggcttgctcagatgcaaataattgaggattggagacgaatgatcaatctgcaagggatcgaatcattagaagatatcagagtcgaggcatatacagatacggttgttcagatcttagatggtccctatcggaagtttgtaagtatcttcacgtccattgattacactagtctgtcatatagttggttcaccgaccgttgttgactttttcccgttattcgttatgcttggttatataggaatcggaactacgaagatccatctcgcctgctgtgagcaaattatctaagatgtgtgagggacctcgcacaatcatccttaaacgaaatgcaaagcatgaaggtaggtcacatctgttttctgcagtcacatcgtcaatgattaatagtttattgaacgcgttttttgatctgtctctggttggaacttcctcgttacagactacaataaagttactactgccaaagctcgtggaagtgacattgacaaattccctcaggatatcgtcaatggcgctgagatctttatcgctcttcatcaacaactcctaattgagctccccttgcttctcgagggtttcgccgccattctgcatatggtcgttcggtcgttgatggaatgtcaagctcgatattatcgaggcgtacatgctctattatcttgtttctgggcagaatatccacctgtgacccctgatcctgaaggagttggtatcatcagtgggggtttggccatcatccaagcttgggaagaggcatctgctcgtcctagtgaaatgatggaggcgctaaacatcaccaagaagagtgagtgtctttctcttggttcttcgcctggatacgcaccaatcttgtcgcgagatatgctgattcatatcttaccttctatttcagtttcggttcgcttgctggatgcaccagtccgtatagctacaagctctcatcaatcgaatctacgcaggaaacagagctacccctcgtcgcgcagttccaatttttcgtcttccgccatctctactccaaactcggtctcttctaatcgagcaagatcgtcatctctcagtacgatcgctcgcccgaatccagcaacgacggatcaccctccaatgccaaacacatccgaggagatacttgccaggaacggcatgtccaaccttcgtaagaaaccaagtcagcgaggcgagtctgaccgaaccgaaagcgagaaaggatcttctacgagcctcggaatattttcagccaccaatacaccatcctgcgccataaacaggtcagatagctctatgcaattgaactcggatcgtcgatcggtttcttcggccaactcgattgggcctgctctgtctgcgatgagtttcgaagggtccgagtcgtctcattttggagagtctgtcatccagaagataacaaatgttcatgctaccccgtctccgaagaaacgcgcgtcgcttcctcatttgtcacctgcttcactcagatcgatcgatccaaggtcaccctcgtttgcagagaggagtttcgatcagactgagggagaggagggtccgggtgagactcctaccaagttgaatctgatgaaatcctcaagatctgccggaggcgagagggaagaggtcctttacaggtgccagtgtgtggcagagtttgatcttcaaggggtcgagctgtcattcatgggcaacccattcttgagaatgtaagctccttgaaaagttgaggcagctcgtagcgatatattgctaaatctttttgtctttttttatttatttagcaaacggggtgagattatcgatatcgttgaggaagtcggtcgagtcgacgagttgcccgatcattttcctcttgatgttggacgtaagtgttacagtctttttttaaaataataaaataaaaaaatgtacttcgtcctcacacgttccttggtactttcacgtctatctacagtcgaggatgatggcttgctattaggaataacatctgctggtcaaaaaggtttcgtcctttgctcgttccttgtaagtcccatgtctcctccgtgtttttcttgtctgttatgagagactgatcatacttcgacattcgggatctttttattgatctttctggggttgaacagaaccctctcttctaaaccttcttcagtgtcagtccgctattgctcgtctgctctttatcccctccccgctttgaaatcaagatgtttcctttataccgaacgtgatatacaacgacctgcttagcttacatgtttctgtacgtatatgcctgcccgcttccagaagaaagacaaaagttctttttatgtatctgccaatttatctggctcatcctttcctcatttacgaaaagttatctcatcacaatctcatcgttcttctctactttgactactacagtttcctgtgtcttttttttttttccttgttgttttatgtctgcccctccttctttccttcccttttcattcatcttcttatcctctacattttcaaacctcataaacatatctatcattgctcgatctgtaccaaccgacccaccaatcaatcaatcaatcaacaaacacaacttcactctgcttcattatcttcatgttcttcttgcaccagaagaaagacaacaaataactctataacattctgctctatactttttccatttatacatctgtctctgtttctatctctatctctatctctatccgatacgacacgatacgatagatcatacatgttagaactgaacatgaaaactcgctctcgtgaacggaaaaaagaacatattctatgtaacaacatcttttgccctctgcgtgcactgtcgatcgtgctcccgtttcaagcttgtcatgtaccttgcgttcgttctacttgatctcaagaaattccatccagagaatgtttcgtttagtctctctagaaggaaacgacgaacaaagagagaatggaaaaagagagagtctagagtcaacccatctagtatgacatgtagttggaaaagaggagaacagaatacaaaaaaaacaaaaaaacaaaaaacaaaaagcgcatgacgccataaggcgagaccgggggagagagaaaagtacgtagaatagcgagaccgagtggtgaatggggtatggtaggaaaatacatcaggcagacagagtactcaagaagagcaaggcagacaaaaaaaagaacaaaccgaactctatgcaaaaacagaagaaagacaaagcgagaagaacaatccgatgataagaaaagagagagaaaaaaaaggacagaaacacagtcggacccggcaagactagtccaactctctcacatggatgccacctttcgcgtcgacctcacactcgatcctaagaccgtcgaaggctggtctgacagacacagctctcttttttgcctcttcccaaacctcgcccgccaagctcttagctgtctggacgatcgcctcttcttttccttgctctctagtaccgtcgagatcttggccgagcgcggtccattcctcgtgagacaatgcgtgggagaaacccatgaggtacgtcctggttggttgaagacggagaatggtggtaagggcgtgtaggattccaaagtgagacggatgctcctgaaggaagagacagtcgaggaaaaggacaggccaggcaggagagtcggatgcagacatgccgagaggagtggccggtggggaggcaggaggagttaattgatccataggagccggagagaacatcggcgcgttcgtggatgcagaggaagtgagcgcatccagcgacagcggcgtcaaaaggagtttcgaccattcagattccgggatgtatgacacatctgagagataaacgatggacggatggaagatgaaacctaggcagaagaatggacgaataggggccggacccggcggaggagcgatcgcatcggacagagagtcagagcatgtcggaaggttgggagaagagttagtgggtgcggcaggcggtgggtcaaagaaccttccatggtggactgaaggaaggcaagtgagcgatggacatggagacagtgagcgcaaagttcgagaggaaatgacgtggccaactttggccgaggagaaagttggacagagagggagacataccattcaagggggttacccggattccctccacaaagaaatctcggttctcgtcaatcacgatccattcctgtatggtggttgaatggatgagaagcctgataagtagccgcttcgtcttataggggaccaagcgagtcatgatagcttacaaatgcaggaacatctcctccgccggtcgctttgctggactctaccatgtagggccacgatcgagcaatctcggacaatgtgtgcgcgctctgatgaaggagaggaatcgattacataagtatgttgaggagtagatcgatccaagctttgtttcggagaggagtgagctgctcaccacgtaaactttgacaaaaggctgaataactcccttgagggtccacccgcgaaggtcgtctagtccgttgatggctacaaggaaagcagagaatgattgtaagctgataggatacatgaagggagatggaaagctatggagaagaggatcataccatcagcgtgagcgtgagtgagcaagacggcgtctgtggaggagaaagaaagggagatgaagggtaagcgtaatgaacatctatccgttcaacgaaatttttcttgcagaaggattcgaaaacgccggcatatgtacgaaccaatctttcggagtccaaacttgggaaagaactcgagagccgagctcaagaaactctttccgcaatcgatcaggatcagcctgtgttgaaggaaagggaggagaggccgagggaggaggaagcaggagggagaagggaaaggaagagagaaaagaggaagaaccagaagcatattagatcagtactggtcgtccacatctaagccgatgagtagtagattttccgatcgatcgatccggcgcgtaatgactggacctgcacgaggcgagatgcgggatgggacaaggctcttggtggaaagacgggaagagtaaagaacaggaggactgtacgatttcgagccatctggacgtttccctctgacgaccgcgctagtgtttctgcggatgttgttcttgccttcggctgtcgttgtcgaaagacaagtcctacacgccggtcttgggtttggatcgagatgattcgtcagacatgatacgttcggtagctggccagatgtacctatcgacggagggagagcgggtaaggtgcaaggctgagctgcttgtcccgttgactgatccacaaaaatcaccgaacaaagcagcgagactcacctgttccgagcaagatgatctccagatcctgattgtccatctgatggttgagcgaacgagcgagcgagtgaagacgtcgaaagagggaagaagagaaagaagctgaacgagtgagtgagcgtttgaaagagaaagagaaggaggacgagcaaactaccaggcacggtcgctctcgcgccctgagtggagattttctggcgcggtctgtgcgcgatagttcctgaccggccggtcgatcgatcgcacacgcagcagggcgtgcctgtgacgacgtggcctggccggcagatcggatggcccatcgatcgggcgttgatgaggtaagcccgggaacatcgaaccggatctggaaccgacacgaaccaggacggttggcggcaagtgtcaaatttcagtgatttttgaaaatccaactttcatggcaaatctcccccttgaatttcacccccgaatttcaccgtctctttttgcctgctaggaaacattctccccgctcatcctcaaacgctcagaacacccagaccatacctccgaccatcctcaatcagccatgcccaccatctctgtagacaaggccgagctctacaagcgactcgagaaggagtacagtcagtcttgtccttccgttcccgtttggtggtgtttgaaacgctgttgatcctcggtcaccaacccggtctcttcttttctcttctttttttacatacgacttctcgttcgcttctccatctctgcaattcagcccaagtcgagtttgatcagctctgcttcgactttggaatcgagttagacgaagacgtgagcccgttgtttttttgttctcctctcttcacctgttcgcctaatcgaatctcatcttcttcctcctcttccttgtcttctccctgctggatagactaccgaggaggtcgccgctgccaaaaaggccggactaccgaccgaggagccggtaagtatagcctctatctctgcatctgggcccatagctacttgagaacctagacactagaactcactcccatcgcaacgttcggccatccctcaaacaggtcctcaaaatcgagattccggccaaccggtaggtcttccagtcaaacgctcaaacttaccaccaagtaaacccgtgctcagccatttcctttctcttctccttactctccctcacttcctaaacagatacgaccttctgtgcatcgagggacttgctcgagctctccgaatcttcctcaaccttcagtctccccctgactacaagctctccacaccgagctcccttctcgaggtcactatctcctcctcgacctctcccatcaggccctactttgccggtgccatcctcagactcaaggagcctctcaccgaggccagctacaagagcttcatcgaccttcaggacaaacttcactccaacttatgccgtaaccgaaagtttgttgctatcggaacccatgatctcgacaagttgacccctcctttcaggttagtctatctactcgttcgtttggaccactccgtagagagtatatcatgcggtcttcgtgtaggacaccgtgaagctcaatatctgacctaatcttctttccctccctatccccctctcagatacgaggctcaagctcctaaggacatcaagttcgttcctctcaacaaggacaaagagtacactgccgaggagcttatgacgctctacgaggtcagtcatccctcttgtttcctctctgatcgatgacttcgaccgctgaatcagaaaacgctctatacgcacgctctacagaccgatcgacacctcggaaagtacctgcccatcatcaaagactctcccgtctaccctatcatctatgacgcagaggacagagtgttgagcatgcctcctatcatcaactctgaacgttggtgctgacttttgccctacaatgcattggaacatcgcattcaaaccgttaacctctatccctcttcttcgcataccagactcaaagatcacgctcaacacgcgaaacgtcttcattgatatggccgctgctgatcctaccaagctgtgagtcgcgcacagagttttctgttactctctatccggactggccccaagagaacagatagagatgctgacgcactcgaccgggcttggcgcaacctcaaacagtgaaatcgtagcatccatcatgtccaccatgttctccgagtattgcgagactccttacacgtaagcacatctctttactctctgacatgttgaactatctttttctcatcactcgacatctctgtctttctggaacgatatacgcttggactcgtaggatcgagcccgtcaagatcatttctcccgacggatcctcccgaatcacccctaacttgaccccccggtcgacaactgcacaggcatcctatatcaactctgccaccggtttcgcccctgcgctctctccatcatcaatctccgagcttctcatccgaatgtctcttaacgcttcggtctctccctcggacgaggacgtgctgattgttcaggtcccgccgactcgacccgacattcttcacgagtgtgatatcatggaggacgcagcggttgcctatgggttcaacaacttgccaaagacgttccctaggacaaacacgatcgccaggccattgcctatcaacaagctgtcggatctgatcaggaaggagtgcgctatggccggttggaccgaggtcctgccttacatcttggtgagtttaatctgctgagcgcaagagcctcaatccgtcttgagtgcatcgacatagagagacgtctcgtacttacaccctttgcttcccattcagtgcgcgcacgacgagaactttgcttggctcaaccagaaggaccctggaaactacgcgatttccctgtcgaatcctaaaacggttgaataccagatcgtccgaacctctctccttcccggtcttctcaaaactcttcgagagaataagcaactacctcttcctgttcagatctttgaggtatccgacgttgccatccaggacgcttccgaggagagaaagagtagaaacatcaggaaggtcgccggtctgtggagtaacaagtcggctggtttcgagattgtccatggtttgttggatcgattgatgcagatcttgggcgtggcgttcatcggaagcgagaggagtgaggctaagagtggatactacatcaaggagacctccagtatgttccctctctgtatcccttctctcttttgcctcttcataaggccacctctatgtgatatctgattgaaaatctctggcttttttttttgctcctagacccaacctatttccctggtcgagccgcttcgatcttctacagaccggtcgaacacacctcccagcctgctcctccccaagcccacctagccgctgacccagccccgacctcgacctcctcgagctcgaccgaaggaccactcgacacattgaaaggcgctttgagctcggtccttccttccgtctcgtcaggttcaaaggatatcgagatcggtgtgctcggtatccttcacccggaagtcttgggcaagtttgagatcgagtacccttgttctggtttggagtttgatttggagcacttcctttagaagttctcttttctttctctttctctttttctctcctcttatagagaacgaaagaagatcggttaaaattgaagctgaagtttcaggaacatcttcttggaatagatatgatcttttttttgtctttcgtacattctcgtttcctctttcctatgcttcacgcctatcgcaagaaagaggatgaaaataaatcgacagaaaaaggctcatgttgatagatgtataccgtgagccatcatatgaacaaccaatgccttcgggggtaaagaaaagaagaaaacagataaactcccgcatggtcagcacggcttttcttcaattctccaaaaggagagaagaaacaacaatcgtcacccgggactcacctctctagaaggagccaatatgtcacaagattccccatcgactgtctgccattgacactggaacaccttgtcaggcaacggctctctctcgccatggtcccgtccgacagtcgatcctccgacttgaccgtcgtcgtctacctcgacaggtactacaggggggagcccacctagaaattctggttcgagtgactcggtctcgtctctggcattcaccacgggcgagatcgatcgagttggcaggcgatggggatgaggatggcttcgttgaaggaaaagtgggttgatcgatcccggagcgataaattccagaccaggcgaaggaggaagagattctgaaggtggtcggttaaactcggcagatggatcgtttagcgtggccgtcgttaggtccagaacggaagaagcgggtgacggaggggatgtcgggatggttcgttcagcaggaagtaaatgatgcgccaacgtctgaacggttccattcgacgtggccggataactggtggactggatgacattgttagtgacagcggcagcggcagctgctgccgcagtccgccgcgtacctatccgagaaggtctatccggaagggaacttcttcctctgtaggactcgtcgtcaggctcatccacaggaagataatccatattcccctcactctccgcctcggagggcacatcgtccggcgagatttgcctgttcagcgctcgcaaccttctgacttctagctgtaatgcctcgaccgaatcttcagcttcctcggccgcttgccttgtctcttccaactccgtcttcaagagttctacttcccgctccagcaccggtgctctcgcagctcgttctctcactcctccgtccgtgagagccgcttgctcgagaaggagttccttctgagctcgaagctgagtcacctgtttcgtcaacacgttcacctgagattggaacatcaggttcatctgttggactcccaacttgacctgactttccaacttggcgatcgttgattctgcctgttggagttccctagcagcgctcacagctcggtctgaagacgttcggtattgatcttttataaactcattgtcgtcctccgttgacttcaaccggttccgaagcacagtgttctgttcctcgagcaccgcattcgccttgttgatcgccgagagttcgctcttgagcagccggatctgagtagacgactctggggagggaactgcagccggaacaattggtgcagaaacgttgggttcagcctgaatgaaaagacgagagattgcggaattagcgccatcaaacggccaatacacgattctgacaaacacggagagatgcttacctcaggcttcttataggacggggcatcaacagttttagactcgtcggctgaatcagcgtggaaaacgatatgagcatgatgttcaaaacgaaagcgagttcagaaaagaagagtatagcaaactcaccgtcctcgatcgagatgaccgacattcggtcttcctcatcgaccgatgggcctagtacttgtgagtccttcacgattgactcgtctactgctattttttcgtctataaaggattgctccagtcaacaagtagaacgaacatgtcttcatgtcgatagagttgagacgacgataagcgtacctggttcttgacttgttgaagcagttgatgcggctgcagttgtgttcgtaagatttttctgtggaaccggtaaagtctgcggataagaaatagggactgaagtggctattgtcggtaccgttgtcgtaacagatgggctgttccctgtcacgagcgtcttgtttatgaccgaagtggtcgcttgaggtctaaatgtaggcggtggttgatgagatgatgttttgaactgtgggacggataagatcgaatgcggcacatctgacggcttggaatcgattggttgggaaggtttatccacagctgattgtgtattaagggatggttggtttggtaacacggaagaatggacatctgaggatgtagaatcagagatgctttccgactgactggtcgtcgacgccttctcagatttgggttcatgagcagagggtgtgggctgagacgactcttgatgatttggtggagtgaattcctcaatttggcttgacatgggctctctcccctgttctttcgattgacccgtaacagaggcagctgtcagggtgatatctgaagtagatgtggaatctactgatgctgtcgaaggagcggtaacagtagtatcaagtgcaagtgcagatgaaggaaagcttgtcgaaggattcgatacagacgcgaataattgcgaataaggagccgttttatctgcagatggttggcttcgaatggacgacgttgcctgggagtcgggtacgatcgtgcctttgcttgagttgccttgagaagactcttgattcggtctctgagtcacggatgcgaacacactattcgcctttggtgcagcgacagagaaggggaatgatggaacgttcggaggaacggcggtacttcctttggcagaaaatctagcggttggactggctataggttttgagacgagaggtagtttggttatgggatcggagggtgtaggcttgtcggaaggaggttttagctgtggtgaaggtgacgaaggaagtcgatcggcagctatggctaccgagagattgtcgctagcagaatgtggcgcattctctgaaacaaaaggttgaatttgatcggtggcctcgagtatcgtatgaatgtgggtttccgagcttgtcgaactcgatgcaggcaggttaacaaggggcctactgactgagggttgggaattcaaaggttcagaagtttgttctggaaggtctgcttcgtcgatgatgatgacttcatcctctaccctttgagctgtggtctggttattgttgggtggagagggtcttagtttcttctttgaagattgtttgaccgacgaaggctgagcgagtcgcgtggtctttggagtagaagcaagagagttggatgaaacaggcttggaagaaatgacactcgagttagatttgctggtcgatctttgacctattttagacggagactgatcaaagaaatctctgatgctggatgaagacgaggtcggttttgattgcggcgaaagctgagacgtgctagccgttggaagagatgtccgagttcgttttggcggaacagtgcttgtggtagacgatgtagactctgacatggacgcgcatcaaaaggtaggtagtcaggtgcaggtataatctcgccgaaggcatgagagtcgcgttcgaacttgagcatacctcgtttccgtttgtccttcaatgatttgccttcgtgcgcttccttcttcttcttctcttcttcggctttggaggcctttagtagctcccactcttccatgagtagcacattgcaatgatcgtagggttcccaagtcggctcccatggcttgttcgttctcggatcgatgcctctgatggtcgcattcgaaagagagaacccagaagggtgaatagaggtcagcatatgacgagagcgaaacactcagtaggccaatttgatcagagacgtatcagatggaaagaataattgaaactgtatacatacgcccactcgaccaagaacttgttccgcttctgcttgataatccgaacggcctgaaacatatcgccttggtcgctgttgtcttcctctgcctctgcttcctcttcctctacaatgccgatgtcgtcaatctcatcgatctcatcaatctcatcgacctcatcgtcgttatctgatcttttgatcgttgcgagtgtctttctcttttgagatcctctcggtcttgcataggaacccgctacagatgtgattgaacggccctttggcttctcgactgtctttgtttcgtggtcgtcactgccaaatcagaacagcctggtgagcgtcgcgtgtctatttcactctctttgaaagtgtccgaccagatagactcacgatgagaacggcagggtgtttcggaatgacatcagttccgaccttgagcgagattcttgattcgaataatgtctggacggatgatagttggagtgatggaagttatgaaggtagatgatcagaagcaggacgaacaaagaagagagtatgcctatggggaaggatgtagccggaaagagactacaaacatttgtagtatgttttgtagtgatcgccgtttatttccttatccgccggtctcattagtcttttttcaaccgtctattcagtctactacgaactttctctaataccactctgccctatttttcctaatactcttgcgtagtgatatccttgattctgcctattgtctcttctagtctctgtccacactacaaattctcctagtgcaaatacatttcttcctaatcaaccgcgtagtcggcctgttctcgaacggccccgcgtttctctcaatcatcgagacgtctctccttcccatcacatccatctatcaacctcatcaaatccagccttctttcgtcctttggtatcctcatctagcccaatatgcctgttccagtatgtcttttaagatcggtatcatacccttctggtgctcatgctcgctaaactgttgattctatccgatttcagtgggaaatgctcatcccgttcggtctcatcaccggtccgtccctcttgtccttttagcgttcttcctatttgttcctccggaaagagcttaccgtctttgtctttctctcctctttgttgtcttgctcatcgatcaacattcacctctccttctttttttcctataccctccaactaatgtcatctttgaatagcaatgtttactgttaccggtatcggtatggaaacttccttcaggtgggacgaggattggaaggtccgttgtcttccttctttcgtctctaattttccttcctcatgggcccactccactttcggaaccttttgatcatgtctcttcgtggcctccgaaagttttgtagatactgacgacagacggatcctcggattggatttatcttggttttgtatatctagcctaagcgatacctgcttgacccatgggagatccaaatgatggaacgagaccgacgattgaccgggtccaaacgaggtcaacgggtatgtctttcacttgcctctgttttttgaagctatcttcctggctgtcgccgatatcttgatctctatgagatctgttggagagaaacatacgacctgataatcggatcaactgacgtatcttcattgcggtcatctctctgcttatttctcctcccttccatttacgcgaccgaacgaaaacaggacgatcctatagcacctccgaactttgacacaagctcgatcgttgacgtccgtggaaagatctagttctcggagcctaaaccgaacagtgtgttgtagcttgtatgtgtgtaagaaacgtcaggtcaagggatttgtatgcgtttatttgtttgtttagttctctttgccttctgctcctatcttcgttgttgttattcttttgttcaagtgtgattgggtatacatatacacacagaagagaagagagattgagtggtgcccctctgtctgtttaccgtctctcttgttagaatcaagcatgggcgtgcgaatagagcaaccagtccatagacacgcaagacgatcgtcacgttcaatgcagacgagcccatgactctgatttcttaccaccgtcctcgtaaggtcatccctgaaatcatatattcctcataaaataggagaaagagagagtctagcctgtgtctcccaaatcgattctaaagggaggcctctagccaaacgcccatggatatttcaaccatgagctattagtcgtccgctttgtcaagtttggcacccagtgcaacagttaaaacaaaacatgatgaagaaactcacatatacccgagactagaattcatctcttggctatcctgaacttctatcgacccagtcacaaccgtgatcgtcgttgtcgccgtcgtatcttcttctctgtcagagctactatacgttgggtcgtcagcgatcaacgaagacaccgcgctttcactttcactgtccctaccaccggccgaaaatgaactatctaggatctcagagtcaaatgctgaggaagatgtggttagactggtagattgctcgagagaaccagctcgtcctccctgcgtaaagacacgtagttgattgtctgggtttttctcctccactttcaagtcgagccgttgaattttcatttggtttctcagccggaaacgctcttccccatcctcactctcttcgctctcgtccttgatggtgtccctctttcgttttgatatcacctcggcctgtcgggttatctggccgattgagttcgtcccggatgcacgaacgattgtcctgtgattcagaccgaccagatcgtcctggctgtcatcatcactcgagtccgagattggatctgagtcagaacctgatgaagaagaatatatgccatggtgattaggtagatataacaaggaccgatgggcacgtttcattcttggcgacaagtctggaaatgagaatgcggtcgcggcttttctgggaagtgaacgagcaggggaaattgagactgagtcgaggtactgttcgtttgcaggtttatcatcgataatctcttgagaatctgcaacaggcaatgactcgtcgtcctccgcctcgtcgtcgataggactagatgagatgagctcgatggctctttgctgtcctctcggcagtgtatctttatgatcaaccggaggtcgagcatctctgatagcgctgacagtgttgactggcagtcccttagaagaactgtcagcggttccttcagggtacaagcgaggcttcacgttggactgaggttcaggaggtatgaccgagagatcgaagtctggttcaaacgataatctcggtcttcctcccgactttcgtctggatcccaaggtcctggcatctttcaaagattttcggtgggccgccgccgtttgttgttgtggtggtggtggtggtggtggtgcgcgtggggaatggaataattctcttgagcgcgagtcagagtgaaccaagtatgacgttgaaggaggagatgagatgaggggctttacaggctgaacgcgacttgttgcacgaggtgatattatctcgatatcggaaatattctccagagagatatcggtggtgtttgtcttcttgaaggaatatgatggtggtaaagaatcaaacggttgagaatctgctacaaaatcgtctaaagatgccgtcgcttgcggtttgatgaaaggggatattgataaagatgagctagatgggaaatgccgggatcttgattcaaggtctgatatagactcagcatgcgcggtgatgatatcattcgaacgaataggaagaggggatgttttggtcgaggtagtaggtaacgatagatgcgttgatggagtatacgttgagtcgttcgtgtgaggataaccactcctttgttgcggtggaatggaatggtcaggtgttgagaatgaaagaatcgtagagtctgagatcaccctatgtggtacagatactgatgtgtgtatcggtatgttctttacttcttctctgtgaggagatgtcttcgagagagcttcctcaggcaacgagggaaacagccggtccatcagcatccaaagctgaacgaccttctttgcccagtttgatagaccagtgctttctgactcccattgaagacgaagatcgaaccggagaaaagaggtggtaggcgcctcggcttctcctcttaaggccttcgccaggctgagagtttgaacacagaaagccttaatacccgcatatagtcggcatttgacgtccaatttaaccgataagaaaagcctcacctctctacagagccttcggtcctgttgataatctttctaacgccttgtactttgaccaaggcgtttgtccgaaattttgcaaacttagtgttggtcgcatggacggtcttcggatccagaactgacggctcgccaataaagtatgacgatggtagaggtgaaggagggaaccacaggttgaccagtctcaaagagtgctgatgtgcgcgaggatttgtcattaaatggtgttgtatatgctagagccaagagaagacatttggttttggttttggttttgcatttgatgagatgtgtcacgattgaagacgggaggaggctcactaacccaagaagccaggatcaggaggaatgcctcccccttttcatcaagatctttctcacatcgaacatttgacattctctttagtatccttctatccttttcttccaacttctcccattgtatcgactttgctcgacttgctcttcttatctctgagcagagatgggcattccaatatcgaaggagcgacacaagaccttggagtttgggtaacagatgaagaggggccgaggtggatggggctgtaggaagtagctgatcgatgagttcctggatgatgataggcgaaggaacagacataggatctctgtctcgtcctggaattactgagtcttgtatccagcgtgttcttgtctcgaagaagccttcaagatcgatgtaagataagacaggcaatgaggacggacgaacgaacgaacgaaaagaacagaagagctggtaagtcagtcagtcagtcagtcagtcaatcaaacactggtgtctagggttatagctcgacgcgacgcgacgcgttgagacgcgatatgcttacgtaatacctggcgtcatccccccagccgaggcaagagccgagccgctcgtgaacgacaaaattcaaaaggctttctccatcttaagctcattctcatctaaccgactcatctcgttcccatcattcccatcattctaccgccatccatgtctgttcgagcatccctctcttccgtgtctagacagactttcgtcgctcctgctgctttccagatcagggcaaagcataccctgcctgagcttccttacgcttacgatgtaagacttttccgtgttctcctattcgtcgctttcttggtttttttcgtcttcgccctctagctcttcttcgtcctttctgtcctgctctttgttgttgatattcagctcgatagactaacccatctcatctcctggacattcttttactggaaacgtatcttgtccttggtttttcttggctttggttgaaaattcctctccactcaggccctggagccctccatctccaaggagatcatgacccttcaccacaccaagcaccatcagacttatgttaacggcctcaacgctgccgaggagagctactcggccgctgtgggcaaggaggatgtgcttacccaggttaagcttcagtctgtacgtctgaccgtttttttatcgaccggaacgcctggtgaggagggagatgaagtttgatgagcgctcatcgtctagcacgttgacccgatcatacaggctctcaagttcaacggaggaggacacatcaatcgtcagtgatattcttcaaactcttgctgagcaagtcaggtcaagctgactgtttcgctttgtttctgcggatctatctcatccttgatttggcatgatgaaacagactctctgttctggaagaacttggctccctatggatccgaggaggctaccctctctgaaggacctctcaagaaggctatcgaggaatcttttggttctttcgagggtccgtccatctatcttcctattcagttgtgtttggttccggtatactcatctgttttgtttccccacaaaataaaaataaaaatcttgtcctctccgggggttcgactgcacgttcatagccttcaagaagaagttcaacgctgacaccgctgctgtccaaggatccggatggggctggcttgtatgtatcatatcctttccatctcaaactcttctcagagtctttttccttgagacttcaaactgactatacatgtttctacaacaaacaacagggcttgaacccgcttactaagaagctggaagtcaccacgaccgccaaccaggaccctctgcttagtaagttgtttctacatgattttctatctcaacgcgatctgcatgattcgtcactgattcactggattctcttgtttcgtttttctcgggatgatttcataaacagctcacattcctatcatcggagttgacgtgcgtatctttcttgaatagtcgtagcgtctgatctcgttttattgactgacgtgttgcttctgtccaaatcattaaaaaaaatgaaaacaaataatcgattgaccgacgaaaacagatctgggagcacgctttctaccttcagtacaagaacgtcaagcctgactatctcgctgctgtttggtccgttatcaactacaaggaggcagaggcccgattgcaggctgctctctaagcgggacgaaaagtaacgacatatgaagggaggatcaaatatcgtttcttcataaacaactttcgaggcagatgggagagtacgtacaagagaggtttgtatggagaattgagtttgttgacggttagcaggttatgatatatgtagctatagtctagtctaaatctgaaagaagagaacaagatggtttgtccgaagagattgagagatcaagcccggtcatctgatgtcgaacaaacatgccctggtctgccaacagtttctagcacattatgaccatgttcatgtgtaaattgggaaatgagccagaaaggtttattatctaattcattgattcatgcgactatggatacatatgggatttccagaacaaacagatgcaacaaagcacggcattttccaaagatcgagtcctcccacaagtatgcggcaaggtttgttgttaagagatataaaagcagacgacaaaacaaatcgtttatcgaccctgtgcaccaacaccgtgaccgtttgacgagttggtagagttgtagttgttgctgttcaaaggagctccagactggacgcttccaagcttcaacaacttctcggcagcgtcgctgttcgggaaaagaaaaggcaaaaaggaacagagcgataagcatatgtgattctctacttcttataggctcttagctcaagtcaactcacatgtctttggcggtaccgaagacgttctcaagctgctgcttggaagcttttccgagcttgccagtaggtccctggttggagaagaagatgtcgaaggctaagggcgatgaaaagcatgaagatattagctatcggcgcgataaaagtgtgacgagatgaaaatggagaaaagatgattcgcaccatcgacgacctcgaccaaaggaatggaggtgtcaccggccttccacttcttgtactcctcaacgttgacgaagatgacgaagcagtcggtggccttagcctcgggctcgtagatgctgatgaaacacaataggtagtaggagaggagaaagagaagatgatgagatgtcaggatgcttgcttcactgtagatggaggaagaagatatgcgaagcaagacatacactttggaaagagcttgaaccattgtagaagatgagtgtttaagtaagatgtttttagtttgtgtgtgtgtgtggctgagagatgagatgagatgagatgggatgaagaggaagaaaaaaaagggcagaaattcttggacgattccactttatactcctcctacgaagcctccgtctggacggggtcccagaccgtctagtgacgtaacccgggtcttgttctgtcacgggttttcttccgatgacggcggatgtttttatgatcacgtgacatgagcctcagatggttctatcttgttccaccagatgcaatgaaatttccaagaggccagaggacatcaaattgatagcatgggtattgagagtcaagggaccgaagctggtctagggtacagccatgatctcagtcagaccatattgatgacagttcaagcagtaaggacaactagaggacgcttgtcggtgatagaaaaacgaggagctttgggttttacgctcagcccctctcagcgcattcacattgatagctgtccattcatcctctaccccatcatctccgatttccatttctcggatatacagatgagactgtggatcactaccaggttttgttgtacttggatggtgtgagaggaggcagggctgaaggcagcttacgtaaaactatcagcttattcaatatatttgaatacaccttattcgagagcctctaacgcctagagcaatctcaagtcggttcgctcgaaaactccattgaaccctctcggccagtcagacaatcaatagtacgtctgtcgtcccatacatcctgatcttttgcttccaatctcagaagggatctgatcatatctccctgtacatcgcggtataatcaatctatctagctgctctttgaagagaatacaccggcatgatcattttaggcaagaacttagtcgagaaaaagtcggtccgagtaagtcttcgtttcttgactattctccatcgaatcccctgttcttaatttccatacacatcaccggcctacatgtttatctccatactaatgctcttcctctgattttcgtctctctttcttgatgtgtgccagatcggactgacccagttttttggaatcaaccacgctaccgccccaagaatccttcaacgattctcaatccctaaccgagcgcttgtctccgacctcaccgagccccaagtcgctgcattgactgctttcctttcatcaactaccactgccgagcttcctcctcgaacacccgttgtcgatccgctaggtaaccgagagcttttgaagggagagcctgagaaaccgctggcagagcaacacagagcagcggctgattggggacgaaacatgttggttgagcaagagctgaagacaaagtacaacaccgatatccagttcctatacagaataggaacttaccgaggaaaacggtcagtcgatctttttcccatcttcttagtctttatcgtattaggaatctctgtgacacttgatcaacgagctaattctctcttcctctgctctctgcgcctctcttctttatcgatcgatcaacctcagacacgccattcacaaaccaatcaagaccagaaaccacaacggtggaaccgcccgtcgactcaacagactcaagcgatacttttccacgtacgtcttgtcttttcgttcttgcgatcctatgctcaggatggaagtgttctttgatcgaacacattggctgaccgcgttttcctctttcttgcattcatctgttttaaaataggtcgactgcttcagtctcgacgactccttccccctctccgatgtcatacgctgggcttttctctagacgtttccgttcacctctcttctgataaacatatatgaattcatcatcttccatctttctctcttgaacattcacgagtttcgtcatctcttcaggtcggctacattgaaacgaaatcacactctttcttgctcgaacggcgaattatttgttatcgatcgactctttagatcacgtagcaaacgttaatgctgtctcccggattctcaatcgagccgacctttctcctggccactcaaaccgaacccactcgagagaagcagctgttgtcatattacctttttcgttttcaacgcaccgatcagatcaagggtttcataacaaatattagccaaattatgaaagaagtcaatcgatggacctaaagacgagatcggcgagataaatttaccttcatctccgatattgaagttgtacgtcttgtaaggtccaccaggaacatcaccaccctgtttagggggaacaccgactttgaacatgctcgagaatgatattccgaccttccatacagatactttgctttcttccagtgagaccgtcacccttttttccaatttgacaatacatccgaaagattagcaagagtaagcatatgtatgattgaggattaaatagaagaaaagaaaggaaactgacaatctgcggccatctggggagaaactgagagcagtaatattgtggttatggttgtccagtacatacagtcgagtggcagttttgaggtcgtatacaaccctgtttcccagaacgaaaagaaatcaaaacgcaaagatccaaggaaaaggttgaatgagtaaagagatgtcgtatcccaaagcctcttgcaaatcagttacttacgtcgcgccttccagagtaccaacagctaatttctgggactggccatggaaggatatcgaagggaaactgcgttggatcaagagcgtgtcaatccgtgcagcacatgataacaaacattgtgagctttccacctcatcaatgtctataccctcaaccttttgagaattctgctctaaaagaaaccgtggacttacgtgttgaccaaagaatccaagatgactgttgccgtctgctgaactgcatccctcatagtcgacaaattaggatccagagacttgaccactgcttccacgatctttccaagcccaccaaacagaactagcggtctcttctttgcgagcacagcaacgagtttcattgatgcattcctctgatcaggtgattccgcgttcagaatatcatacgatacggtcgtcatgaacaaaggcgtgtttgtcgaggcgatctgaagtgtggctgttctagcaagttgggacaagaattgagctgaagaggtcgagcttgtcaacgtactcgtcgaaggagaagacttccggatagataaacggaaaagagatctgagaatctccatcgagtcaacgtaatgttgccatacttggaatccggatgaacagagctcgatagcaatctgacggtatggggagtgttcatcgtttagatacagaacgatcgaattcgatatctctttcaagaatctagacacatgccacaagaagaacaggaccgagagaaactatcagcttattgtatgaagttacagtgaacagtatagatatcttactgcggagccaaaagactatggttctcaacagaaatatgcccaataagcacaagtgcctgtgccgctataggtttgtcatggtctgaggtcgtttgatgcacaggaactacaccgtactcaaatcaaacagataagaaaggtaagctcgagtagaacagtaccaaaagagaggtgtcacagaaggaagacagaacgacgaacgcttgtgtctccaactctctgcaatttctacgatagactcgtcgactgtccgcgcgagaagagatgcgaacagcagtttagccgcctgttgtatctccactagatatacgtagagttcaaacgcgggaagaagaaaattgagtgttagaatataacatccaagctgccagatgaaaggcgcatacctattggatgtaaccagtactggacgtagaaatccaaagtagctctctggtagccttccccaactgcttcttgcagtcgcatagtgtaaaatgttgtgatttcgttcgctgctgattcgaagcctggcatcgagagaggagaacggttgaaagaaatagaaggagcaacggtctcaatcgtgagaggagctatcaaaatctgccaagctatggagagcgatactaactttctaaggaaacgtatagctggaggatgctgacaatagtcaacaaacgtctacctgtgtatatcgaggagatcttccaaacatccgcagattctgcagactcctcgaatatcgtgaagctttgactcgcactattcgtcctccatcagtacagaaccgttagtatttgttcagttctccgtcaacatataccatagataacaaacaaaggaagggcatacccttgtagtccaacttttggccaatccaagtcgtctggctcaggtctccttaatcgaagtcgactttcacagcagtcatccacctctggatcaaggccccaggtcaagaagattgagagcagtccaccaagcttggtcactctattgctgaccgtctcttcgagcctatcttgagataaaattgtagcagaagattcggcagttttggagcggttgcggtctagtctttgagtccaagtggtgatcagagtaggaatatcaagtatgatggtcgatgctgtagagaagaagggaaaaagctacgttagcatacatcggtattatcggttggtatatggtacagtcacgatacagtcatgatacttacgatcaacgctaagtggagtcagcgttctgatatcttttgtatacgaaagagatttatccaaggacctaagtatgtgtgtatgaagaaaaacagacttggagttagaatcagcgacgcagcttctttttgttcatgccagcaacaaaagaggaaaatgagaatgaaaaggaaaacgatagacgaacacttcataccatcctccttcactggtcatctttattgcttgcgcctcgtccaccgatctcaacagctccagtgtgtttccatcccatattcgagcaattccttgcgcgtagacaagaagaatattttgtccttctccaaaggccaccttagttatgaccgagaacgaacctggaatgatgtaaaggctagaagaaggtgccccaaacacgcattcaaggatgagtcgatgatatgataactatcttccaagatatactttataagcatacgaagactcacaagctgaggccttccacatcgatcacaccgaccgtcccatctttagctacacacaaaacacagccctgtaactttccagctcgttcgtcgttcagatagactaattggatgacctcgcatgtgaacagaatccaagatttacgaagtgtacatgatctgtaggggggcaacagtttgattgtatcagtccacttattgggaaaaatactcaaggcgaagatcggacaagttctctgagtagcaaaggaagaacataagcggagaaggagtagcttctttgaactaactttgaatcccagactccaacagaaccatcgtcagcacctcccacaactagccctaaatcttcgatcaccttcaaacacgttagtccccctccaagccctgccttctgttctacctcatcattcttcgtagggctaacgtcgaatacatcttgtctggtcacttgcccggttcctgtttggtcgaacgtgatgcacatgtcgtatcatcaatcatactttactcgctcgattcgaagatcgaaaagagagaacgaaccgtgtcccatccaaacatccagctccccgttcttggagacgtccaatacacttcttcttccttgtggaggtcctagtacgtacaacccaggcaaaacgcctagatcttttacctctcccggtgtcgttgaagtccaagacgccatgtgcagaccatcgagcttcatcgacaagagcaggacgaggcctttctccggaaagaatcgtatgtggaaaggaggctcatcagtcattgggattgagtggattttatccaatctgaccaacaaatagcgaggatagaatttaacggagggaggaggcgagcgaagtatgtcagtcagatacattgctgattcaagatgaggagagggacaagacagactacctaccgatatattgtctttgaatggggctcagcgggttgtttagctccattcatattcgacgagatcaacttgtacacgcctatctccgtctagtcgtatcgaaacatgtgacgtagacatatgaggatgcattgacagcgataaccacaagaatggtcaaattgggaggaagagataaagaccatacatcagagtttggcttgaatagacacagttgataagagacttaccgaagtgccacagactaagatatcttccataggtgttacccatagatcctcttcaacttctaatttcaacgacgtcaagagtgctactgatgaatcttcgcctgtggacgaatccggtagtgcgtaaagctaccctcaccatcccaaatgttgtacaggaagagttagtctcaatggctctcgtgtttattttccctcgttttactcaaacacaatatttaggcctagcgcagagagacatgctagacgtacctcgactgtgtttcctgtgacccgaacgagcatgtctttactccaagcaaaaattgctctttcaaacccagtcggcttttcccatcttgtcttcctttccttaccccactcccaaccgacggtctttccaagtccaccgagaccatctgatccagttccgacatgatccttctctcgaccgctagaatctctcaactttgatcggaatagattgctgagtttcgatgcgctggccggatgattgaaacctgccgttcgatgggcgctgcttgtcgagggtgtaggcgagctgggacgagtctctaatcctagagcggatgctgaagattgaatctggagatggtaaggataaacagagactgtaccaggagaaattgtcatctcacatctttctgacggagatggcggagagaaagaatacggagagcattgagaagatatgcaattgatcggggaacctgccaaggtctgccaaggtgtcgataatgacaggatgatttccggtgtagataaacctggtgtatcctctctgacatagctttgaagagtaaagattcctgtgaaatgttcacgaggggtgtcttcggaggccatatcgaaacctgagcagggattctcgctcgaaaagttgttggacgaagctccagcactgatcgtgaatgatagcgtggtggaaggtgaagtcgacgaagtcgaaaactttgtcagaggtggaaggaaaccttcgaaggagtattccacttgagaggatgttaaaacagaaggaggaggaggaaccaaggcggtgaacaagcatacatcatctgttaatgagataattgatagttgcctagtatgcgtcatcgagatatgtggttaagttatgatgtctcacgacacagaggatgaagcgacggtgttaaaggttaagatatgagacgaaccctccagcctgtagacagattatccaaccacgatccttccaaacttctaatccagaaatcattcgctcaacagcctttcctcccagaatgatcttcctgaatggaccccgcttcctaacctctccgccttcaatattctcatgtactccatctaatcgcgttgactgaaatggaactccctccaaagaaggcgagatttctgaggtcagtgatctgggagatggtatgccttgaacgccagttgttgctctattagcgtaattgagtaaagcactagaagaaagcggcgaagttgccaatggcttgaacgacggatctgaagctaatgtcgggcgagcaggatccaatgtcttaacggagcgactagagagagacggagtggatg

SEQ ID NO: 2756 - DNA, 6720 bp, Xanthophyllomyces dendrorhous
gtcgagaggacgatcctatttcatcttcggacgatcggcgggttccggagaatcctcccaagacagtggagatagatgaagacgaagtattcgggtgtttccccgcaaggatctcgcgtagatcctcctttcgctccgctacggtttcatctcctggactcagcactggagatttgggcccaagatgagagacaaccgagacggaaggaatttttgatcgatgtaggaccgaattggatggagtaggcgaaccggaggtgagcgtcgatgagggtaggagggggtgtttcgaggtcatacttgatgacattgacgggctaggctcgtgcctacggtcaccatgaggagtagatgatctggaaggggcatttgagcttggagcttgaacttttgacggtgtaggagcagaaggatgatagatccaaagattaccctcagatgtacctagaacgatggtcggttgggaagcgaaggatgatgatgatggtgatagttggtagctacatatggatgccgttggagtctctggacccaaatctgagcatggtgactcaaacagaggcagattaatcggcaactgaagaccggacgaaagcgccatcgcttgcagaggagatgatgagactgatcgcttgggtgatatcctcgttctcgtccttctactttgcagaactgcacttcgaaggaacaggacgaacgatggtgatgatgaaatgttgtaaccaaaagaaggttgtaatctgcacagcaaatcacgtgtctatggcaatttataacatttccgaataagcttgattacgcaatagggttgtaagacgtcacgtgaaacaccggcccgaacaaacccgatgagcggaccggttcttcctgctgattctttcgttctcttcatccttctcatactaaccaatctccctccacactccatcaacgaccatcttgaacgcttgctttttccccctcaaatatctactcacatccatccgtttacctattcttgaactcaatggtgtgtttgcatgtttggttgatacatcctcacggttgctcagcaactgatgcttgatcaatttccccactttccttgttagtcttctcacccagccaacaccctttccggactttgtttcgtcggcggaatcattggtctgtctcctctgcgtctctctcttttcattgttcttgactaaccgcccgcctgttttcgcttcttattcacataggattcagcaggacacgatctatccctagcatagtaggcggtttcgctcttggatctctcttcgccatctctggaatgagaatccaggaaggactcgattatgggtacgagacagcgggtaagtcgttcttctcttgcttactttcactgctatacatataatgttctcagaggacaagagatgccaagattgcgaggtggtagtagagagatgattggagagatggtgagactggtgtcataggacaaatcaacctatcacacgctcgcccttttctcaaccaatcccagcagacggatctctactggttacattcccttcttcccccacttatgctttcttccatgaccgtttccactctattctccttctctcttctgtcatcttcaaataggtctgagatttagttagatctagtccagagtcatccttgctgttcctcacccttctccgtcccaacatcacaaaattcaagtggagaaaagtactgattccatttcaacccaactcctttacacccaagctgcctcttctgttttgctcatgctcgctggcctacctcgattccgaagaggacgtgtgcctcaagtcttgagttagttccttctcctcttcctctatatcgcatttagacattggccctgatctctcctcgctaaacctcgattttcttcctcctcttctgatccgttagctggactaggtctcgctgggacaggatactacggaaagaccctctatgatttttcccgataatacgcgtctttcgtccttatcgtcctttgattcattccccctctctgattacccatgcccatgctagctttctgccactacttctcgtttgacaggtgtatttgtactctttttgttttctcatatcatgatgtttttctaactcgagaggactgagatcagtgttgtgtcagtcgcatacgtcggatggatagtattggcgttagacatgacaggccgggaagtcgatgttccatcaagcatggacggtcatcttcgagagataaactaagaataagtcacgaatgatagtgaggtccatccattgttcgttattagtgagagtcgtcgtcaggttgtacagcagagaaggagaagaaaaacagagagaagaaatagcacaagagaggacaccaccgatcgattcttaatctagttgtgtccgaatgtttgtacgagcgtggggtcgagcaatagtagaggatgcatgaggaagagtagaggagtacatctctgaaattgggttcgctctgatcacagtcgccttcctttcctgtgagatttgaagttcctcatgtttctgtttgattcaaaacggagaggtgagtttgaaaatgagctctcatgatagcatcatcgagagggaaataagagaagacgagcctgttcccttttctgctcctcttctctgccccgttctctttctcgctctcgctcccttctctcgttctcccaacgcgctctttccctccctcgttgttcgactcgtctgcccagcccgcgctcttccttctcgatttctcctgcgcgttctgatcgtatccgttcggtccttcgagcctgtcgagcttcatcttgaagatgaatttctcgaaaggaggggacgcgtcctgctcgagggctgatacatctcttttctggtcttttttctcgtccttgagtggacaaagcgtctcggtttgatgatcttgaagctcttagtgctgattcttgtgtagaagaggttgatttggtagaaagagccgccgggtatggatagtatcgctgtcgatctggaaccacggaggcagtatccgttgaggaggcggaagcagtaaaagtgaaaggccgaggaacggtaaacttcatgttcttgtttgagtggtgcgtggttgacaacggacgggatgaatgagatactagagctgagtcagttggtcttggagttgaagaactttgtctattccgtttgtacgccgcagaaccatcgagggactcggcggccactgcggtcgtattgtatccgtgtacagagatctcctgtctagctcttttggaggtattgagcgaagcggtccttgtccgggagtaatcgacttctgtcttgacggaactcatcgcacagactgcgttgggtgcactcgagagttgctgcacgtccagcttcttcctcagacgagtgaacgaagctctgataggtgacaactcggcgatcgccgaggtctcttgaagcgcgcctgatgggccttccgtgtcatcgtcaacagactctgctggcctggctcgacccctggcaagattaggagtactcatcatgtcttcgagagaaagctgaccggacaacgaagattgcgaggagagagaagaggaagagagaaggcatggttcggtggtagatgtaagcagaaacgagtcttcgagggcatgcgcggttgtcgacatggctgtcaatagtcgtttgactagatcctaggatgctggcaagtaagagctgatatcaagatgaaccggatgatctcgataaagtatagcaaaaggacgttttgtacctccacacaaggaagaaaaccatgtatgttctactggagagggcaggtaaaaacccaagagaaaacagtcgcgtccaatggccatggttacaactatcgaccgtaaccaatgacgcagccaagacgcgtccctacccgcatttaggtcttggttacggtgaacgcgtttttctttcttttctctcttgctttccttgtgctcaccatccttcccgtccatccggtcgtacgttcacatcgacatccattagctcacacgtacagatagcaatcaggctcgcgatcgatccacgcggctcagagtcaactatgtctccatacccgatggaaacgccagaaatgagtacttcagtctgctcatcctctcctgctaggtcattacctccgaacacgccatcgtcttcgacgtttcccgtgtgtcagccaacatcttccgaaagcaatcgtcattatccttccaatcggcgatccaaaccaagcattcagtacggtcaagagtctgggtctctagctggactcgggatgggtgatgtcgcttactccttccttgggcttcagactcaacgcgtcactcctcagcaactctattctcatgaacagcagggccaacagcagcaaggcgcttcgagtgcggctaacagtccgcataggcatcatccataccatcattcacctttcacgtctcgcttgacagaccagctgttgccgtctgtatcgatatccaccagtcactcagcctcctctcttcggtcatccccagatagaccgactgtgtttcctacttcccgctcttcacccaacatccatcgccacagctccatcgtccctccgtctcctcctgtcgctctacgcgactcgctgcgtcataaaacccgctcccgttcgccttccgctcacactattcttggagggtatgccggctcatcgtctccgctcaagagaaaagaaggtatcagggagagaagtccgagtccgtcgcctatgaggccaactcccgaacggtcgctcgctagactatctgagaccgaggatgacggggaaagcgcattcgaagatgaggagatcgatgaactggaagacgatgaagacgaaaacgatgatgaggctgtgccgacagccagtcttccgaaccaaagtgatatcgttctcttagaagacgcgctatccgaactgaacgttgagtttggtctaggtgaagacgaagaggaaggtgacgatgagagcagagagatgagagggatcagagatatctacggacttgtgcaacccttgatgcctgtgttcaaatttatgccaaagtggaagactcagttggttgaacaggcggagactatccagtcgttgagaagagtgattgatgttcaggcagagttaggtcggttggctatggaagaagatcggttcgtttcatcttgttccatttcgtttcggccgaatccggttcgctttcggatggtaaatcattggctcatctgatcctctctactttttcaatccctatctggcaacagagcgattcagaaagtccatcagaccaattgggagaccgaggcactctctatgatatccaaagccgctcgatccacggggctgccacctgcttcatccttttcgtcaacagactccactcggccccactcctcgtctacgactggttcggctgagccaggcttgtttaaaaagacgagcagtgggaaggagagcgggttcagtaaaatagaaagtaatggacaggaagattatgagaatctgctccgacaatgggtggtcagttccccttaattttttcccttccctttaatagtatctgatgctaaaatcagtggattatcgattcggtgttccttcttgtacgggaataatatacaggagctgcaagcagaacaccgaaagagcacggcagagaagacaaccatgcgctactctgtacgtgttttctttctatttatctcctttcatttttaaactcgacaggatgactgagacgtttgcttcgttgatacaaccaaaagcttcgacacgctgaagctcagatacaacttctcaccaaggaactttacttcttgcgcgcctcagctcttcacggtcgacgacctatccctccctcccaatctacttcggctctccctcctcctccgactggcaaagttcattacacttccggagagtcatcagctcacccgccgtctccttctgctgctcgggtggtcaacgcgactattgtgcgcgcctctgccgattctggtcctgggccctcctcaagcggactcagttcaacttcaaccaagcgacataccctgggtgacgcccgatcggagcatctcttgttagccgcgagaaggctaaggacacttcgagcgaaagatccagaaattggtttaatccggacggaagactatgtcacaaacaggttggaagctcctattgttgacaggaacggtagccgatttatccgggaaggagcaggtgtaggcggagaagatgtatggggggttgaagatgagttcgatggatggctgggttcagcggctggtggaagacaagacaagacgcctcgaacattagggagaggcagagcaggtaatgggaaaggaaggaaacctaatggagtcgtcaacacaccgtccactgtcccgcgtccgacaacgacaacaagtgtaggaaagtctataggaacacccctagaaatacctgttcgccaggccgtcgaacaaaggtctttcccaacgcctacaacaacccaatccggagatccaaatgggacacccaaagcgaagaaggatctattcacccctcgctctgttggacctccgtccggagcaacctttgacgacctcctcatggctgtccacacgctttcacaaccattgacagtcgagtctgctggcctggatggggaacgtaaagttgcgggtagtgcaaaaccagatgagtcgcccaaacgacgaagagtt

SEQ ID NO: 2757 - DNA, 2603 bp, Xanthophyllomyces dendrorhous
caatggatggcatgcacgcttcggccttggacctcttagcgctcgcgacgtatcttccaggctcagatgatcatccgtcgtcgtcttcgtccggtgccggttcacctctacatgcttcaatccggctcggagggcttttgggctcgagctcaggctcggggatgggccaaaatggacagagcgcacggtatgggtcaactcaccctcgacaaggggccgaatcagaggacgagaacaatcagcggcaggatcagtctcgagtgtcttccattcgatcgggttcgattgacactactccctcctcgggttcttcccattcattctcttctccaccaaatgcccaagctatattggagccggcgttccaattccgaccggatccgccaactgaatcgactcctcatctaccatatacctcagctttaccaagatttctaccctatcaaactccaattcagcttagtcatttagtcaactcaagcccaggagggatcgcgtcgtcacctgttctgagacaagcaggggacaagcatatggctctctcggctattccaatgagagtaagagaagaacaagttgaatcgagtgaaggagaagacgaagaagatactgaggtcgaagtcaatagaactcaaagggactcctcacgcgcacaaaaccaggctcaacgacaagcgctcataacatcagcgtcagcgctgtcatcgtcccctagtttgaaagatggaaagaacgcaaaagcatgggagctgacggcagcagggatgccggcaaggagggttagaagtccatatctgaagtggagtatcagagaagacgagttgctcgccagagtgagtacctttataccactctatctacgtcctattaaagtaagagaaacatcgatttttgctgacctcgtttatttgacgggaatgtcttcttcgtgttcgcatctgtttatagggtgtggcaaagtacggacagaaatgggatctagtatcaaaaacagtcccaacccgaagctatcatcagtgccgccaacgttggcttcgaaaactgggtgcgcttctactccttcatcttcgtttgcagttggcttgcacacattcttgactttatcgacttactctaattctcctcgtctacctaatccaaaaaaattcaatttgcaggcgtgttcgacaataagccttccccttcccaaactactcacaacaacccttccgatgctcaagaacctctcggcataacttcccggaaaggacggttcccgaaaacagcgacagctgcttaatatgttatacccgatcaaacatctatccgaattatcaatcatgtctcgtcatgtttcctatcccagtggtgctatgcaacataattcttcaattttctcagctctggaatgagaatctaaatcgcactgtctccatcattgatgccgtttcggccttttgtcttatcgatcaagccgatgatcttttctattcgttttgtttcgctttgtatctagtcacttgtcgaccatatgtttattttaatatcaaatttgtgcatacaattgtgtgcacttcatatacataaccgagagatacatcatacttcttgacagagaccgaaaaagcacaaaccgaagtatacaacaaaacagtcacaaattccttttcaatagattgagtgatacataattaagggaggaaagtgtgagaacaattatttcagactggagatggatagttgctatagtctgctacccctgctaagtggaaagtctctcccaggagagctgtcacaaaagttgatttcaggagcgcaaccagagtcaaccgtcgtttcaaagtatatgcagattcataaccaagagcgaagggcgacctacttttgcaaatcaacatcatcttgtcaaatcggccgactagcgcaaaacacgttgcacaagccatcgagaatcgaagatattcctcctacatgattcgcaaagagtatcgacaaatcagttcatcgtctgctttatcctttgaaatctgtccgacccttgatccaaacctacgcttttcagaatatcaacggttactcgtctagggacccctttgaaccgagggtacgccttctcgttttcttgtgtaacgtcgcggtgatctatattctcatcatctacgaccagaagaccatgtcgtctttcgaggtatctttccaccaatctagattgataaggtgatttgagtgaggatttgaatctttatcccaagaaaactacaccattgtacgtacgggcatggtgtgatctggggcagaggactcttcgattggagcgctgtggagcagagtgagatcaccgccaaaacatctcccatctgagatgagataaccaattggacagaagatataagcgagagttgattcttggtctaaaaaaggagaggcatcttacgaatcgaggatcactcaatcgcgttcgaatgagaagtgccttcttccaagcagggtccatgacacccatgatgaagtgaagttgattcatcaaagtgacgatgtcggatagaacactcttaagagcagtgtacctctcaatcggccatgttcctcggaatgaaatctatgaggtagtcagtgtatatagt

SEQ ID NO: 2758 - DNA, 51076 bp, Xanthophyllomyces dendrorhous
gtgtatatagtatgagaagaacattaacacgccattacatacctcatacgttacagctttgtgtcttactgaaagcatcatgagaaaagtttctctattaaccaaacgatatacttcaaacatgtaacaaggaaaacatatgctcacgctccagctgactaaaattcagaggataccagataaaaccgtgttaggaaagatattcgggtgtttacagaaaagatgaccgggtagtctcactttaacttcttcttgacagctataagatttccctcaattcgcgcatgctcctcttcatcaggaacaacatcgttcgaataagaaacaattgcacatagtgcatcccctgtggtggtaatgactcgactgtaggaggccctctgttgattgttgaaattacaaggatgtctttatttagtcttggcctatatcaacattgaaaccatcagcgatacttacaatgttgcgttttccagaggccacaggaggaacagagctccagatccaagcagcagttatgccaatcatgacgagagtaaatcgtcgccaggcaacatcaaatccccatgaagctaagaatgttcagaccgtaatcaaaattaagagtggtaccatagacgtagacgtaatgacatatagagagatatctcaccgttggtagttctgattccgtgtgcatctgatagagagaatatattgtactaccttcagtgatcgtgcgatttcgaagacggcaaaacaacacttactttgccaactgtatccaactaccaacgccgtagataccgagtagaggatcttggtaagaggtggtgctgtaaaatgaaaagcataaagcggtttatactcgatgggtccgtttgtaatccttcaatacggaagacatcctgttcgcttacatggataatagagccggaacaggaacacaattgggaaggcgacagctgtgacagccgcctgacaattatgtaatagcaatttgaaagaaatgaaaatggatagaaggagtatgcttaggatcagatcaagacggcaagatgtatgtgacacagaaagactgaccattccgtaatggttccctatgtgatctccaggtgctccgatagaccagatgagaagacccgttacgcacccccttttacgaggaaaacatcatcaaaccaaacgaagcctcagtttaggtctttaaaaactctagagtcaacatcagcttaccaaaaggttgcaacttcaggaagagaagatatggcaaagattcaagatgataagtaatcaacgactatgtgtgatcagggtggtatgctgtagaacctaccaactcgagccacccaggccattgtcgtttcccctgagaacatccctaaggtcagctgagccatgatcaaagcccacaaacctctgttggcgtagaatactttagccgatcctggcgtccaggatggagtggcgacaagaacagtgattatcccagctttgcaggcaaacataaattggttcgatttgagcatggagaaggctttgtgaatccgagctagaaccgcaagaaatacggtggatggttcgagggtgtccggatctcgagcttgagcatgcatgacgaccgaatcagctctcggcttgaaaccatcgatgcgttctgagatataaccaatgaagaatgtgagatatgtttaggaatgtctcgaaagtatttatgataatgcgggcgcaccaggatcttgttcgcccatctgctggccatcacattcctcctgctctcgcgtaggaatgaactgcttccagtcgaatacaggaaaccacaagcgttgtttgggtctcttgagttcaatcgcctgctgatcctcgcaaagtctgagaaggtcatccccaaacgccagcttggaacgatgaaatcgcacaatatgtcagcagtgcttggtaataagcttgtagaggaggaaagggtctatcgtaccagattgaattgaagagcaaagcaccagaacaagtctcggtgaggtacgtttttgatctcttcatgattggcaggatggcttggatcgaacagatgctacatagtgtatgtttcaaggagagacttgagcgcagtgaaaaggagaatctaactgaaagacagtaccggaaagtactaaccgtgaaaggttcgatcactgataatctgtcaaccgttttgaacttgatgatcgccgccttgagtgcctcgatagcttggtcgtttgctttcaagaacgagtctcctctaaacttcttactatcagtagaagatagtgatcggtcgttgttcatccgctcagcccaggctatggcatgcttgatcgcttcgtcgagggctcgaaccagagggagtgaagatgaagcaagaagttgaagttggtagtggatatggtcatcttgaaattccgacttcttttcaagatccatgtacctaagaaatatcaaaagggtacaatagacaggtgtttaaactttgctctgtttctatgcgttctctgaacatgtcctgaacgggaagactccgaccaaaagattcaaagaaagctatcactcaccgatgactttcaaacagccctacaggttcttgagattttctcaatttttccaggagattgaaatggcttgtagaatggtgatgatgatgatgatctctggcatgggatctgcttggtgagtcggctcgtttccttccgctagtccaagatgatctcgaccgatcgacgttcgagaacctagtggtcctttcccttgagaacattcctgagcctgttgcaggagaatctcttccactacctggaccttcatccgcgctgctctctggatctcgttcaagctcagatcggggacgagacggaatcggaacactttccttggtctgagatcttgcgactgcagcggttgaattaagacgcggcaagttctcgtgagagcttgagggagaggtagcccttgaaggaggttgagatgtttgataaactgagccgggtcgactatcaagtcgatcagactcgttgtcgtcgagatcttgacccaacgcttctcgtgcgtggaacgcgttggagtctaatacgtcgtgcgtcaaagcagacttgaagatatcaaaaaagaaggtgacttgattgaagagaacagttttttttcgtattgagcgttgagttaactctgagaagcatgtgatgaaggaggagtaactcactccctcctgatcttagggtcacatccttgacgctcttccctagtcgctccaagtctttcgctcctaatcggccccaactgacgtccatacccagactacctctgagggctgacatagctccaaaacctactgtctcactcttaactttatcagccctcaaaggcacgccaagctcgatccattcattcaaactggcatttcctacagcggcagactcgaacagagacttcattgaggtcatagagctctcgagaggagacagggtggcgcagaattggttaaggtagagataggagaccgattgaggaaacaaaaacacagagaggacgagatggaccccgacttgaattgccataggaatgaagaagaccaaacctaggagaattatcgaggcaattagaatgagggcttgaggtcaaagaaaacagtatatgacacaccagaagtatagctgtaggtttcagggaagaaaaggaacaggacgtcagcatatcattctcagaaatccttctaggaagcaacatttgtggctactcacaaatcgtaaggatataaaggtatcaacgtaagtgctacatccatctgaatgcacgccagtacacacggaagagtaatcggagagggagccgtccgagctttcaaccaacactactccagtgacaagttcggtatccgtaggaagagaacattgaatgagggaactgatcgatacagatggaaacagctaagggaggcacttacgaagaagccggacccaaatccgagaaacacagcgcaaacaatcgatgtctttgcttcaaggtaaccgcctgcgtagatgtctgcagccacagcttcggacgatggaataggattctctcgaacggcagagcagattgctgcagcaatacatacccatgcccaggagattgcgacgactgagtttgatttggtcgagaactaagaatgttagaaatctgacgcaaatatgaacaaacttcgtcgagacatttgacatacagagcatgctaaagaaatgaagttcggcattttgaggaaacgatttatcaggaggtgtcaagaactagttggcgataggaatatgattatggcatcaactcagtacagccaatatacccatccgaaatacttcaacaagacacgtactgcgataacgagtgtgaagaacgaagccgtgccgaggattttctcagtgggggaaatgatgaggagaagcattgctatccaaccctttgattcctcgagcacaacatggattgagtacatgacaatagatcagatggatatgttaaacagaagcaaactgatagctcacagcaatcgaacacctaatcaaaggtttcagtgatctccagttcatgacccccggtatccagtcaagctgcaatactccgttattcatcaccatccacttgatctttggccagattcctggtggtagcttcctctttgacttctctccttcttcctccagcttcttgatgtctttctcgttgaatgttacatcttttcttaaagagtgatcgtccgcggtcgactgagaggtaggattctctttgggtgttcttgttcttgatgctggcccattgccatcggcatcattcaattcaaaagctgtcttcctttgccgaggcttctctgactgaagtggcatgcgaacgatgcctgtggggaaagggtgaaaggtgaacagcactcaagagagtctcaacattcaaacaggagagaaagtagtagttgtatttttaccggcgttcatcatttaatgacggagtctccaactgcggggatttgacatttaccacgatctgaatttgcttattcttaataggtaagataaagttcatatggggcaacttcgtatccttgacattcgacatgtttctgagaagaggcaagaggttctggtacatgtgtaattttgatgctaagattaaagatgataggtatgatgacagcgcagatgcgaccgaagagacggagggaagacaatacaaaacaacagaaaaacaaaacacaggtgttatccatatatgctagatctcatgatccaggccaccggagctttagtccatccatccacctcgtatagagcatgtcagccacaggactcttctcatcagagaactttggcgctgggatggacatgttgtcaggctctgccgtattctcgtgttttgtgtggaaaggcttcccctctttgccctcagtcacagcgtgacgaacagtaaaatccctgcagtgtaaatgatgagcaacaaagagcaagacaaagatggtcagctccgatttacgagctatagaacaaataggcagaggtacgaactctttcaaacttgatgtgatgtcaaatagaattgagtatgctaactgtggattagctatcttgaggtcttcaaaccctttggaaagtagcttcaaagcttctctcgatggcgcgctcattctctcttgagaattctggtgttgtatgattcaatacatacgaaagcaagatatcagtcacgttgtccagactggctagcagaatacccagcagctggatttggacatactttctgcaaactaggcaagacaacagtatctaccagagatcttcctgcgttttcttccaagatactactgttctggctatctgatatatggatggagtgctgtctttccgtgcttctctcctgatctgtcgtagaagaagatgaagcgaatggcgtggtaccaatggatgaagagaaggctctcggatgcgggctctcagtatcatctgctgaactctctctcccaacctgtatctcggctgttgatgtctcatcctcccttgccctgctctctcctttctctcttatggtaccttgcaaatcaccttggttatcctcctgtgcttctaaaacattagcctcggtcccaaagctccaatagcttctggtcgaggaacccaagcacgattcgagatctttcacagtaggtaccggctctaatccatccaatgtgaaaggcttggactgatgttctttgtatttctcgatgagctcaatcaggatggtcgtcttgccagcggttctgatgaatcggtgctgaagtagatccttggctgtggctcgctgtatttcataacgcagtatatttcacgcggccaaacgaattgttagtggagctgatagatgaagaaaggaggattaaagactcgagaggtgtgaaagagggtcgcgcacatcaactgggtccttcatcaggcataagctcacaaaatccttgaacgcgtccgaaaaatccccttcgattgttggtgactcagctttgggaatcaagaaaagcactctcatggctgccattgcattatcgtcatagattagatttgcatgttagcctagaacaatctcatcagaccatgtcacagcaaagagaaccaaagagcaagttgacgaacgatgatattcgctaagaggaggaagaccattggccatctcgattgcggtgattcctagtgaccagatgtcagctttgtagtcatatcctgattgtcgaatcctacacatgataacaaccgtctgatcagtacgcatctttcactttgagtccttggcccatgcgatgggcacgattcgataaacatgtactacgcacacttctggcgccatccaaaaaggtgttcctacgaaggtacgtcttcttgatatgttgtttgtaagttgggcagccactccaaaatcacctatgtttacagttttcacaagccccatgattattctttcagtcagctcttgagcaccagactgacggttcattcaaaagggcagatatagtggtatcttgactaaccgagtttcacttgtccgctttcactaagtagtatattggctgctttgatgtctcgatggatctttccttctgaatgaagatacttcagtcccgacagaagctcacggcaaatcactgcgatatgtggttctgaaaacgttccagctctaagctagatggtttggatgtaagcaagaaacgaggaagatgagcatgttgatcagctttctcttgtcatgtagctgatttctatgatggctttgcatagatcgtgcttaccaggtcataacatgatcctccagcgagatactccatcacgatccatagctcgtatcctcttacaaaagatccatagtatcttgttatactggttggtcgttttccagtaacatcagtgtttgtgttttgtacatcatcagcaaccatgctggcatgatacggattagattaggaactgtgcatgtttcactcactagtccgagtcgcattgagcaaggtgagcaatttctgcttgaatttcagagatgctatcgttagagctttccaaatctatatttgagcgggaagttcaacaggagcaatgtcaatactgatctgaacagacatgatgctatctacttatgagtatcataccaatctgttttatggcaacgactttgcccgtatcctttctcactctgaaaccataaagatgtcgacatgataaggcatttaaagagaaatgaacgttagcctagtctctacgtgaatgaacaagagggcatctcgaacgacactagaaagggagagtagtaggttgaagacttttcttgagcctctttctagatccaccccttttcctactcgctctttcctttgtttcttgatctcctccatatttgaatacacccacaacagtatgtattcgattgtgtatccacctacacagtcacgtctatatatctcacacacacgggcatcgaagtagacaaacactcacgccttccagactgtcccaaaactacctgttcccaatctctcctccagtcgataaaacctgccaggatcttctgtgcttcccgttaaatcctgtttggcggccgacatgatctccttgcctggatccagacgggccaaaagcatgagaaaggagaaagagcgagggcggagtgaagggtgaaggcaacaagcgggtgcggtggttagattagataaggcgatgctgattacgtaagtatctatctttcgtctccatgacaatgccgctttctgaaaaataaaaaaatgaaacgtctgtataaacagaaagaaagggtggaagactttctgctctctcttctctcttccgaccacaacgcttctctgttctctttctcgttctctataacatccaactagctctcaatatggccaagaaatccgctcaagacaagtcggctgctgccgccgccaccgttcccaagactgagaagtccaaggccgttgtgagtactcgccttgagagggcagtgtcttgctcattgtagtctcgaacatctctctatcttggtgctaacgtatccatcccgttccatcttgatcgcaatctctcttgatagaagaaggaggccactcctcctgatgagtcttctgaggaggagtctaaggctgagtcttccgacgaggaggagggcaaggctgcccaggtcaaggccgccactaagaccactaaggctgaggacgtaagcgaaatcttccgactaatacatcaggttgaagggtttcttttgataggagtcatctgacgcgctgcgctggtctaaataccaatctttcgcctttttgcagagctcttctgaggaagagtccgaggatgagtccgaggaagaggaggaggaggaggtcaagcccgctgccggttcgtcagatttactcttgtgtcattttctgaaacgcggatgagatacttaatcttcttttactctctgttcttcatcccatatataggcaagcgaaaggctgatgaggagtctgctcctgctgccaagaagactaaggccgaagctcccgcgtccgctgccactactggcagcgataaccctccttcccagactttgtggatcggaaacctttcttggaagcttgacaacgccggactggaggcttactttaagcctcacggtaacgtcgtttccgtccgacttcagaccgatcgagagaccggtcgatcgagaggtatcggttacgtcgagtttaccgatcaggagagcgcccagaaggtctacgatttggccaagaaggaggctttcgttattgatggaagagacgtcaaagttgatttcgctactcagcgaggagccaaccctgactctagggcaaaggcttttggagacaagatcagtgacccgtcggctaccctctgggttggttagtacagaattacttattatattttggtgtgggtagggttcagatcagactggctaacgatacgttttcgtgtgaacataggaaaccttgctttcagcatgggtgaagatgatctctgggaggctttcggagagcacggagctgtgaccaacattcgaatgcccactgaccgagataccggtgccgccaaggggttcgtctttcgccatctcttctcgctatagcgcgtctttcttgccgatagaacgaattttctgatcatctctcttcctttctgtctgcgctatcttacagattcgcttacgtccagtttggatccgagaaagatgctaccgccgctttgcaggctatcaacggaaaggacctccagggtcgacgatgcagaatcgattacgcgcctgccagggatgagaacggtggtggaagccgaggtggatttggtggtggacgaggcggtggacggggccgaggtggtcgaggtggtggacgaggtggcagaggaaggttttaacttacttcctcatcttcctctctttcgctcctttcctgatgggtttcttgcctattgtgttggctacatctccatacatactcttctctacatacggcctatcctctcttatccttcagtttcatcccatattccacttcattctccctacctcttctacctccaaaataaaatctttcatacggaaatctcataaaatacatttctttccttcttcattcttctctcaatcttttaaaattgggtttgggtcgtatgttgtattctatcacaattttcattcctgttatgcgtgatcgtcttcaaggacttacatatcatgctcagaaggaaatagacatcgatgatagggttatgcctcgtgttttaatccatgtatttagcttcctgttcttcttctttttctcttcagtgaacaagcctttctgtagcaggctcgtggtcaaaggatatgttaggagagaacgcgcatcatcacatcactcctttggtggccaccgtactgactaccatcttttccacccactgcttatctgccgagttttttggcagtttgtaaagcttagtccaagaatcgatcagaccaaaagtcaacttttaccccttaaaccccgattcatcatacttcttatacaagcgcacacagacatggagaacagtaagaaacaaagaaagggagaagacttaccttctcaactaccttccaatcaaccgtgccctctcctatctgatccagactgacttcatccccatcgaccaaacttctcatcttctcctgtatccatcctggtgagttctcagtagatggatctgaatttgtcggtggcggtgcgattcggacaaggatgagtgaggtcgttttaggcgagagaccaaaggatcgaagggattctgcaatctgttgtgacgcgaacaccatggttgttagtagaaacgagagaattctcaaagtaagcagcagattacgaacattgtttgaaggattcagcataaagaggatttctgaatgcgttgtctttgtcgataaagcttgttgggacgaagctagaagagcttgatgaatccctgtaagcaagtgtgctcttgatactatctgcgtcaaacacacgaaagcgagaatgtatcagccagcgttgcagcagaagcacagaaacaagcgttcgacattcctggtctccgtccgagcaccaagcataaaatcgaagaggagaatgaaggtgaacactcaccgactttgcctcgataaaacaaaagtcgtatttgtcccgttcagagtctccagcgggtccgtccatagtagcagcagcaataagtgaacttcgaatctcggctgcatttcgaacattggtaaataaagcgatgtgaacttgggaaagttcctcaggcatatgtgacagcggatagacctccattatgtttgttgaagaatgaatctggctggatcgaaaacaagggtcaaagttggtcggatggatgattgatggtattcaagatagttgcagcgcaggtaaaaataaaaagggcttccttcgtcccatcaaccatcatcccatcagtaaatcataatcagcatcgcctccaatcttccagcaagagaacaagagatttaggtctaaaccatcaagctaggtattcgagggaaagtagactgaaagatgatattcactctgccccttctggcactactcgcaccgttaatcccttcattctcacaagcggccgagctcaggcaacttcaatctgacaacttcaagcaagtcacttctcaaggccaatggtttgttgttgtttatccttcctctgtttgtatgtgtatctctgtgtatcgactgatagcaatggtcggatcgatactcaggcttgtggagcattacagtccgcaatgtatgtgccgaattatctaaacgagataacttctccgatctttcaagatgctatgctcgagtgttgctgactgactgtatcgcttggtgatactctttgtcatcaattcaggtggccattgtagagcctttgttagtcttcttcttacgcttcactgattacgaccgctttattggctaacacgagatcggtctgtactctgacgaaatgtcaacaggcccctacgtgggagaaactcgttgaggccaagcagtatctagagggtgtggctggattccacatggcgcaagtcaagtgagttgttcatcctacatatggtttctctcgataattaagagacaggtattgatatggatcgcttgctttgccatgttcttcgccatagctgcctagcacaaggaggtgcgcgtgcagtcttctttgaagtcgataaatgctgaggcaacgctgaccgagccttcataatttcgtgcgcttagatctgtgcgacgagaatggtatcaaaggatgtgggtacacaaaagctttctaaaatcatagatttaatatccagatcaaggaatgaacttagatgctaatggtgttcatctgtttaatctctatcttgtagacccgacgattacgctgtaaggaggcctcgtgatttctccttttgcttttctgagatccacctaattaactcttctcctctacttatagtttccaggacggacagatggttgagaactatcaacagccccggggattcgatgaactgtctacatacatccagaattcagctacaaagtattccaagcgtcggccccttgctcaggctggaatccctccaccagaattaccttcagcatctggaagtacagaggtcgtcagtatcagctccaaagatgaactagatcggatcaaatcgcagggtggattcgtcaagttcttcgcgccttggttagtttacgttggttgatcttctgctctcgaattgatgtgatctgatcaaggctattgatttcttcgtttgatcctcaggtgtggacagtaagccgtctggttttctcgttttaagctctgtttaaatacgcaagactgactttttgtatctttacagctgcaagaaacttgcacctagtgagttgggtttcatgatgtttcaatgcgcatttgcacccatcttgttaagatagaatcttaagctaaaactcttcaactcctttctacagcgtggaaaaagctggctgaagagataggaccaagtataactattgcagaggtcaactgtgatgaacgaaaggcgctgtgcagtgcagaaggcgtcatgggttaccctcagctctacctgtacgttccaagccctcgagatggatccaagggttgaatcagtttctaactcgtctgcgttcttcgactcactgtgccactcggtatgtttcttgcggatggaatgacactaacaagatatgccaaaggtcagaagtatgaacataacggagggcgcacgctcgacgcgatgagcaagtttgccaagaaagctctcgaggcgtatgtttcccttttttcttttttttctttttttattaaaaaaagaacaagactatctgccagcgtctccgtttattaacattgctcatgtattgagcaaacagtggcgagcttgagtacatcaatgttgatcgcatcgagagcatcaccaagaaggaggaagtgtttttcattttccttcacacctactctgcttcaagaaagattctagtaagtctttctctgccgtctcctttaatctgtgtgatgatcagcctatctaaagtcgctagtttggattacacaaggaatccgtgatgagtgcctcgaaggcacttcttggagaggcggttatttatcaatctcgagatcttgaactgttcagctacactggtgcccaacctagttccggtccggttctgctctgtttcaaggaccatgactctactactcccatcgcgactttttcgttcgctgagacgacggatgaatccgctgaacaggacgttagcgctttcctcagacttcacaagctaccgattgtagtcaaagtcgacagtcacaatttcaaagaggtgatgagatcggatcaaggaagcgctgttgtgctggctgggttgaggactaaaggaaggaaggatggcgagttggagacagagatcgaacaattcactcgggttgcaagggcctggaggaagggtggaagacggtttgaacaaggagtcatctttgcttggatggacggtgataagtgggagaattggttgaaatcgaactatgggtccgtccgagatttctatcttttcggctatttgttcttgtctcattcaaaggtttcgaactgaattcaagtcatgttttctcttcttattctccccttgacactgcagtatgaaacggtccaagatgcctgaagttcgagtaactaatccgcctgtgcgtcctactgaattccgttccttcaacatctctgctgtttgccaagtgctgaagtttccatccttcagaaattcgaatactacgacgtgactctggagatcgaacctatcgaatttaatggggaatccatattttcgactcttgagggattccatcagaacacacttcgaccaaggacggtggaaccgttatctcatcgtttgttccgagcttctgctataaaaactgagggctggaaggtatgtcttgtccttctttttcacatgagtttctttcgtttcaatagaccactgatctatgttcttctgaattcgtgaatattcctgtggggacgaagacatgggcaatggaaaacatggccaagtttatcatgatttgcgtcggtttaagcatagcaggtatctggctcgctcgtaaacttatcctttgggatttcccaagtgatcatgcaaaccatctcaagctttcgaaccgattggattagagttcatctcactatctgtttctgttgtggtgattaatgccttataccaaagtttacgtagtttctcttatcgtttgttcaggtctcaggatgtctatggcggattgaacttgcatcatggcccgtgttactcttgtttttggtcattgagaatcatattatgggaagaggagggatagggattgtagggaataaaacaaagataggaaaatcatctagatcttgatctccttgagtccatcagcccagaaggtgatgaagggagtgacaccgtcctctcggtagttgaggagggcgaccataccgtcagggttcatggactctccagtaaggaactcgtagtccttgaagtttccgagaaccttcttggccaaaccctgggctcgcttctcgaaagccttgatgtcatcatcggacttgccggcgtccttgagggcggtcttgagggtcttcatgtagtccttgaggtaggtcatgtaagacttcttgtcgaactgggtggactgtaggtcacgaacgtaaaattatgaagggagttgattggcgtgggttttgtttttaaagaaaaaatcaataatattggtgatggagagattagtacgatcatgagataacgttggaagagatcagaggcattcgtagttgttgtgggagagaacagagagagaagaaggttagtgatgtttatacttagccaatgaaattggccggtttgagggttgtacaaacaaggaaaacgttcgtacctgaagtcgcatcgagtaaacgacgttgttgacagtctcggctccagactcgagctcctcagcggcctcctcagcggaagcgttggctcctaacagaatcaaacatgaatgagaaagagagaagggagagatggcatatagtcagattacggtactgtctaaaatttagaactagtgcaaggaaggagaagatttgaaatactgaggcacgtaccgatatcaacatcaccctccttaacggtgatcatctggcaatcaacctcgatggatccatcctccttatcgtggacgtcgtaagcatcagagaagagctcgtcgccggtgatgactatgggtgagacataccaacaaaatagtaaatttattgtatatgttatgactgaaaggattttaaaaaactattcttactgtcgcctgttagatagagagaaggaaaaggcaacggtcagccaagaaagaacgagctcggtatcctctcccgtccaaaagagagctcacgtactgaacaaaagcattttaaaagaggaaaggggcggaaagaagaggaaaggtaggcgggtgttaaggtgagggaccgaaggtgaagagacaaattgaaaaggtgtggagaaaaaaattaatagagcatagagattgagaagggcgtgtgtagccatctgattatgtaagcagcttggttacagtagccgctggaagtctgcataactctcggcaaggcctagactcttgccacatcgtgtcggcacagctttgagctctttaaccctaacaccacccccaccgtcttccccttgtttgttgacttttcttgttgacgtctttgtttgggtttccttctattcaaccatcaagccatcaaactcgacacgtctaggaaggatccactcgttttactcactttcccttacctttccttcttttggtccgaacagtataggtcatacttttaattctcaagagggttcgtgtcagtcagtctgaatcagaagagagacaaacgagatagaaaaccgggctcgttggccaaacaacggacatcattgttgaacgagaagacacccatacttacttgtcaatcctttctatcttgtgttctttcagtcatatccacgcatacaacgcttccaaagttctactttcctttctcgtgcctttgcactgagaacctgcatataattctgggcaaacaccatgtcgtgccataatccaacatcatctcctcatcgaactaaccctcctcctattcggattcctgaccaaactggcctctccgtcgcctcttctcgggaaaagatccgggcagagtccagcatgggttggtctccacttcggatacaaaagcgatcacagacggaatctcccaacagaccttcctctctccaccacaccatctcgtacgactcagatggaacaccaacagaggaagcgatgagtttggaagaacctctccgacgtacatcctctagctataaacaccttaaaacaaactcactagtttccaactctatcttcaagcaggatgcctcacctcagctctccgatagtacaccaaaaatgatgagcggtgaaaactcgcctacaaaggccttcagcggaaatggctggggaagtcctaggaaatcacccggcgcaggatggaagcacaacacgggctacaactccaatgacgagggttcttcagatgaagaagacgaagaagatttatctcgtgtatcaccagaaagaaagctggacttcaaggcgcggacgaaaggaagacagtcaatggggctagtgaatcttccaaagcaaggcaaggtgacctcatctccatttcttaaacaacgggactcgactaccacattccctttggaatctcccacgaaaccttccgttgtttctaatggttctgaggtttccaacgtcttgacctcttctttcgaatccacttccgccgacgaagacgatgagaccgagcaaatcgtcccggaaaatagcctgtccatcgaccattcgcctcacccctcacctttagagtcttccaccacgtcggccgaatcgtccccttcccaatctatcacgttttcgccttacaatcctaacgaatcatttccttctcctccaccctccaatgcccagatatcatttccctccgagcgagaaacaccctcgacccctcatagaccaacctcaattccttctcacatgagacagaacatcactgcctctccttcgcccaaatcgaacctcaaggccagagttgctcgaactggtggatcaggtacacgagagagacgaaagacggtcaccttcgaagaccggccggaggtctctttctttgaaaaggatgccagcctcgactacgtcgaatcacccatagtggacgacaacagcccaagctctcaggagacatttggaagctcacctataggatctgagtcgggaatgttcgaatatgaccactcaccgccttggaacgatcaattctctgttcatccagagcaccatttgcccaccgattcatcttatgatctcctgcctcagcctgcttccctccccgaagatgcgtcctacacatctcttgtggatctcaacgatgtctcgtacggctcctatgatggcgcgcacgatcctttctcggaggcaaacatgttcgtcaacgacctgctgaaagaagctgatctgttgactccaggaagtgtaagcagcgctcatttcccagaaacgaatgacgatactcagttagcgtccgacgatgatgctccgagttacattgacgagggtcaagagctgaaggaagaagaagcaagaacagctggagtatccgcccatggaacctcatatgggtaccgcggtccagaggaattccgtacagagcttagcctcggtgcggagatcgaaacctcttatgaccatcccaagattgatgcgctcgatcttcctcatctcagaagctcaccagctgatcctatcctattgaacggcaacgtgctcgaaccctccaccttctcaactgcggctgctcatcattcaccaatctccaccgcccgcatcaaacaatcaacctcgaccacatctctttcttcggtccactgggcaaaggaggatgtacaggcacatcaatccggtcctttgcctgatccgttccttactcttcagaccgtccaaaacatcctgacgtctccctcaccaaagatgaaacgatcgggttcgtcgacccgatcgattgcagagttaactcacggcctgccgaaagaccaacagggcatcccgtacggtcgaactcatcactctgaacggcgatttgtcagaagagttttgaaggatggaattggaatagaggagaagtcaaaggatgaccttgaagatctcatccgtgaagacaaggaaaacagtttcttaaaggaggttgaaggagagatcgaggagaaggaagaggctcagagaaggaccgggcaccctctagtgggaactaggggactagtgttgagtgatctgaatttggcaggagaggatgagaaggatgtgtttggagacaagatcgaggtcgttcaggtttgtctcttttttttctttttttcttttgacagcgtttggtcttgatcctatttatgagtcaaagtgttgaccgattgtttctttggtcgtcgatctccgcccaaataggcgctacagtcacctgcgcgacgagtgtcctcgtccacaccttctaaatcgcttccaagatcatcctcaaacttgatgactctagacgacaatccgtattcacttcctgattttgggactcactcgcctctgttctattcttccgaagatactcgccccagcttagatgagttcggtactggatcggccaaaccgtcttcgtcagctgatcgattcaagcttgaggagtttggagacttgtcttctctcaataggaatggcttcatcgcctcgagtgccggagcaggagattcagtctcgagcagaagtagctccggcaggagtcccaggctgacaagagagagtgttcgaagaaggatggatgctaggaagaaggaagcggaagaacaagctgtgtccgatttgaggtcgagcccaaccaagaaaaagactgttgtggacaccagtggagggtggaaaccattggatgggttggggatcggtcttccggatgagtcgaaatcagaaagatacgctgatttaccggagcacgaaggtctcccctcaccatccacttctacgtgtttcacttcgctctccaaagctcctgcaccatcttcttcgaagacagagcgaccccagatccctaatcgaggtagtgccctttctgctaaagagatcctttcagcaaagtcagctctagaagaactggccactggaatgggcggcttatctttctatgagaatgcgcacggcaacagcgaggaacgaattggtgaagtgaaggaacggtcgattatattggaatccaagaagattccttctgagtcttcttcgactcccgtggaagaatactcagccttacttgcgccatctgggcaggtgatcggacttactgcatccacctctgcagagcaggctaagcgagatagcgaactcatgcctcctccgcctgttccctctcggacggctaccgctgctacggtttctgctccgccaatttcatccgaccgggcgtcgtcttcacctagctcttcttggttgggcggagacctcgattctcaatcaaaggaggaggctgctgcgactcgaaagcgagcggaaagtagttcgaccgaacctacagatgtgaacagcgtcacccctcgacccagacgaaagtctaggaggagtatgagtgcgggagaaatcatgatggatgatttccaacaagagtcgagtagaaactcgattctgatcgacaagttgttgatagatgagaaagatggtgatggatttggagaaagcttggttcaagagattcataagatcgcggatgacaagaacgtgagtttgagttcttgttcgctcttggtctcaggaatttcttcgctctaatcatgcgtttgctcccttggttacctagcaccgttaccgactggttcaacatcagcagatcactgcatccgacgagaaggtatctcacagccgccgggctggagatctagacaaaggcaggtcctggaggtctgtgaagcgaccttcggatatggtaagtcaatctgatgacgtcccctgtatcctatcgataatttctcagctcatcacgtcaattacgaaacgttcatctcctagaacgagtacgctcaagagattcgagagatccgggctcgagagaaacctggcagagcacatgccaaggtgtttgtcaagagtgagttgtccaattgtattttatagctctaatggggtattttgtttgaagtctgaccataattgctgaacatcaatggtatgcatctacctagttgtatcgataaccgatgtggacgttccttttgcaaaaggcgagactcctcaggttcgaattgctcttaacaatggtcttcactcggttgagaccggaacttatcctctccgggagaaggttgatatcggccaagagtttgaattgtaagtcatatcttcctgacttacagtgtggatgcgatgctgtggagtcgaatgttgacttagaattcctccttgctctcgcgtccttgtgttttgcatataaagactcggccttgataatcttgagttcagctttgccgtcaaagtcaagaaagacgccagcattgtcgataggatcagagcggtatccactccgcctccgatcaaagagctgccaaccacgcctacaaagcagagtggtttccgaaaacttatggccagcccgcgtcgaccgaaaccggtgatacctgtgattgtacgtccggagcctccgaaggacgacctagtcaggtatctcgcaccggatggtacgctcgccgtggtcaaggtggtatttaaggatatcgcctctcggtgtaacggtcaacttctatcgcttcatcttcctctgacgggacgttggaaccaagactctatcactcagtccaggtctgctggattgaatacggcggcgaatcgatcgaggacgatcggacgaatggagcttcagttgatgatgattccttccttacccggtctatcacctgaacagctgcctcagtcactagatgatgctatcatcgggcttcgacatgtgcgctggcacaagatggactatttcaacgggacgctcacccagtctggaggggattgcacggtttgtttgattctctctgctgattttaaggttctctttgttgcactttattctgataacatctcattttccttcgatatttctgtctatatttccgttggaaacacagtcctggagaagacgtcggatgcgtattgtgggaggaacgctcgaagcatcgaacgatgtgaccggcaagatcactgctcgaatcgatctgtctcagatgacgaacgtgacagacaacaacatggaagatagtcaaaacccagatatggaccggccgatgagcgtcgaacgatcattcaccttgacgttcgaaaacggggaggacattcagttttacgccgacacggacaaggacaaagaagactggtgagtggaatctaccgtgctttcaattccgttctctcgcgtgcatagcggctgataggttctgggctctatttgtttgatgtatccatctaggatcaaccacctcaacgaacttcttggccgggtaccgagcttacctctttgggctgaacttctttgggtcaaggaccatccagcgccatcatcggaaaagtctggagcaggcattccttccagcccgcgatcgtaggaagacggagtattcctgctttacgcacttacattcatttttctcatttctattcttttttctttcttttgttccattccaattgcttcgcccatatacccagtccctctcgttttgtttcgaaacacgctacgcctgcagcagtagcaacctttatgacacgcatccagctcctttttcttttctaatggattttcctttctttctctgccttgcttgaagcaacttgcctctagagactctccttcattttcatccgcttaccatggttcctttactccacctttcccatatattctcgttctgtttctcatgcagatgggttttgacgaagcaaatgttactgatgatagggaccgagagagatcaaggtcagagctgaactcgatagtcaagagatttaagtttgtgttgaaagacatcaagctcgaatgatgaaagcaaatagtgagggatacagcatccgtgcggatatgataaacagtccgcctacatgttctactagagatggttttgactggtagagaacaaactaaacctatgacccatagcatctgggtagtttcaatatcagaacacatccaatttcagacggatggtttatcgaccaacatcggttagggttgccctcaccgggcctgaggtctgtaactacgacttagctacgcatagatgaattatttatgattctcagtgtagggtcggttcctgggaagaaaaactttttgcgggtggcctgtttgacgcttctgaagaaaagagtgttggacttgccaggaagacctcacagcaagactaagactctcaaacatggtaaatcgctccctcgcttgatcaaactgtcctccatgtgttccacccgacatgaatctcgcttccagaaaactgtgcgatgtttgatggaaatttggatggaatgaggaggtgaaaaaaaagaggtcggggattgaaacgggcaaaaaaaagaacaattcttcaacaggggatcaccatgggattgatggacgatagaggaagagaacaggagccgaatccttgtaggagtctatggaagaacacgacgtggatgatcggctcgttgccaaaggagatattcaatcttgtcggtgacgatctgtggatccaagagcgttcatccatcaacaagatcatgataacactgaagaggaatgaagtgctgctcgtacgcatgtcagtaactgtatgctgacggtttgtatttggccctcttgtctcttcattcttgctctgcttaggctaccaagaccggcaagactcgatccgctctccaggacgtcgttactcgggagtacaccatccacctccacaagtacgttcacggaaggtctttcaagaagcgaggttcgtaccagttttttccttccttgtatcgtttctggctagagaaaacttcagtaaacaagtagtacagccagctcacaagttctcttcgcttcctccgttcttttctctatggcaaaaacaaatttgtgatgaccaaaaactttctacaaaaatctaaaatcccttctttcaactacgcccgtcttgtcgcccctccaaccacatatcctgccttctcatcctcatctgctgccttttcaacaaaacagctccttgggctgtcaagtccatccaggagtttgctctcaagtcgatgggaacccgagatgtccgaattgaccccaagttgaaccaggccgtctggggacagggtgtcaagaacccccccaagcgactccgaatccgacttgagcgaaagcgaaacgacgaggaggatgctaaggacaagctctacactcttgctaccgtcgtccccggagtcaccaacttcaaggtcggttctctgctttcttttatgctttcttgtgtgtgtatgtcacatccggaaacagaagtctcattatttgtcttgtttttttctcttccctcggggtgtttttttttgctgggtccaaatcgtcctcttgacttgtccatcttcatgtaacagggtctccaaaccgttgtcgttgacaccgagtaattttgtcttggattttcatgacggtcgattcagctgtttcttggcgccattcttcttatgcactctgatgcctttcacgacacacttggtctggttcacttgttaagaatcgtattttgaaggaaaacgagagagagtggaaaaacaaagaacaaactcggttttggttgaagagagtcatgagttttacttgagggttgtgtgaacaccgtctcatgcatttatccgtcatcactgaatcattctatcattctatcattgttgtcattcgttccccatcatcatcaacaacactatcgtcaacattgtatcatatatttgagtgtctaaagtgaacgaaacgttgacccgaggagaatctcgattcaggctagcgtgcatcacatagatatagttgatagtccgaccaaactgaccaggcatcaacgaaggacgaatgttgcatgacactgtactttttagattgttcttttaaaagtttcacttttcttttaataatcttcttcccaacgatctgaaccaccgtcaacattgttttgagaggaacaaccggattaacggtattcggatagaacaacgcgagcgaagcaaagcaagggacaacaagaaaacagatagaatcttgaggttggcatacaccaaacctgtctctgcatcctgacccttcatctttctctctttgggagggttcgacaaagggaaagatggagagaagcgagaagaagaggaataaggaaaaaagctcaccttcggcatccgagtcgaaaaagtcatcttctgaatcttcctcgtccgggtaatcgtttcgatagaaatcttcatctacatcatcggttccatacatgcaagcacgggaacgattggaaaatgacacgttgacgtcaacttggaggcttcaggccgtaatctagacagaaaggatcttgaccaaccattcgagtcttcatccacctcctcatcaatttcctcctcctcaccgtcactccccacgagctcaccatcgtcccctagataaccttcgacggtggccatcgcgcctaacccctccgcgctcgatagttgggcacctgaagagatatctctatagtagagatcgtacacatacgtagccggaggcgaggagggcgtgacagctggagctggaacaggattaggcctcgaaggtgtgcgcgctctagaggaggaagacgacgaggaggcagtggatgtataggtcgattccggattcgatacttggacaagcaacgtagagtgattgtacaggtaagcacaaagggagaggagggaaaaaaaagaccaagcaacgtgagacagaagagaaggaagatctagagtggacgaactagccaggtagtcccgcaacataggcagaaatgcagccatctgcgggtcttcctcctcttcttttccaagaagaatctggttctgggtatggtcttgaccgggctgggaggaagttgtgtttatctggtgtgcgtcgatgactttaagcgcaggcgcggacggcaatggtagggaaggatcaggtctgggcacaagacagatttcgagaaggacatcaagatcagttaaaaacatgttcagttcagctatgcgccgaaaggctccggcgaacgacatatatagcatgactaagaggaacgacctacgtggcaagaacttctggagctctgttcggtcgtctagaacggaccgaaggttggagagggttaacgatcatgtaccgtaccggttgcttcgtagacgataccgggcgaggagaaactataggaatctcgggagcaggtggctttgatttagcctcagccatgagttgagctatacgtttctacaaaccaagaaagacggtgaaatgtgagcatggatgttataatatatcgttcccagacgttcttgtttgcagggaaagaaggaaacgagaaaatcactttcaatgcctcgccaccttccccttctctccagtcctccttaacagtctctgccagtctgaatacacctcggccggaagggtctggccgatcgaagtctcttgtcttcttcttgggtctcgagccatcgatgactatggtgggtacatcgcgtcagctcctggtcgagtataaaaagaataggttgaagaaaaaaatgaataagcaccaagttggtcgagaggatcttcggtaatctttcgcttgatccgaagaatcgtgtattgaggcacagccgaagccgaagacagagacatgtttcctttctagttctttagatttatctgtttatatctgtgcttcgtgtggaacaagatgatggtaggacaaagctgatggagtgtaggcagagcgaaagagagcggggaagaaattcattctgtaattctttgccttcgttatttctccttcagacaaccatcttgatcgttcacatcgcggtgatcacctttgttccatctagctatgccagcttctccttcttcccggcctagggaccgttctcgttcggcttctcctgttcgttctaaacccaaggctccaaagcaactggatatctacaagaagtctagttcgcgtcgagatcctctggatgatctccctcctcgctctgggtctggatcatacagagattctggccgagaccatggcgactatcgaagcagaaacgacagaagagaagacagagggtctcaaggcgaccgtaggggtgactacaaccgacgagaagattacggaagggatgatagatacggaggcaggggagacgacaggtatgggtctagaggaggttacaactcaaacgacagagacagagatagcgacagacgagaccggccaggttcatcctccacatcctcgtcttccagagctcctcctcctgcatccgaacgtcctgctggtttgccgacatcaacagcagatccgtccaaaccagtggctcctgcggctgccccccctcctcggtatgttcttcacttggaatagattttgaccagccgataattagaccagtatctgagagtttctccgtccttatacttgatgttcatattggtcagaccgatgatgggaggatcgatgatcgaagtgattgcaaacgatcgtctaggaagaaaaggttcgtcctccagtattctttcactaaagcgcgtcatagacaatgtacaatgtctttgtttcttcctcttgggttaacagtgcgagtcaaatgctctcctcgagatacggtaggtgacctcaagaagcttatcgccgctcagacgggaacgaacgcgaagaaagtgcagctcaagaaatggtgtgtatgcgtatatcaccactcagttttaggtggttctgccactgacatggctagtctgttaccgtcttgccgtctggttcaaaggtacacaacgttcaaagatcatatcaccctggaggattatgaaatccacgacggaatggtgagttcttttcgtgttttcgaaggatgataccgtacacgattggccctcttttcttccttactcacgagttatatccctgcttgtgcttatgggtctacgtcgatatctctgtgtccgtttagagtctcgaaatgtattagaagaaaatgtatctggaactatgtgtgtgaatacgataatcaaccaggcgaaaagcgaatacagccatacaaccgcttgaactctgttcattcctaacttcccttatgcctaattctccttctccttctacaagcgacatcaatactggctgtgagagatataagacagaacgaccaaagtgaaacgggagaatgatgttattgaaactagagctcatgaatcgaatcgaatcaaatcaggtgtgcgcgcgcagtgtctcggtcatctgcgagtttcctaactctttccggctctctcacccccaccaacaaccattcgtcttcgaccttctttgtctgtattcctttcactctcctgttgattgcttctttaactggcttcctcgcatggatggacatcgcgttcgaatctcttactatttccaactcgcacaccaacggaaacgggcatccggcgtctctccgtaaacgacccggatcatcgagtgcgttggcccagagccttcatccgttagcctcccaggaaacggccgctcaggctcggtcgtccatagaggcaacccggccgaatctcgttcgaagaacaacagagacgctggaggaacttgaaagggtcggaagagatagtctagacggtggagtttcgggaggggaagtcggttggtcgtcaacttttggtgaccgcccgagcctggagtcccatcttcttggcaagagagaaaatggcggttcgggaagttcatcagaacgaatgtcgagtgtgctggttcacgaggttagtttgtttgggagtcgaccaacccgaacacgcgatacgaaagctaaggagagcggatgctaatatgacggaacgaggtttccctcatcgtttcataggttcaatctacagacacattgcccaaactcgccttactgtacggcattgatgttcgtaccccgaatcagtgtctttgtgagtatctcggaactgaatgttgacaacggcttcgtatcctgttcttgtgtttctttgtcttgtagctgtccctcttgaaaaaggtcaacaagttatggtctaccgactcagtccatctccgaaagactttacacatcccgctcgaggcttgtacactgcgcgagacgttgatttgggggccgaatgaaggtcaggttactctattcaagccctcgactcctccttcatcccttctgtcgtcggtaacgtcaaacgaaggcaacgggatcgaacaccctgagaggtcgtatcctgcctccaacggatctttcccaagtataagcgaagatcacgccggagggagtggagccgccgttgcgttcctcggttcgactaacatggcctattcatcttcacctagtctttccgtcgcatctatcacaacagctcaacctgcatcgtcagggttaaaccgttcaggggcaaacccatccaaaggaacggaacgggtgttatcggtgatcaaacttcctgcgtcagaactctcattctttccccgttcaacacctgcttccaatcgggcatctctagattcatggacgactcgtttggaacgatcagcggcaccttcttcaccctcgagacttgggcctcggcgagcgtcgaacgggtcgagaacaatctccccatctagatcgagaacgttacccggcaaacctgcgacgacaacgacttcttcgggatcattaaccacccggctgacgagtttgttcttagatccattaaacaccggcactgtttctaatcctatagcgtacatctcgaccacgagccgtcctccatctagatcaaaatcagtccggcacattcggcattcctccgagagccgagcgaatgcctcacatttacccctctctccctcctcgcctacgttatcgacaactttccgcaaacctcaacaatcagaacaacaacaacaacaacaacagcagcagcagcaagaacaagaaaaaaaacaaatacagaacttgacgacatcgatagcgacagaaggagcgccattggaactttcatcactatcaactcgaactaaagaaccggcccgaagaatgaactggtttgccgatccttccatccttccagcaagcactggcgcaggcgcgggagcgagcgtgaatggaagcgtaggatctatcaagacgactcagctggaagctgagcgaccgatgaaagcctcggctgtgcgaggtgtgggtgatggttagaagccgggcaggccttgggtctagtttggatccggttagatttttcttctcttttctccttttctcttcttcctcgcagtatcgacatagaattttttccctttctcttgtttttcgtttcgatttcttatctcggttgtaaacggattctccactttctagttctcttcttccttttcctcttctccattatattgtcatcctccaagcagctagttacaactactaaattcttccggaagaatctttggctcaacaagtgagaccaaaaaagaaaagaacaagaatcttatcctttgttcccgttccatcgttctgttcgtttcaagtcgaacggaaacccatgttgtatgatgttgtacaaggactcgtcatcccgactggtattatgtatgaagaaagaaataaaaagagaggccaatcctgacaggcgagatgagacacatcctgcacttcgtgttcgcgcaccggcccaactcagacagacatcttcatctccaactttggatgaggtttgtaacctacgacttcgaaatcctccgttctgaacccatcgatcccaccttctttcaattcttgctccgatctggtccatttcagttttgggaactctcttggctctctctccagttgaatcttgagcggttcgacatgatccgcatacacatgggcgtcacccatctggaggacgagttcgagtggctcggttccggtgacgagggcgatcatatgtgtgagtagagcgtaggaagcaatgttgaacggaatcccgagtccaaggtcacaagaacgttgatacatcagacaggaaagtcctggcttggagagagagccgggcggggctagagtgacatagaactggcagaacatgtggcatggcggcagagccatgatagagagatctgagaggagggtagggaagaggagagagtgagttggaagacatagagagaggagcactgaacacaaaaaaaaaacagaaaaaaacctaacctgctgggttccaggctgagaggatgattctcctatccgtaggattgttcttgatcttgtctatgcagtcggccaattggtcgacacctttaccgcgatagtcggtcttgcaatcgacatattctgctccaaagtgacgccattggaagccgtagacgggaccgagatcgccctctgcacggtgagagagtcctcttgagtcaaggaacgccctggagccgttaccatcccagatgtgaatatctttttgggaaagtaaggttgagtccgtcgacccagcgacgaaccagagaagctcctaaacatgtgaagagagagcaagacagagagtaagaagacgaagacgaagaataacaacgagaatcagccaagaataatagcaaaggcagtctaaaagaagagaaacaaacctcgagaacacctctgaagaagactcgcttagtggtcaacaggggaagcgtgccgttctggagagagaatctgagggctggaggcgcgaatagagcaatcgtcccggtccctgtgcgatccggtctgatctgcccggtatggataatggttcggatgaggtctaagtattgggcttcctcatgcttttctgtggacgaggctgggttgattggggcggtcattgtggaaaaggtataagggagaaacggtggagaggatgtatgtgtgtgtctgtgaacgagaaacagaccagagtaaatgagagcagactaggcacacggtcatgttgaccgacgcgccaagtaaagacgcgtgcagtgggacgcgacggtcacaacgcgacaaacacgtgagttgatgaagatggaactgctgtgccaggtctcatcgattgctcgttctcggcctcggccacggcttgagtatgggaaagaccgagaagctatttatatgtgaactcgatgtgtcgcgccgaatcagtatttcgtcatctcctatccagcagaagttcaagagtggcgataggcgagaggcgactcgggtagtaaccagacatccccatcgatcgttaaaaatacctatctgggccggccggtccgctctcatcaccgactgcttgctcatccttctgatcacttacgttgcttgttggccggctgaaattccttcggccagccggtcgttcgaagatatatatcggtgacctcgtccgtcattctttgtcctctcgttccttcgatcgacctcttgtgttccctgttccttcttcgccctcgagctttctttgctcggctgtccctgttccttgattattcctgttccttggcacgttcctgttctctgctagaacaacaaacgacaaaaagtccttcgccggtacgttcttcttcttctctcctttcctttctttcgttgtgctttctctttctctctccttccctcatcctaacacccacccttacttgccctgtttgttttctcgccatcgctcgctcgttccgctaacccatcgtcgttcatttttctccttcaggtttttcttctatttatcgtcctttcctacacttacactcacccacgcctatatacaccatgtctacacacccagtggacggtccgcttccgctcggccggtcgttggtaccatccgaacagccagtgttcactgtatcggccgctgagggtgactcgccattgactgcctcttcagccccagccaaacgggcacatggtgtcagcttccagccgagttcccacgtcgctgtgtatgaagatgagagctccgatcagtatgcccaacatgaccagtatgattcgcacaacgagaggaaccacctgtccccgtctgattactctccggtgtccactcacttttactcgatggcagatgaggatgccatgtcggatctagaactcggtgttacaaagaccgcaggcaaagcactcggcatcgatccaggagccgctacgactgcaattggacttccttcggtaagcctccgtccagagttccttccttctctacatcttactgtgacctaatcgagacgaatgtttcatcgtcctgttatcatccaatcttcaggcaccttcgaccctggtggactatcaaccgaaagatgccctgaaagagtctaactctggacaggttatgtccatcccgtcgagtcctgttcgaacctcgggagaacacaacgaaaaggccttggtcgggagtgctccggtgaataatctacctgccggtccacataatgcccacaatccgaaccttcctccgattccgttaggccgattcaaattcgtcgtcgtcttcggaagtctgatgatctgcgtgttcttgtttgctcgtaagtggtcttctgtgtaagttgtttgtggcttgcacgctgttggctgattttctctttcggttcccatttgctcttgatcatagtcgaccagctgatcatctctaccgccatgtgagtacaatcagatcattcttcaatataggccatacactgactaacccctctttccgctcgtcaaaccttcctgtgaacagtcccaagattgtatcccagtttgattccctcactcaagtcgcctggctctccaacggtttcttcctcacccttgccggatttactctcctttacggtcagatgttggccttgttcccgtctaaatatatcctcctcatcgccatctttatctttgaggccggcagtctcatttgcggagtcgctcctggcatggttgttctcatcgttggttcgtctagttatttttcactctcccactcatttttccttaggcgcgtccgactgacataacgaatttatttgggggtttgataggtcgtgcggtagctggactcggagcaggcgggatcttctcgtccgccttccaaatcacggtcgagctgacaaccctagctgagcgaccgagtaagttcatctagctatctgtgttttcctaacccgatgatcagctgatccaactgtcgtcaatacgaacattgcctttcgtcctcccaaagtttacatggctttgttcggtgcctgcttcgggctctcttccgttctcggacccctgatcggtggtgttttgacggatcatgtgtcgtggagatgggcaagtctattctactcttctgttcgcctctgttcttctattaaccttctctgccttgacctttcaactttctagtgcttctacatcaaccttccgatcggagctgtcgcttttgtcttgattactctcctgtttaaagccgcacccgctctgggcgccggaaacgactcgaggacttttatgcgaaaaattcttggtctcgattgggtcggaacagcaatcaccattgcccacaccgcctgcatttctgttcgtacttgcgctgatcatgtcgtcttagcttattcttgatgtactaaatgttacttcatctgtttccctgcagctcgcattccagtacgggggtgtcgactatgcatggggaaatgctcgggtcatcgtcctcttgattatgattcctgttaccctggccatcttctgcgcatggacgctttacatcgggccagagaaggctatgttccctattcggttccttcgacgaagagttatcatgtgcgtctctctacatatctgcttatatcgaaccctcccaagctgacctgtctcctgctgggatctctttcttgactttcagcggagcgtccctcactgggttcttcggttggatgactttcatggccgttgtctattacttgtccatcacgtatgtcgcgctttcgctccacttaagttctatctgtttcggtgaccttgacgtcctttgctcttgcgcactcaattctcccagcttccaggccatctacggaacctcagccaccaaagctggagtcgatttactctccatgattgtcgttcagaccgttctcatcgtcatgatcggacggtaagcacgctcttctcttttaccttaccgttgttacagattttctgattgggctttctgtttctcaccgatcattggatacacttacatcaactagtgtcgtcgcgaagaccggtcactacaaatacctcatctgctttggacctctcccaataatgcttggatggtaagtctactcatccttgaatggtgtacttctgcagaagtgagagagagaacttatcatctcttatttgttcttaatatttcacggcagcggattgatctactggactattgacgggggtagaggacataattatatcctcggtttccagacgctcattggagttggcgttgctgcgttcctccagaatatcattatcgccggccaagttgagttcagaaatgaaccccgattcatctcccgggctatcggtatcattacctttatcggtttcatcggtcgaattgtcggagtttctgttgctacctcgatattcaacaacttgatcatcttcaagctagataaatatgcccccactatgcccaaggcctaccagtccatcgttcgagacagcgtcgccgccatccggacggttgtacccgaggtttaccgagctgatgtcattgttgcgtacgtctgatctaattttctttttgcaccgtcctgtccctgtcaattctctaagaaggtatacttaaactgaatccccctcccttcttcgactctcgaacagttactccaaatcaattgcaccagtgttcatctatggtgtcgtcgcctccttctgctgcttctgctgctcctggctactcaaaaatgattctcttatcttgccccaagttcctactcaaccggctatcccgtccgccaaggaggacgaggaaaacaggatgcctcgaacgtccttctcgtcctccactttgtacgcgaccgaaaccgggacagaaggacaggagaaagaaaagcagaagaggcagcgggacctgagcggagattcttccgtgtaggtcggctgaaacatcttttgcatttctctctctccttttcctctacttgttttggttcctcttttgttcagtgtttctgcgacgtgttgtcctgagtaattatttgtctctcgagatgcatacgttatctctacatatgattactatatcaatcaccttttttttgcttgtgacttgcttattctattgattccttccattcgggcgttgccctctagaacattttgtaacatcgtttcatatatactctaatctataccctcctcgtttgcgcctgtctgtccgcgctgtgttttgactgcctttcttccttggctcttctcgttcttggatgtggacctcattctcgcgtttcttttcttttttcttccagactcttaaatggatggattaatggagccaaacagaaacagactgaaaagacctagaaagggaaggaatctaattcgaccagtaaactatagaacgaacgaacgatccaaacggagagaaaaaaaaagagaagagagaaggaccgtaaggggtatctaagaatcatgatgacaacaccgaagaatccagaggggaggcagacaaaggagtggtcgaagcagacatggatgttttagaagtgaaagaagaggaggaggatggcgtcgaaagaggagaagaggaagaggaaggcaaagaagaggaagaggaagaggaggaggaggaggaagaaggatcaagaacgaccgttcggccgacgtcaatcactctcatcacgtccggttggttccctaggcccatttctgcctttgcgatttctaaatcctgtggtggtagtgtcggaggctttagagtttcatcgtttgtttatttatacaaggtttttattattgttattaatcattgattcgtttataatggatggcataagattttagtttgagtaaagtagaaagagaggaaagaaacaagaaggacgaacctcatcactcataacccaggttccccaatgaactccaaatgagtatttcgcgcttacatcctgagagatcaaaacacttccctcaggatctgtatgatgcagctggtttcgtcacgaagagtgaggggatggttagaaaaaggagaaagaaagggcgatgagagagaaggagtcgtactgaaagatgccacctcggcccataagaccccattggctaattggacagaaacaatcgtgcttcaaagtgtttagtatgtgaaaacaaaacaagaagagaccttgatgacagaacgaagagatagctaggcttacaatagcagcgagtgtcactggtcctaggacctgtccgatgccttcaaaaagatgggccgagtaacctgagaaagcgcgacattcgagattcaaaccaacaaatcagccaactgagagtgaacttaaaacgcatgttgaacagacaagatagaacaggagaaagaaaagaaaaagaaggaagggaaaccggaacaacgaaccggtatcacccgcatggaagaacgataaagcctcttcggtttgacctggcttctcaacttcttctacgtggaatccaccccaaagggtcgtgttggtgtccaatccgttacgacctgaccaatgctactcgaacaaaataataatgaaaatcagcagagttagacctttcgagcatttggactagaccagttgatacagagagaaagaacgcaccatggctggggtacatgtgatattgtattcttgagatgagcttggatggctgaattttgccgactcccaccagctgcaagcagttcagaagcccaagtgattcaaatgcgtcagtagccgaacgcgttcaccttctttgtatctgccaaaagggagaagagaaggaccgactctagttcggtgacgttggtaactccttccttgttgaaccagtccttaagccccaacggaacaaaccaagatacagtatttccaagctcatggaccgctttgatatccagatggtcgaagtgactatgcgaatacataagaaggtatcgtcaggtgagcgtagcccgtaagcgcaaagattttaacatggttcagacaaagggtaccaacttgtgggagacgagaacgacatcgactccagggagatcatggaggttgcacggtgctggtcgaagccttctcggacccaggaaaggtggattgtcgagcgttcggtccctttgagaaagacaagttagataatagaggcgcgcaggaatcggtgagcattcagtcgagacgatggcacgagcgaagtcgcgcaatgaagttcatgaacggaagagtcaacaagaactcacgaaaaaataggatccgttaggatcttgaggcctgccatttgaacataagatgtcgactgtcccaactgtacgaccaattgagtcaagatatatcttcccgtggttagagatgtataaagtcacaggcgacctaggaagagatatttgatgcgacaaaggatggatagacgtacccaagtgtaattgagcctgtgatcatctacggatgatttcttgagctccacgaaatcaggctgtacaatctctgtcaattgttggagaatctcgagggaaggatattcttcggtgggaaaaatggctgagaggggtgttaggaaaagcttccaaaagaaccattcccagatgcctagagtcacagaaataaatgaaattaggctagacgcatgcgcgttatgtgcgtacagaaccaccagaacagacatcatggctagatacataccctgctctcgccattcagggaacgggttcactatcgatacgtgaggcgttcaaagagagatcagttacaaatggagctgaacaagaaagaaatagctttgagctcaccgtatcttccccagatctttaagcttgcccagcgctgtcgcacgagttccttgtcttgctctgaaagatgtccaactgccagcctcttcttgttgtcgattggctctgcgcctagataatgtgtttcttgaattcgacggtcaaacgtgcgttttctctcatagacaaccagtcgtcgtttggcgtccgtatactgacgttgcgcgaaagatagatctggtaagatcgatagacttaaaagaggaaatgaaacagaaagctaggtcacacgaacaatgtagtagcccatccatcctgtatcgtattcaccccgaggaatgacgaagtaaagcacaatgaaatagattgaacgagtcaacgcctactccggctgaatctgagattatatgattccctgaacggtccatcgaaaggtcatcgagcacagaccagagatgatagatctatggaagatgagatagactaacccgtggtgtaaattagaggaagcgctagaagcgtctttccgacgtctggaaagcaaacccggataaaagagggcccgtaagcgttgagacacacgttggaaagaatgcatcggagaagccaatgcggagaacttacaaggatgaaagaatcgaggcatctgagtatatagactacagtcttctcagatttaggttatgttcccagctagctcttgataagaaagactgcttgcccgctcgctcgcttgtgctgttctctgtttgtttgttggttggttggttggtgtagagaacggagaaggtgaggcaaagaaacactgggggcggacctggttacggatccgcttacgtcacccacggtgttgaggacgggggccgggctggtaacagaaaggttacaaagtcataaccacacaaggctctctggttccagggaagaagttcaggctcttggaactggaaaacagaattgataggattactaggaagatgtcaaggagataaggaagcaaggaagcaagtgaataaggaaaggagtggaagtagcagaggatcccagcttggaatttctgtctccaggtggttgagaaagcccaacttacaatgattcctagatcccagaagcacgatacaaaacacactggatatacaaatatacgctgaagcgcaaacaataagaagtagagcgtctatagatctcggcttgtgaacgaagtgtacctcagttttcatccctggcagtggatcaatcacaagtcacgtgacctgacaattctagcttcactcacttgtacctgcccactccctttcctattttgaaggaatagatctgttcagttaagtgtgtatgcatatgcatgcgcgtgtgtgcgttctcgtgtatttatatgtgcatttgtgtgtatgtgtgtgcgttgtacgctatgtatgtttgtgtgtcggtaagcgagcacgtacagagcaggcgtgcgctccggttaatgtctgtttacatccagatcgaccggactcttcaatggcatgctggtttctctttcggaccaatccttgctgctccttattcgatagacatccattcgcatcatacccacctgcatgtctgttctgagcttgatgttggtacggaagacccagccgagtgatcttcgggcgccggcacgggagaaggcgcagtgggagccggtgtggccccggtgtgatcccggtgatgtgttccgggttgatcctattacctccaaactttgttcgtctgatcatcttgccaaggacaagtgagagtcaacgacaagtcaagcaagatgagaatgctgccttcattccttcaacattaccctccatcatggaggaacactttctcacccctctcaaccgagagcatgcgtctacagattccatcttggattcagccaacgaccgcccgtccctccgaacacataggaaacccgttctgactcggcgtcgtcttctcatcctgattgcgatcttgattgttctcggaatctctggtggagctatctaccttgtcttctcggtggctagatatttctggcgtctagtctttgaccctcatcggggggctacaatctactacaactacaatgccgtgaatagctactacggcgagaacgttccccagttcgatgtcgtagccagcgtgtttgtcaggtttggaagagagtttccgagtagaaacgacagcagtttctacaataatctctctccagacatatcattccgtggggattggcagtcaatctatagccaggccgtcttctcttgaatcagcctcaactctaccgacacgaccttcaagaagacggtcaatttgtctatccctctggatgttttgtcagtttggttgtctcttgctcgtgtctctcttattatcctgagttcaactctctgacctctccactctcatccttctacgaaaacagatctcaattttacgagccccaaactttctttcccgaaatcatcaacaccttcgtcatcgttccatctgatcccgatcctatattgagctccctcagtccacctcgagtcgagatggaggagttcaaagaatggtatccctccttttcttccttcgaatctgcctcatcgactaaaaatactcttcaactgctcgctcgtcctaaggatcctctcgccaaccctcctcgtgatagctcgcatctagaaaacgtctcgcgatcgcttaacgcattttatgattctggggccgtcagagagtttgccgtgcgccctgttattaatgaacgggccacttggggtcagccagtaaagtaccgtgaaagccgtccgcctaacgaagccgaagagaacgaagatcttcaaattcaaagacaataccttccttacaagcgggatgcgagcctgaaaatcaagtctagaagctggctctctatggctaaggatacgccaaagtatgattatgacaaatatgttagaaaacgtcgtgatgtgggtttagaacaggttggtcatctcatgatgaggtttacctggtgaaaccagagtttagagtttgtgagcgctaactgtctttgaattctggatctttctgttggtttgacttgtggtttcttcatgtagtcgacgattgaattcaaacgagaccctctcaattggatggccttgatcgcctacattcctttcaatgctgtaggtcactaccggtctttaatcactcagcactttgatgcgaacagtacccatgatcctgccaaagcaccatggtttcgtagacctgaaaagactcatttctatggaccctatatgactctgcgtatgttttttaaatgtattcttctcattcaagacatcggtttagtcgacatcaagatgacccttctccatcctaaattccttcattttctcctccgggatgtaaccctttacatagacgatcatgcagctgggtctgaggattgggtcaccttgcctcgtatcgatgagtcttccaacgttcaagctggtgagcagtattcagggacagaaagaggatgaatctacttttctgacttctgcgcgctcatcaacctctcattcatccttccctttgacgtccttatagatccgttcactgttccctggaacatcacctttgatatcttatcacaatcgaaaatacttgctattgatgagatcaacgagaacaatcttagatggctcgatcaatatagaccagattatccatatagggacaatggttattcggaggccagtacactgcaggtggcggatttcataagtaggatcttctttctccctttgatgacaaatattttttgttcttggctgcctggtcttagagggtctctgatcaactgtctgtctacctgttatgcgtccactttaactactcccagatgctatctttgggaacagccacacgtattccaaacggcccatccttcgctccgtcttcatcatcattggcggcttgatccgataccccctcggattcatccttcaggcgtatcacctcttttcccggtccttgagcacgggccttagtcttccgtcgaccatcctttacctgtgtttcagtagtctgtacgaagcgatctcttatcaccgacatcgttatgattatgacagctctgcatggatgttggttgcagtacaggtgatcaacattgtttccatctggcgatgggcttgtctttggtggggcatcggcttcaaatggaacggccggagtggctcaatccctgtggggttctacaggtttgggcgaacacactcggagaggatgagcaggaggtccgaccagaagcttacgtgggttcaaagaggcgtggtatgtctcttcttttctttttgcacgaccatcagcttagcactaggaacgtcatttgagaggaagatcactgatcttgactttcgctttagttcgtagctattctgacgatcaccctaacataccttcctgaactcccccatcttatcagcccaacttaccttcagctccttcctatgaaatttcctaatcggaggcctcctggcttcttccggacgctctcaacctggtcagaaaagcttcggctgccgaaatacggaacttctctcaatacgtcattatcgatgatggcgttgttggcacaggtgttgttgaattggaggttggggacgttcgcagggtcaactccagctttcgcatggactcaagtagtgggcaccattcgtacgttgccttcttcctttttgtttcaatgttcttgtatccgattttcatcgtttctttcaacgctcttgatctcctctatagtctcgtggacgccaacggtcttccatactatattcggtaaattccacgcgatggatcctctcagaataagcgatgtcctgagattctgtatcgatctggtcattctctcgcaggctgtcagtttgccgaccgtcaatcagaaagaagaagagagtgaataaggtctggattccttacacatggcagtagagtgctatgttgtatgtatatacaataacattcatctgtatgatgaagaacgatgtgtatctcgaaagaaacatgacttaacagatccagcttctttttgcatccttgatgtcagggacttgacctgggcgataatccccttattttctctttcttctcctgcttctcatccttttttaatttctcatgctctcccatcacatcaacgtgcaggtgtacagtcttccagcgcaagtgcttctagcgccttcaaagatttgtcttcttgtgcataatcgctggagtctgaggatgatatcaaagaaggggctcctgtaccaccggtagcatagttttccaagccgagatcctttgttattccctgtacattgtgatataaatctctttcccaactccagatgacccctgcatcgtcttcttggttgcacaccattccagcgagagtctgaacttctttctcgcccgattccatttcgcgcgcggttacttctgttgtaaccatccagtaaccacttcagctctggatcctaacagcctgatgttacaccgcttcacgtggtatatcgtgccacactcacacagctcactttacctgctaccaagtttcccgaccaagatttcattagatagtgcttccaaatggatctctcctttcttgttccacaatcaccctcgtcgtccaagaagaaaccagcgaggacaccgtttgagagaacaatgtctgcaggctcacctgcctctggcgctccgaaaaggccttcacttgccgttcatcagtctgggtcatccatccgagcaaaggcacaatcgtccgtctcgttcaacaagtctattccccttcaatcccactcgacatcctacctcggtccgggagagacccaaactggatatgcagccgggaaaggaaagcgaaaggcagagcccacgagcgagcagacaaaggtcgtttggaagagtttgctagagagcccaaactacgttcgttggtcagtattctgtgttctggtttctccctacttctgtatccttcactctctactttctgctctcgctatgctgagtatctttacaaaagtttgcgagacaaagctgacggacccaaacttgatgaaaaactatcaggccgacctaccctcgtcatcttcagcaaaccacacttcatgcgctctgtgcactgtttgccaatgtatctgactacaaccatgcgaaatccttatacgctcaaaaacggacgaggaaaacaaagaaagccatcaagaaggtctccaagaccacccacacaaagccgagcccatcgtcagaagacaaggctccatccaaagccgtcgaatctccaacagagcatgttttagaagacgtacaggatgtttccatggtcgacattgacgtggagaatgccggaggtctgaagaacgtggatgaagaggaagatcaagaacaagtgatgatcaactcgttgcctccgaaaccatctattgtggaccacctggtgttaggaatcaatatgtgtaccaaatacctctcttctactcctttgcttccacctgcccctgcttctgcttccttgccgtctgttttgtcttctcctgttgagccagggtcgatcgagccaacacctctgccattaggctttctccagtcgtttatccccccttcatcaactaaaccagagcccattaccaaccatactgaatcttgcacgaacaaagttgcacagaaagggtcaaaagataaggaagaacatatggtctacctgtttgcctgtctaggtgatatctctcccccctcgctcgtcagtcatctacctcagatgtgtgcggcctacaacggccgacggaaagctttgaacttggaaggaagagtgacacttgtcagcttgggagtcggagcggaagctctgttggctagcgcgttgggtgtccgacgatgtgctgttttgggcgtcaaggtaagtcctcgtttcgggtcttttccttttcttgtgtacagggttctcttgccttgagtttctctgagagaaaaaagatccaagtctgaccaatctttctttccccaatgaaactgcagtcgactgtacacgcctcatctctgacccaacttcagacgattctaccacccagtcaatatccacccatccgaatcccccacctcgaacctcgatctcctttctccctcgctctttcaccctcagagtcaaacgcagtcgattctccttcaaaagggttgatcccgactcaacggtctttggatgtagtgatgactcctacgtctgctcaacctcgacctgttcttccagattttacacctactcaggaccaagctcaagcccgaacaatgtccttgtctcgaacaccatgcaaaaccaacgggaatgcccatgaggatatcaagttaaatggaaaggggaatcggaccacaaaagaaggagcactagcaccgatgaggataaagatgctcaaaacgacggcaccgaaggacatgaaacgtatcaagactgaacgagtgaaagccgttggtgacgctcggagactggcgaggacgaaagctgctcaggatgctggaaagaaggctcagctggatgggaagggaaaggagaacgggaatgggaggggtaatggaaaaagaaagaacaagggcaaggagattgcaaaagggaaggacaaggagaacgatgaaaagaaggaaaagaaaacgccaaaatcgaatatataagatgactgtcctttttcatacttctaaagtctcttttcgcctgttttgttttcattcccgttcttatctgtaattgttcttgctttgagaaaagaaaacgtctctttttatcttttgtctcgctctcgattaatattcaagagcctcgtccccttcgacatccattcctgtactcgcagtgggcgcagccgatccagtcaccgtccccgtcctcgactcatctacacctttcatctcctgatcctctccctccagacctatcgatttttctagctgggtgcctgtggttgtagccgatgcagggacagaagatctattgagggcagttgtagattgggtgtttgaggattctcggtcgagaccttgacgttgtcttcggagatcctcgatcgatttcatcaattcgccttcttcgttccttgccttatggatttgaaggagaaaccacccaaggaaaagacaagaccatcagaagagtgaacaaatacagacctactctcacgaagtagcaaaatgaggaaaaaatcagaaagaagggacaaacctcaaccactcggtcttccaatgcgcttctctcttccacccaagctgtcttttctcgtttaactaaattctcaacctcctcaagctgtctgttgactttggtttgctgctcatccgtcaatttggctggagactatttggacccaagatagatttagcaaccatgattcaaacggacaggacagagagagagagagagaagagaaccaacataaaacaaagcaggcagagtaacttccggtcttggtttcagaattccagacgactgactcgagattggaaataacgagctcaagtggcttgttgagggggataacgaggcgtctgtatcgggtgagactgattgagttggagcagaagaagtggtaaggaggaaagacgaaagacggagcagagaccgatggcgggtagccagctggaaacaaaaagagagggatggaaagacggagtttagaaaaagaggtgtgatctctgtaggtataaagagagaacaaaacgtaccgatcctgacttgagtttaacctcaaactcttttctctctgcctcgagccggagagttcgagccgaacgttcctttgtggcaaactcctccgagatcgtgttttctgatcgaagctttgtctggattcggtttgtgatgagctctcgtctctttgccgcgtctgacgcgtctcgtttccgttcttctttctatttgttttcggaagagggaaagcgaacaagagaaaggaggcaaatggatggtggaagcgcataactgtaagtcgcgttgcaattgagagaagcaaaggtcgaaaggcatgtgagtgacgtactttgaaagcatcaagcgtccctagcaagccaccaaagagtctctttcctctcttcttctcatccgctccaagtcctttcttacgtcttgaataggtttgcatacgatgcgcataaaggaaaggcgaaagtccaaggatcgagggtcaggaaagggggtaggcgtacagcccaaaaggatgacaagttgaaagagaaggcatagaggaaaaaaaacgagactaacctttcttctctcttttcggcctcagtctgcttaatgggcgagttcggtttgactggagggacggtggtagcagtagccgccggagaagtgatctctgtatctgctgcttgttctgtagacgtgagtgtcgatggctgggatgtgggatctaacgatgactgggtgatgtcggttgacggggcctgcaccgttccggccatgatgtcatcttcttccataactgtctgaatagaagagagaacgaataggatatcgatcgaaggctaaagaggatgagaaggagaagaggatggatctatctggatctatcaatgttggtgtgtgtatgtgagatttgaggtgagcgaatgagtgctggagaggatggaatacctgaaggtggttacgagatttgatctcgtaacatcatcagctgtgcatatgaatttgatcacctgatgtgattgcgccacactcgagcacaaacggtaacccgccctgtacatccgcaattgttaaacgatcggcgggttcgtcactgtgaagactgagagatcaacatcgggcggtgtttttgttgaatgactaaaatgatcaagaatagcagtggaagtattttgtgtatcgcttttaatgagttctatagtcttcttcagtgttctctagtctctatctagtgtcttttattctccacaccctcgttcttatctatgagcactatcaatagattctgttcgtattgaattactatgattacgatgtagtccgttctggttgtcaccgcaggctgtacaacacgccctaaaaatccacagtgatcacaccacatacccagcctctccggttttcttccttcgtttctttctttctgtctctctttcctgaaccccactccattttgatcgtcttgattccttttacattactttctctggcatacacaggttgatcctgaacgttcactgccatctgttttcttcttgtttctttcgtcctttccatccccccaccctcctacctagacatcctgccacttgataaccacctaggtcccatcattgttgatcgtttactgtgcctgttttaaattcccatcccctgtgcccttgatttctctttgttcccctttctcctctcctctccactccgcttgcccttatcccagaaaccatccatgctttcccaatcgttatctctcccactcgcattgctcagcgcgagcgcactgttcccatctttagcgtccggtcatatcgctctgtggaatccaggtacgcatgtatcatccatacactttctcaatccgccaagtattctcccttacaggattacatatcgatgacgcgtcctgggttgcccgcttttttcttctttttcaccgctctccctgtccctttgacctgttctcaggactctacggcttcaacggaacagataactcggtcgcccagtacaataccgcagctgcagttgtacgtatatgatgtttcctcctagtcttccaagccttttcctacactctctcttcttgttgactgataaatctctattgtcttttctttagggccctcttcgaaagtatgataacctgacacaatgtgagtacaccatcactgtctacaccttgactttgatttttgggattatgtatggtcgttgcaaagggctaacaagtcctcctgcggttcctgccctttagctgaatggttcggtcacggcttcttggatcttccaccaaaagacggcgactttatggagctcacgcctggcaagacggaaacgttcgaactctcatgcaaccgtgctttcacaagctacagaagcccgacagatactggtgacttacctgagtacgcgtgcactggcgaaggaccgttacacaccgtcaataacttcaatgacactacaccggtcaacactaccctcctcggtggttgcgtgctggcaattgcttatgagagcgacgtcaccaaacttcgtccagaattcttttccgtattctctgtaaatcacacctgtgtctggacgagagaaattgactttcaggtacccaaagatatgccggcttgtcccgaaggaggctgccactgtagctggaattggatccatacctctggaaattacaacgcagaaggccggggcgaaggctacggagatgagatgtaccacaacatgtaccgctgtcgaatcaataacgcaacgaacactacagctgtagttgatacacccaaggtggcggctaaatgcgagggtgatacgtccagttgtactccgggcgctaagcaaccccactattggtctcagcttgatggaaacaacaacaactctactgttcgtctaatctttctgcctttacgttggcttatgcgcctcggttgttgacatttctttcggttgcgcatgcccctttagattccaccgttatataatatgatttacggctgggcggacggagcacaggtaagtcttccttgcctgaagtgaggtcctgtcatgtcgtcgatcatgctgactagcttgttgatctctctttctctacaacagaatgacatttttgtgacctctacaaagtctaaatcggacgactcttcggcagctcgaagcatgccggcattgtcggccaagaacattttcttgatggcaacagcgatacttgcgagtatagtcacgatcaaaagctaagctggttagtctggtgctatccagcttaacaacccatagaatttttcattccttctttctttcttgtctgccggttctcctgtttcatgttctactcttccccaatcattaggttacaagtcttcctctcagatactccttgaacatagtttagtatagtttagtatagtttagtcaaattcgatctagtccagctgtcagttttgctctgtctcattctccatatcccatctccttctcttttttcttttctcttctcttctcctttttttttggttttccgggctggtcctttctttctaattcctcaagacgatcaatactgtatttctagatatatttagacgagtttttacttctcttttccaagttacttcacttagttaccttccatagaccttcctctttgctttgttttccccctcctctcccctcctc

SEQ ID NO: 2759 - DNA, 4977 bp, Xanthophyllomyces dendrorhous
cttgttgatcacacttgcctctggttttttaatcagaaaccagtggcgttatgaatgacctttatgtgttctttcacgacatggtccaaaggaaagaagagacgtttcagcctaatgacacgctcggtgcctgtgttcctgatcgacctgtagggcgtgcgcgcctatcgactgccttctgtctgtgttttcattccctcctccctcttcctctgactactaggttgattcatttgataaaccttggttgtttttggaggaaatgaggagaacaacaacatcgtttctttcatattctccctcaccgaacccaccttgctttctttgaagctttcttcctcgttaaaataaatgatttcaacattctggctgcacgtcagtctttgtctcgggatgtttcgatctgcatcagcccatgtcgccttatggaatcccggtatgacccctttcttttcttcctttctcaagtcgtctctcttccagagagttcttctttatgaaattaaagctggatacagagctgatcgatgtcttttatctcggtctgtttcattgtcgtttcccctttctgtatcttttttttctctctctctttggcactgccgccgacacggaaatctttggatgacgttgatgcttaggaatgtacgctttcaacgggacgagtcagactgtcgattacaataccaaccacgccgtcgtcagtgttttttcctggtcattctcaggactgaacgttaaaaccttcgttcgacgcgatagattatcgttggatgttgaaagccaactgcttgatttcatacaaagttctgacgctattttagttttttcggatcggtagaatcctttaaggcagtcggacaatctatccatcggttagtcctccaggtaaagttcaaagcgcataccaagggggtttcgttttaacctgtttcgttttatttccgtctgggtgcgttttggatgtgtgggtatgacgtaaataccagaacgatggtttggacatggcgatcttaatcttcctcccagaggcgagtatctaaattgagttctccttctcagagtttatggaaaaaaagcctaacccccgctcttgaccccttttttatttatttttgatcgaggagaaaattggttgattagacggggatttcatggatgttagtgatcaacataacctatgttagggttacacactaaacgcaagttatcctttttgcccgattataactcccctcgcaattgtcgataacgaacttcgaaatctcaagttgtacccaggtcaatcggccaagttcgagatcagttgtaacaggcagttcacaaagtacagggatccgactaaccagagtccgttaggagaatacgcatgtgataccgttggtcgtgagtttttgagagcgcgcgcgcgttctccttcacgaaggcaagagagagagacttgaactgatttttctctctggggtattggtgacccactggacccggatgaaaccagcactacatacggttcttaactttggagaagcagtagatgactcgaagtttggaggctgtgcgcttgcgatcgcttacgagtcggatgtcaagaaactaaagccagaagatttcaccatcttctgtcagtctcagtcgtctgttctcttggcttttaatcttcattcttttcgatgcctttgtgcaaattgaaaactcttgaactccgaagaagccaatcgaggaaagaaaactgacctgggcaaatgcgctgatatctcacccttggactttccgatcaaagcggtcaaccactcatgtgtctggtatagagagatcagctttgaagtcccacaggatttgccggaatgtgacgatgagaaaggctgtcattgcacttggaattgtttgttcccaccgatttcatgctcagattcacgaattcgttttgtttacatgcttggcgccgttcatctttgacgttgagaagggatccacacggcgaacaaccagaacgcagaagggagaggtgaaggttatccattcgagatgtatcaaaacatgtgttcgtcctacccctcttccaccgctcatcttccttggcttctctgatgccagatctgaaaggtgtgcctgatcaaatctctatgatctcttgatgattgttgtgtctttgggggatggtgaagtatagacagatgtaggatcaacaacgccacaggcgtccagccagtcttgaccggtaaagtcgctgccgagtgcatcaacgggaacggaacagagacgtctggttgtctggatggaccaaagactccatttgtgtggtctcaagctgaaggggacaacatcgtttctcaagtttgtctatcgtctcttggtctgttctactttgagagcgcgcgatgaagaacgatgactgatgagatgagggtttcttctttctctgttgtgagagtagacgacaccgttgtataacatgagtgtgtcgttcttacatcttgttttccttcgaaattcgatgagtgaatcgaaaaacccaagagaagaagtcatccctaatcttatgtatcttcttgtcttctcttgtggtcgagaaaatagaatatggatttcagaatggagcgcagaatgatatctttgacaccaaacccgacgacgatgacgacgacaacgatgataaagatgataacgacaaggacaaggatgaggacgagggcgaggcaaagaaggatgaagatcagaaagaaggaaaaccagaagacgcctctggccaaccgccctactcaccacatgaatcaatcgatgaaacaggatgggccgttccagagatctctatagggatccctctcgttggttccactctaggtttctttcttggtcgagtttaggttgagaacatcttttgtgttcgcttttctttcttcctttttttttcttttactgtatctactatgcttctttctttctgtttctgtatcgtcctgttctctaattcccgtataggtagacacatatacatatttgcacattttaaacaaagggaagaacgaacgaatgaacgaacgaacgaacgaaagaactacagaaagattgcctacaagagcatcaggtagaaaaagatagctcttagtacgtagcgttatgaccgggctggtacaccggctcaaacgcgtactgtttcccggtgtacaacgctagagatagatccgaatcgattgtgaacggagagggatccgaatccgagaggataaatactcgcatgaggtcggctaccatcctgccgaacaaaaactggccggccagattcagatgggtcctatcatctggcgagcgattgagtatttgcgaagcgctctggccgatcgattcgagataagcaatcgaaacctcgtgcaaaggaagaagcgcgcttcctgtggcatgcgcgacgtcgatcgtggcgtttgcccaaggaccgagcgtgtccgcgatcaatccggtggcgttgttgaaatttcttctggagagtgcggtgacgagtacagggttggcgccgaggttgttaagttggtgaacgaagcttgtcaggttggcagccatggattctggaggggcaattttcatgtcgttgtgaccgaactggatggtgacaaacaacttgttacctttctccgtctgtgtgcatgcgtgattgaaagaaaggatgagaggatgtaaggagaggtgagcgaaagaaagttaaagaaagaaagaaagagagagagagagaggacaaggagaaaatgggaacaagaagattgatacaaaagtacgacgtcaagcaaaaacaaaagacaaacctcgttctgaacgtcagcaagggcaagatcccagaaaccttcagacacaatcgtccctgtggtctttccattggatgatctgtccgaacaaaatgtaccgccagtgaggctgccgcaaaatccctccgcccagcccccggctttaagcgtcaacgatggttaagaaaaggttgaaaaagtcagctatcgagtcgcaacagaaagcgatgtgaggatgtttccaactgaacttacaattcaaagtcagtgtacccgaatgggtggtggaatcaccgacgaggacgaacgagattccgttgtaggatgtggtggtggtggtggtggtgatccgctggaaagggtacgcgttagagcgagcgctgcagcccaaggcaagattcaggagagcgctgataggcagagtggtgagacgcatggtgactgtaggattattcagggatgagcagatcaaaggctagagaggtcagcagaagatgggttaaccaggatggattgttgattgtgctttttatcgtcaagtacattggacagagccggaccggacggagtccgcgcgagccgaccggacggtaggatttacgagctaaagcagagcagttcgaagggttggtcagaggtacatgtgtgagccgcagagagagaagggatagcaggtccaggtgacctcaaaggtgatcttgagatcatatctcggatcgcacactgggtcaaactggactgaacggagcggggctaagctgaacgaaatcgagtggaaaaagtgattgaagaacacccaagaggggagactcatagggcgtcagtgtgcgttcatgaaactcagctcaaggtatccgctacgtgtgtgagtgtataaacgtgtatgtgtacgtgtgtgagaccatcactgtacgttggttagtatacacaatcgtgagcgtaagtatcagtacgggcgtggaaggtgagaatgagcttgcgtttggttatccgtttacgcgactaacggtctatgtgaaattcagcgtatgatattgacatgcacagagcctataaagatgcataccgattgtccagtctcgcattagcccggacaatacgcgtatggatcaataataagcaacgcggtttaatacttgggacgatcggtcggagataaaacgagcaaagaaagcaatttctggtacggaacccatgacgtcac

SEQ ID NO: 2760 - DNA, 644 bp, Xanthophyllomyces dendrorhous
atactcagctgatcattgagcccagaccgcgggtcttcggatcaaccggtccgaaccaaaaggccagccgatgggcccggactttgagccctgattgaacctcagagcgacaagccagccaagcgcagtcgaccgtccatgacgatgaggtctaggccctgcagacttccggcctatttccgattttgccgttcttttttttctctctctctcccctttcgttctctccgcctgactcttttttttctcctccttcccttcttgtctctcgtcgtccttctccttcttttcccggcttcttttgttgtgtcccttgttggtgtttcttgttcaagcactcgttcgtcccgcttgtgatcgttgtggttgtggttgtgttcgccttctcttttcgtctgaccttcaaccaacatccatcctctcaatccgttcgtccttacagggctcttcgaccggaagaaaggttcatcctatgaagagagcgttatagggaacaaccagtcttcttttcttttcctttccttccctttcttctttcttgtgttttctcttctttacaaacatcggacatacacacacgcacacaagcataccttcaacccgtcccttgttgttcaaacagacacacacacacacacacacac

SEQ ID NO: 2761 - DNA, 2308 bp, Xanthophyllomyces dendrorhous
acacacacacacacacactctcacactcacacccatacacatacacgtacataacaaatacacctccagcaccaccctcgttctccctcaaccccagtttttctctcgctcggtccaccagtcgactagtgctttcctaccatcgccatggccgaaccgatagaatctcccggactagacatagagacctggtgcccggtctgcgacaaactgatccatcaggcccgtccgaccgcccagtctaggttgctacaacagcagcagaaacgacaacaatccttggccagcgatgctccttctgtacatacagccgcccttgcagctcccgctccagtcaataagactggtccgctaaagtacattcctccgattgcacccaactttcgtagaagcaaaacgggaactatcaaggtccgttccaactgtgctcgagtcatcagggtacattcatgtctgactcatacacccacgcatacattctctctttctttccacaggctaaagccccgccaggagcgatcattgtgcctccaaacaccaacctcaagccgtctgctaccatccgccgaccacaactgggtaaagacctttcgttaaatcccactcagttgacggtcgtgttaccagatccgcaagtgtcctctgacgagaatttagacggagcgatctccaacctttctctccttcccactactcctgctacgactaccaccgcctctgttactgctgctactactactactactactactactgctaccactactactactactaccaccactattattactactgctaccgctaaacccgacgttatccgagttgaatccgaacgcaccccgctgcctacacccgtccctgaagtccaacctacggcttcctcaacagccactgtccctactcctgcttctgccgtgtcacccgcttcgttgctatactgctcattggaatgtgcaaagctagacgagatgcgttcccagagtgccctggagacccatctcccagaggtcctacctctctccccactgtccccgttctgggaccacgactctccgccgtacggaagcgacgccgagtcttcagattaccttacatacatccctcactcggctccgctcgagagacgaaactctagaggcactgctaccaccgtcagctcctcagaatctctccagagcttgtgcgacccacagccaatgtctcgttcaaactcgagctcttctcaccacaatggcttcagaaagttcactcccatccagccgtactctggatttccgatctcgcccagaaagtcgctgccaatatcggccgatcttctgcttgccccaccactcatcacctcctccagcctgacttcctctccgttgccggttccgacatacaactatcggtcttcctctcactcgaatcaccaccgggcctccttctcgtccgtctccccggcaccccgatcccatcacttcaacatcccttcctcgtcttcgtcctacgcacactcgtccgcctcgtttgagcccggatcagcaccggcgactgcctcgctctacgcagagtacgctacatccttccaaaaaccgtcatcggtctcgagcaggacgacgtacgtcagcccccgaaggtcttcatccaccatgagcgtctactcggtcatcagtggcgatcatcacactgaacattattcttcggaagacgactaccctaacgaccgacatcgtggtcggacgaacgaccccagaggaaggaccagaccaccgatgacagatagaagtacgtccagctcgaacggctatggagtgagccaaaggtcccatcgcttccagatcactccaactcagagctccttactcacgtgtggccaaccggccgacccgttcaagcctggctcaacccgtaatgcccgacgagactcgtccgcctcggtagcatcctttaccggatcggctaattcgtcgggtcaatactcctcacgttcatactcggatcatcacacctccccctcacctgcatacttctctaaacgggccgtcaacaagaacggatcgatggctgctcccccgatcgttcagtctggtctcagcccgaggcgtccatcctcaggtctctcaacaatatcagcagtcgcagcagaaacgagctgtgcttggtcatcgatggaaaagatgtacgagatcccgaggtgtgctggttcgggaacaaatccgtccaagagcagtttaggaagtgctcggctgttctactggggtgaatgagcaatcgacttggcggcgccttcgtttaatccttttcttgtctctttctttttcgc

SEQ ID NO: 2762 - DNA, 2221 bp, Xanthophyllomyces dendrorhous
ctccgtctactcagaaaacaaaaagaatcctttctacacccttccgttcatctcttcacccaacctctggatctgtacaaccttctctttttactctctcattcctcctctttttacccttcatcacacctttcattctctttgttttctttcttgacgaccttctcttcccactcctcttattcatctgtttacaatctttcttctctttctcttttctttcttgcatacgaccatcatcgtttccttcttctcatattttttttttactttcgcacgagaacaactcctttttaccaacctttttcactttcctactcgagttcactccgtctcagaagcaatctttctctcactacgtaccctcgacatctttcatgatttcttttcctttcctctttgtggctatcttttgcatgctcacacaccttgcaagctctgctcttcgttcacggcgaacatcttttatccgagaaacaatacaaacctcacagggaaagcgaagcgaaagagaaagggcgaacgggtttggccggcggcctcgcccgcctgaaagcgacttctaatgttaaatctgaaaatctctcgatcaatcatcgcatcatcattcatctcttcccggttcgaccgaacacgaccacggctgtccaacagatgatatcgtctagaactcggtcgatctctccgacgtttctcaaagcactcatcggttcatctatcgtccatctcggtctgatcgcttatggaacgtatcaggacgctcattcttcggtaaagtataccgatgtggactatgttgtcttttctgacgcggctaggatgatgtggaccgggccgggagtagggtcagagatagctgggcaagataaagatggctcgagtcaaggcctctggggaggaagttggttaggcaggtctgtttcaatctatccatcttgtactctccttgctaacatcaagtagaggagacaatcaactgatgatcaatctttacacccttgcgtcgccagtccgtacacgagatcgacctataggtatacacctttgttggctgtgttgatgctgcctaattatctagttcatccagcgtttggcaagattgtgttttcggcatgcgatgtgttgatcggatacttgttgtaccttctgtttcctccgtcttgctcggtacaaacttggtcgtcaacaccagctaacgacgagaggcatagaaatgaatcgactattctaacaacagacgaaacaaattcttcatccggtcaaaccggtatcatcaacaacaacaaaaaatctgcaaactcaccacgaaagggattctcctcgaaccttgaatcatcgacaatatggatctcggctctatggctgttcaacccggtcccactcaacatatccacaagaggttcatccgagtctctcctcggcgccttgattctcacatccctgtacctcttcgaaagctcgccgaacctattctcggctagctcgttaacacgctcccaggcctgggcatctgttgctcttggacttgcggttcatctaaagatatatccggttttatatgctttcgccgtactaggtttcttgggcaggaacgaacggacaatcctgggccgtctgggtgtctgtagaggtggaatcgaatttggagtcatctcagctgggacgtttgggttcgttacgctaggctgctggttgatgtaagtgaacacctgtctttatcctggtctcgatgtcttggtgtagatcactccttctgttcctctactgaacatttgaaagtgcacacgtatcatggcgcgcgttccctttgaccttgctcctatctttgttcctggtgatatcaactcagatggggatacccagcgatataccatccgtatctgtaccatcttacccgactggatcaccgacacaacttttctccatacttttacccgatctatctcctctcgtccaccaacctgtctttctcctctaatccaagcgcgctgataaagttgttgagatcatcgttgacgtcgttcgtccctcagttgggactcagtttcggtctcagttggtggttgggaagcagaggcgagatggcgctcgcctggggtctaggcacgatggcgtttgtgtgttttaataaagtcatcaccagtcaagttcgtctccttctcattttccgtctgtttgctttgttcttgtttctttctgaacctgtgtgtgtgtgtgtgtg

SEQ ID NO: 2763 - DNA, 14329 bp, Xanthophyllomyces dendrorhous
tgtgtgtgtgtgtgtgtgtgtgtgtgttccgaagaatgctgatatgatctttcgtcttgttgcttcccttttatttttattttttttatttaaataaatgtaatcgatgacagtactttatatggtatatttcgttcatgcctctcatccttcctcggataaatgtttcccggaaaaaggcgttctggatgatcttcgcttgggtttttggtcaggtgtgtctctgtttattccttcttcttcgcttgttttttttcttggttgtctctgagagtataatcgagtggcttagttgttccttctttccttttttctttctgatcaaaacaacaacaacaacaacaaccctggcaacgattcaaggccgcttggctgtacccggcttataacttagagtttctaggaaaaccatggtttctccctttgtggatgtcgagtatcgtttttctctggatcaacagttggatcctcggagagcttgtcagcgactatcgatgacgttgcgccatcctgcgtttctcttgttcttttctatgaacgttttgaaagatgagaaaaacccgggtagaacgatttcattcttatttctattcctatgttgacgacgacgacgacgaagggtcgactttctggaagaacctttcgacgtatctcttgagtggctcgtcagcatcgatagctcgtcgaagtgggttggatgtcgggagtgtatgtaagattaagaataggtgggatacaaccaggcagtctaacggggtgggcgtcctgtaaggagaagaatgaccatacaaacaggtacacacacacacacaaggtaagtatgagagaataagggtaagaatcgagacaaaaaaaccggagatccgtaagagaaagaaagtcaaaagaaagaaagaggagactagaacgaacgagcaacccaagaaccagtcgtccggacctgtgccatcagctaccaatctaacacccaacgctctgatagcttccgcgccttccctcttgatcgattccaaatcgactcgtttcagctgacccagactaggcaagggtgaagtcaggccgcctagtagtgtaggtggattaggtaataagagcgcaagtcgggcaacgctcgtctgagaggatgcaagggaggccatgtaggctgggtagatcttgtcagtcgccagacgaccgaacgcgcgggcttgagcttcaagcgtggcatttggataaccatggaagctggacagcacaagcgagaaaggggatcgaaagtatgataggattcaaatcataaagaattctcagcaaaagaggaatcaagatctacttttgaaaggatacgtatgaagaggagacgaactcggacttgatgtcatacagcggatgttcggcgtccagccaagctcgcacttccgaagctggtacgatcttctcgggcagcacaagagtcggtagttttcctatatggatctagctattagcacttacttacaaagtgacaaaccagaaaaaagagtgagagaaaagacaaaccttcaggtgcggtactctctgtctcccattctttccactcggcatcgactcctgccagcaggaaaagcagttggaatcttaatgatgaagggtccgacgatacccagtcgtagcttgtcgtgtccgatcggagacgcggagcaatctttagttgtattcgcatacgttgtaagtgatacccatggcttgttagctatataggatttttattcgatctaacgtgaagaaagaatgaaatagacgaacccagagaacaggtttcgacggagcggcgatcaaatgtctggaagtagaatcttgagtttcatacaagggaaacctatcgtagaacgcttgcagcttagccgacaacgtagagaagatggaggtcgccatgttcaaagggtttggacgagatgatgggtgggatagaaggtggacttgctggttcgtccggttgactacaaaacattctaatgagattttcgaaaaagattaggcaaaacttttagtccagtcacttcaccaacaaccaccccccccatccttcaccctcgacagaggtttcgtactctacattccatcactcttcctctgccttgcattcatatacaatgtccttcaaccgtcagcctggatcctcatctgctcataggggaaagcctagaaacaaccgacctcctcatgtaggaatcgccccgggctcagccggctcctcctcgacaactcaacaggagggagagaagaagcctaagaagttctaccaccgaccgacggcagaggaaatcgcggtcgagaaggccaagaaggagggtgcagagctcggtgccaacaagttgaaggctaacttgagacaggccaaacggttgctagctagggttcgtgctttctatacacaactttcctttacttgcgtttgactgactgacgtcaatcatctgtttggttacccgctacacgtattgggacttctctgcaggataacatccctgcggatgttaggaccgagactgaacgaaaagtcaagagtattgaagctgatttggagaaggcgttgtcaaagaacgacgagaaaaagaacgctgcaaagtatcatatggttcgttctttccgcatttattaccgggtgtacttgcttctcaagtcgaactaatcctcactatgtatgggttgcgccaacaaaaactcgatggctcaaacataggtcaaattcttcggttcgtcgagtttcacgaagcggaagaacgcgtctctatcaagaacatgaaatgctgattctaacaaatggcccccatcctcactctagaacgtcaaaagcttatcagacggctcaaaccgttgacaaagaagctctcgtctgattctccagcggaagggagcaaagaactctcgaaacttcagaaagatattcttgacatcagagtcggattgaactatgtcttggtctgtgcacttactcctgcgcgcgtcttaccctctccgcacgtcatactaatattttgactcaatattcttctggcggcaacacttggtaaataacgtagaactacccaaactctcaaaaatacatctccctgttccctcgctcgacttcgtctgctcagaccggcgctcagtccgacgacgaaaacgaagcagatgatggcaaagtcgctcctcaactctcgaaaccggcttcgaaatccaaaggaaagagtactagctcggacgagacagacacgaaacgatgggagttattggagaagattcgaggacttatgctcgacggaacgtgagtcctcctctttcttccgtctgctcattctttcctctatctctgcataattaattctccttggttcaaaaactaaatcgcggcccattcactcgttgctcactgtcaatcctttttttcctccaaagcctcccagccgagccagaagatgctgtgcttcattcagaccagaccccatctggctcttccaaaaggaaaagaactggactcgaatcgctcgatggatccaaaaagacaaagagctcggtggaggagaaagagccggaagggatcgaaggcgacgacttctttggcggagacgaatagtaaagacatcaacgagatacaaaaacaaaaagagaaaagcaggaacatcttgtcggagctttcagttaatgtggattcgatatgcatttttttgtctgttcttctagagagtctatcttcttcgcttgatgacactctgtagtaatcattatccgaaaaagaaaaagaaaatccaaaatcacatccctctaaagtatcctccttacaccctcttccgttggcggtgacgacggggcacggagagacccaaggcctactctcttgatgtagtgaatccttcgaattccgagcgccgtcagtgtcacacaacctaaagcgatccaaccagtgatcatgtagaactgaacaaatgtaaaggaaatagaacaaccgattagtgcttgatcagtacggacacattgaatcaccgaaaacagaggaaggctaagggcacagaccatggtagggtgttcttcaaatccagacatcaactattgaaagatttataatttagcagcgcttcgctcctcaaggtaagagaaaaagctaaaacgaacgttcatgccaaacaatccggcgataagtgttccaaatccagtgacaaccgttatgtaattcagctgttatcggatgagcatgattgaacgcagcaagtcgatagaaagtcaggtggaacaatcaacgatacatcccttatgctctgatgttcgtccaataaggaaattcggatttacctgaagatccagtgtaatcaggccattgcgagtggcgcccatcatcagatccaccacctcctttgtagaatggacgttcgactgtttgaacacgaaagaggaaccagagatgtcaaaaaaccgactcgtaacagagaagtgatagaaacgcattcgcaggcgatgtgtaattctcacgttggacgtctgaatttcgctcgtgatttcttctattcgctgactaaaactctcaaaaagtagttcggcttcttcttgcctcgatctcatcaatgcctctgctgtacttggtttcgatggagagaatgctaccgtttgacaggtactatcttgatccgggatggaggagctagaggcgggcgctggagcagtagctggagggggaggtttggtcaggttcatgagaaccatcaaatcgtctattgtttgacccgataacgcatcagccgaagtgagaagtgctgagaaacataagccatcctagaatttgttgcagaaggacaagaaaggtacatagtgtaacaggaaagaaaacaacagacgaaccatccgcaaggcatctctcaacggcgtcattcaccaacttcgctcgttcgcccagcccgccaagatctctagcaacactcgatagctggttgagactgcttctggtgatatttccttggagattggcaatcaagccaatgatttctgagcgtagtaacgccatctctgcttcgagagtacctgcggttgaactgagaaactatcgaagagttgatattcacgagaaaaaggtcaagccagatcgacagggaagagcaacaatatcaggagagcaggaaagacttacagactcaagaacggcgtaagagaaaggttctccaggcgcgcggtcacgtagatgccgcttttacggtcacatcaagatatatggttgtaagcttggaaacaaacaacttgggcagaggaggaaagagtcgaacctcaagatgcgctctgaacgctgagtgcagctgactacctggaccctctgcgctatcaaacaagataacctcatcggcgagaataagggctctgatgtaaagcaaattgagctgcggagggaaaggaagatagagagaggtgccaatcattggtagctgccaagcagaaaaatagcgaaagaagtggacatacaacgatacagtgacctcttcttggaaggatagtggccaccaggttctgccgtccatgatatatgcctgcggaaagcgtgttgctacccaggtagaaatggagattttaacagatccgatcgagatcagaacgcgtacaaagatatgtattcgacaactatggagcttactttgagtctagaggtcgaacatctctagcctagagagacgaggtaaaagaaacatacatggtcaacacgaagttttgtatgaacaacaccagttgaagcggctgaaggagacacttgcgtggagttgaaagcgtgaacagagctcggccttcgtgaagtttagatgggggtgcgtgatgtcgcctgtagacagaagaattctggtgagctttaaaagctagatgacaacaaagacacagagctatcagacagtctggcttcgaacctttctcgttgaacacagtaactaagaataaaaatgatcgaacgggtcgtgtgggctggtgagaacgacccagtcgaaggaggacatcaaaagagctcaaagaaaggggtccaccaacagcttaaccggactagatctcctctttttgcctctgccttcttgacctcatctatgatcatactacgtctgaccttggtagcctcgtccaactctccgaacgcggtagtcagagtcggagcgacggctggccttgagggcatgacggtcgagagtgcacggccgggctgccatcgaacggaattgtatctagatctgaagggtgccaaagatacccgactaagcggagggaccaaccggaaagacattcgattggggtgcaagctatctgtagtaggtacggtggatgaggacgaccaaaagggaggcaggcgaataaggaaccaaaacaggaacattaaacagggcttgattatctggccctgatacatgacgtcagcatttcactacgttcgcagctgcgcctatatacgatgcacgtgccttcggggtcgagctcttctgaagatctctcctatctaatacccaaatattctatataattgatcttttcaatcttgatctgtgcttgttctctttctcatctttctctctgtgccagcatcaggatatcttgtcaaagatatttttattcttccctctcgtcgcgttgatagcagtcagaatgaaatcttcatccaccatcctgctttacaatcctgaaccttcggctccgtcttctatcgcactgtttgattcgatcgttgaatatctcggaactcatccggcccaaccaaatcttgtgttcctgcccgtgttgcgctcagagaattggaaagacaaactacctacattggcccctcccggtagcgtccttctctccagcggacgtatcgatgattggacgctactcgagtatgttgtttccttgttcttctatctctccttcacgttctgatgtgcctgatggttccttccatattgttcctccttagagcatgcgcagagcacaacgttcattatctcgggccaactcgagacgcccgatacctgaaatctcttttgtatcatctaagttacattgcctctaagacgaacactgtgatcatcccttccgctgacgctctatccacagccgtgtgcgttccgcatatcatattctgcttaccttgatgtataaatcaacttctcactgatatcaacgatcttcaaccgatatagtgaccttacaacacaagcgctgcgtccatcgcaggctacacgctctatcgaaactaccatcgagactgttccatcgccccttttggacctcgcttgggaaagttatgtggcccgagacggctggcacaaggatagcggagtctttctcaaagacggttcaacttttcaagttctttgggatctagaagacagagctctagatagtaactctcgtaagagatctctctttccttccttctcatatggcagctagttcgttcatcacaagctcatccatcaatcgttcgatgccgaggcaatcagtcaccgctccgtggaactcgatcacgaatcatctttcccaaagacacgccggattggcatatgactacaaagaaacttgggacgtcaagactccgttcacggagttctttagcttcggggtttctttgattgtttccatactctctatgttcatcacaccgtcagtcatcatggtcttcttcggaaaaaacgaccgactttgctcctgacatatcatcatacgtgcattcaaaagatccatcaatgcgtacagtcctctgtctagtcctcttcgtttgaagatagagtccatctctatggactctttttcggatagtctcttgctcaacatcccgttccagtcctatggcaatcaagattgtagtgagtgacaagcctagttactgttctgtcttgtcgataacttgtttttgatcgaccaaggtacaatagtgcaaccctgactacgcaaattcctctttgctgttctattttgattttcagtctgcctggtggagaccgccatcgttctgcttgaaagtggtggaacagatacaggcggggttctgactccttcagcgggactaggacctcgaggcggatctttgttaagacagcgtctagaagaacggggtggttgggtctggaagtgagaaggatggtatcatctccttgacttctttcagtcaattctagccttttctcttgcaacacatagctcaattcaatccttaggatgttgtcactccctcttcacccaacaacaatcttgattgtggttcctttcgtttgtgttttatacatggtttctcttgtcaatgactgagggtgtgtttgagtttgtaagtgggagtgacatctggatgtgtttattggatcgcacatccaaacccttatcttatcttgatctcaaatgatcgctggttgccatggatactcgatcatgtcgagcctccacctttgcctgcaatccctttgccacagaccaaccagatagttctcaaattccattatcaatccctctttctccccttcttcggattcttcccctttatcgtcatcagaagcaaacatcggatggatttatcagcctgtatcgaggctcagaaagaagaacttgaagcactggcagcgatctatggcgatgatgtattctcttacacgttcgaacatcaggaaggatccgatggagcggccggtcgatttcttgtaacagtctctatggccgtcgaattgagccctgatggaacaacaggtatacctgtcaacatatcactcgaaccatcctcgtcgaacaaactatcggatcggagcgatcgatcgggtccacagagtctagggttaaagctagcgcatctgcctcccgttcaattatcaatctcccttccttcgctctatccccaagatcaaaattctatcccgatcatcctggagatcaacacgtcaccaagctatctcactaaaaatcaggtgaccgttgtgattccagagctgatgaaagatgtcttcgggagatctgatggcggggcttgcttatatgaattcctggagatcatcaggaccggagggggttcgatcggttcgtccagctcgggtaagggtctgggtggttccatggaagaaaccggtgctgcagtatggtgttctgcaagcgatggacatggggaaggcgtccttgatctagcaagaaagttgcaggaatgggaatcgactgtcctgggtaaggactttgacggaacgacatttccctgtgggatttgtctggaaggcaagaagggacgagtctgcgttgaaattgaaggctgcaaacacgtcttgtgagttgtttcatcgttatgttcctcctctcgatcaatttcattggacttgcagcgcgcgcagattgaccgttttctcaatgtggggatggacatttcttttttcgaatgagaagctgccgattgtgtttggaacgatgttggaaactcgctatcagtttgtcttccttataattgtactctgtgagagcgtccaagttgacttctttacgtgttgtgtcattctagccgaaggagacatcatgtctgtggcatgcccttcattccagtgcatcaaacttcgcacatcgtcctcgttcacctcctcttacgtctccccttcatctgcattccttgcgcttgtcgaacagatcgttggggcagatctgctcgctagattcaatcggcttgctgataagaaacggatagatagtgatccaacttatactgtctgtccgttaccttcctgtcaggcgcctgtaccagcaccagagataaccaagaaaccaggcgaagcaaaaaatgaagatcggtgggagaagtacaggcagtgtccgaaatgcgggtttccgttctgtttgttctgtaaactgacttggtgagtcaagcttttcttccttgttgcaatctcttcttcttttcttccttttctcttctgttgatgccatgggagtgataacaacgacgtttccttttgactggatactgatcaggcacggaccacatacaccctgtccacttcctacgctaccaggttagctgatattttcttgaggtttcttttttgtgtcatcaattgcacgaccaagctaactttgcatgcaacttgaccgtcgctcactgcagcgtttatccaaacatacctctctcttgatccgacagaccctggacggagacttctcgaagctcgttacggcaagaaaaacatggagcgtatggctgcccaagcggtagaggatgaggaaaacagaaaatggttggagggcaagacaatggaatgtccaggatgtggagttcggacggaaaagtcccatggatgtaatcatgtgagttagatctttctgttcccctattcatttccagaagggcacatggccatggcgtttttgctgacgaaagagatacgtgtgcttgataactgattgtggggggttgcattgtttgtgtagatgtcttgcgttcgctgtcaagctcgttcgttctttcagattcttctcaaaactcttcttctttctctgatgttgcccttctcaaatcttatgtcccttctcttcttctctatctatctctagacttctgcttcagatgcggtaaatcggtaaatccagagttttatcacttttgttcatggtggtgatgaggagaataggagctttcaaactcagtcataggtacccttttctcttttctcatcccttcccattttctcggggtatgacgggttccgaccttgtgtcttctctacgatctatccatccatcgtttcattgtctgattgggatatggggtctggcgtgggtatagttatcggttttacacccttataaacattacaacaacgtacgtctttactttcttatgtttctcttgtttacgcatcgatcttaaccttggtattctcctggcctcatttccttccttgattatttccgaatcacctcctgggcgaatgtcttcttgtctaaacaaatgaaatagcctgaatcaccctgtttcgaaaaactgtttgatcaaaatgagatcgacgctttcaaccgagaagcagctggtggttgggtcgacgatggtggtcttgccggatttggccatcttttttgatccgccttttgtctgatgctcgccgatctcgtccttgttacctaatcaaagaatagaggtgaaaagagacgttcggttctatatatgtaacaaagcacaagataaaatgcgcatatatgtttttttttccaactctggtcttccagaacacagttaaagctacgaagaaagaggaacagaacagagaaatcacacatctaggtctctccaaccttcttgattcctttcaagttgacgccttcgtttcttctccagaagtcgacgagcacctcggccaatctctctggatcgtcttgttggatatggtggcccacgttggggaggacgacatgttgaaatttccctagagtatccccagtcaacagaaggtatctcagtatcagggtctgctacaagaacaagggagacacatccatcgaagaagagcaggacaaaccttgcatctgaccgatcatcaactctttgtcaatcctgtcgctcccggccaagacgagtaacctagcggacctgactgccaaaaacttggcagaaaggcctttgtaccaatcatgccaatagggcgcagaatccaacaaggacgttctccatatgaccctctgttcggactttgtcggttgaactatagacgggacggacagacgtgcggacgtcggagatcgataggtgtttgatcccaggctgaagtggaggagagtaggaatgaaagccatgatccggagaagaatgttcatttccagatggagactagtgagaaggtattacaacaagaggcaagcaaagaggagacataggtgtataacaagaactgactgccaatcgatagcttcgtctacgcttgcgaatgaacttggcctagacaagatgatagcgggcataagcggcagcgcttcgagtgccgagcctacaccgtttttaagaacatcaattgtcagactcttcactcgctctgagatgcgatcagatgaaaccatacaccataggacggaccttcgacgacatctagaacgcccacaccggcgactttatatcctattgtttgtaaggtcggtgtgactcccaacacgggagcagcacccattgagtgtcctataagctattgtcatccgaatcatccccattcgaataatggggatgtacgaaagtggaaggaagaaggagaaagacagagaaatagatctcaggagatgatatgcggatgaagcagagagatggatgaagacgaaccacaagcgcgggtgtcttcttggggttaggaaacattgtccggatgaatactaaaaagtcagcggtaagagtgtttaatgagagatccaacactgcttgatccttatctgggtttgctgtagaacctgttgagcgatggacagatatcaggtgagcaagagaacgacgttgtctcgaaggtagtcatgataggagaagctagatgggtgaacgaaccgtgacctctacagtcaaacgctaatagacctagttcacctcgagtgagtctggtgatctctttcgccagaaccgcaaagccaagggcaccttctccacctccatggtgaaagatcataatggatcctggtccttcatcggacgcaggttcaggaggggtgtaatacgttttgaaggatggtgcactccatgccgaggagacgtcagaggaaggaggagggtcgaccgagaacgattgagcgaagtatgaagggacggctgaaggaaactcggacggcggtcggttcggtggtcgtcggtgagatcggtttgatctggcccgtgtgctatgaaggtgcgccggctcgagaatgagcgaaaaggagttttgatcacctggaggatgcaagaagtattgagatgctctcaccccaattctggtagatcatcatctatctctgtgaggtcttcttgagggtgtccatcattctgaacagactgagagttcggatgcaaaggaggaagatgtggcaatttcgccaaatttgttctcataaagtcccgttgaaattcagacatagtgaatggaggatgtgtgtgtgttatgaaaaaagttgaggaagaagagagagaagaacgagatgaagtcatctcccgcgggtttactcaaattccgtcggctctgtccgtttcgatcgttcatcaccatcatcgatcaagacgaacaggtagccttctctacaatttggattgatgggcatcagttcgatggaatatccttattggtatagttatgcgctcagagtgttccatctgtttccgctacatgttccagccacgttactcttcgccgctcctcatggaaaacattcgttccaaagttcattcaacattccaggtgagagatcaggggtgccttcttgttgttgtcgtcatagaaacataacacaacacatcgactgactccgtatgcatatgcgcgttcatgtattcactgtcacctaacaataatttcataggcaagataggttggctgacaatggagcttgtctcgccagtggctttgttgatggcgttggaaccaaaaatgggttggagttcaaaggtcgatccgatcagagtgctgactggattatatatggctcattacctgaaccggtcaatcgtgagcgtactaagaagccgacagatggctccgatgcatctgattgtctggctgtctgctgttgtgttcaattcgatgtgagtcggtcaacctctcttcataggtgtacgtgagtttccatgtggactgacgtttcggttgaatacagcaacggtagtctgatcgggacgtttcttagggttcagtctcaatcgtgcatgagtacgagccgatggttttggctaggtgtttcgatctgggctcttggctgggtttccaatattgctcacgacgagattctgatgaatctccgaagggattcttctggtacctcgatggcatcgtcttctcgacactcttatcggacggcagacggcaggctttattccatcccatggggaggcttgttccgttgggtgtctttcccgagttatctgagcgagctgatcgaatggacaggattcggtttggcatgtgcatctgtcggctgtcagacggatctttccgagatatttctgaatttgtttcagtcggaagagactttccaagtgtctggctgggatgttcctctgttgaaccctgctagtctgtttgtgatgaacgaggtgggtgtctacgaattcatctgagcttctttctatctcatgagccacagagctgactttgtggttaccaccttttttctttctctctgtgtgtgtctctctctctctacacacacacacacacacaca

SEQ ID NO: 2764 - DNA, 823 bp, Xanthophyllomyces dendrorhous
cacacacacacacacacacacacacacacacacacacacacacacacacacataagttctttctatttggagcccgggcttgggaaggtcatcggtggtacaaacgaacgtttgggaaaaactatcctgtagagagaaaagcactgtttccgttcttgctctagagtgtgtgtgaaagcgcaggcagggtagttcgtggggaattggggggcttaaataccaatgaatcaactatcattcatatatcaacaacccaagccttatcatccccggaacataacaatcatctacaaatcacctaccttcccgctaattacccacgcacagaattagacaccggccagtcagcgactgcgccggcaaagtatctgctgcgccggcaaaagggctccgaaccttaatgttctccttgctctataaaaagagcttggtggactgtagtgtgtaacgaaattgagtggtatactttaatagaacgttatctaatgatttcgtaatgttttctaatccgattgtcctaatgagactggcaaatacaaaacttgtaatttgtctattctaatttcctaatagactcatcagaatttcctaatacatcaattcaatcgctttgtacgcacactccctttgtcaatcctccgcccggccgtgtttcatcgtgctcaccatcctgacgaacgaacgaacggaaaccatccgtcttttgtcttctttcgtcaatcttgttctggtcgagtgaacgtctggaagatgtctatcagttgagagcttacgtcttccttctctttgcttttcatcttgatatcttgtcccgtcactacgc

SEQ ID NO: 2765 - DNA, 13301 bp, Xanthophyllomyces dendrorhous
cactacgcacacaaagaacacacccacatccgcacccacccacccacacacactcgcacgcaccgctagcattcttccctgctcttctcctgtttccattcgtatcgaaaacactaaaccacatctgctcagccggggctctctcctcacctgtagtccacttctgtcgtcatccatctggtccacccataccaaggttcttcctacaaccccatggcatccttcgagacggaacacaccttggagtccatgggcgagtacaccactcagctcggcacgctcacaaactccatcgactttgggattctcgtcctgactatcattggcgccgcaggcgtcatggtctccatgctctacaaagagtacaaggtcggcaaggtgagtgcatcaaccagtcttcttggaattgaacctgatcccattctttttatcgcctcccgtctcgccgtcttgcgatcttttccgaccttttccctcttacattttttttctctcccctcgtcgacctgttcttgcctcaaaagggctccactgtgagaagtcgtctggtgctgtttctcgtgttcggtgatctcttcctagggtacgtgtctctttgctttccttcgcactcgtacatccgttccttcccattccttgtccttgtcagctccatagagacagaacgaaatccttgtgctcttttcttcccggccttcgccgttgtcgcgattcatacctctcttgagaccctccagcttgggtcttcatgccgcatgcacgcatgataggcatgtctataaacatcgaatcgttccctcattgacgcgttctttctatctttctctcgctgtccgaacgtctttcatccagcatcatcgccatcatccctacaatatcgacactagccggaaaccatccaaaacccttcacgccgtattgcaacgccttgggcttcctcatcgcgaccgctctctacgcccgtgagttcctgttttatttttttgatttgttcattatttttatcatcccttgctcttcttccagcgttttggtcttcttctttgaatacaacctcttttcattcttgtttccatctctgtttccttttccatcattgcctctgctggctttcacctcgtcatgaatattgacatcatctcttttcgcgtcgtcttgcagaacatttcaatacgctcaccttatgtatatccacctatctcatcctgatctatccactctccttgtatacccggtggctcgaacggcactggcgctggctcttcccgtttgtctggttcagcagctttctctgtgccggtatcgcctggggcgttattaaatactggggttacaacaacggaatctgtatctatccgtctggcttattgtgagcaagcaaacttctcatcgcgtttccagcacccttttggggcttgtctgttttaccacacgtgtttgtgaagcactgaacgtccaccctcttcacgctagctccgaaatctggcaattcattcccagagccatcgtcttcaccgtcatcacccttgtatgtctatctgtttgccctgatagaaaaccatgtgttgacagttttttctcgtacatcgtagctctacctccgactgtttgttttccttcgccggccggacaagatccgaaccggttcaagctcgaccgataatcaaaccgatcgatcgaccgaacttgaggccgaaccttctcacccttcctcccaatctcattccaaatggagacagttctcttcacgcacaagagcatctcacacagagtcttccgggctgactgcccaattgaatagatggatccgttcgaaatcacttggtcatgacgatcgtaaaccgaaagctcttgactttgctgaacatcctagaagggccagcttaccactctccgtagagaccagtgaaatcgggactggcgaagaaaacaactctcggtcttgtgaatatcccccattcgcgaccagcgaggacaacaagtctcgatcatatggtattccctctacgttcggctctagctttggcggaggacataggcgaaagtctagagcggggctacctccgtgggagaatgtcgatctgccgaggtttcctggtagtatagacccaataacggcagtcgatcctttagacatcgagccttcgtatccgccaccggtgaccgccggttggaaatgaggtctttctgccccggattccaacagcgacttcggtggccagggttactcggccgaccagtccgcctgtcttccttcttcctctcccatcgtcgctaccgccaccaacaagacaaacatagcagggacgaagacgtccaacatggtgtctaaaccaaaacccgctgacgaatccagtggagatccctcaaaagaagtcggctgggacaatctcgctgtgagacgatcgagtcacgtctcgttctctgaaggatccagcctggcaacgtacaattttatcaactctcgagatccgccttcggtctccatcatcctccccaactcgaacgctcctccttctatcatcaatctgaccatccttcatccctcgccttcttcttccccctctccttcttcttttgcagctcctgtcgtcatggctgctgcgacgtcgacaaccatctcgtcgttcaagtttcctccctcatcagaaaacgggccgttcgtgtttccccgacaagtcgaccaagtctcttatctgtttgatccgtctagacgaccttcaatacccgattctgttgctgaacatccgtctgatttatcagaccccacatcgtctctacccccaccatcaccatcaccgccactaccgccatctccaactatcgtcaccgctaccaccgccgacgactcgtccatgatcgaccgaaacagatcgacgagcagaagccgaacgatcacttcatctgaccgaacaggaacagaaagccttcaagtctcacctggaggatccttcccgttgagcgaatcttcaacttcgagcacgtcaatgtcgaacgcgatgacactgatagatccgttggatagtcgtcggtcgtctgccgtcacccagcctaccgatcagtcatacggaatgaatttttacaaaaagaaatccaaagagcgtgatcaagaccatccgttattatcattgacggtcgaccgaagagagctggacgaggaagcagatctgatgtcgtggcaggcggggagaagaggaaatgcacagaccgaggaagagaacgatgattacgacgacttggatgagggagatttgacgttaaagagagtgttggagttaaccgatcccgctattgacggtctcatcacgcccggcggcggtggtggtggcaggggtgaactcaacggcggtcgtaggactacagactcaggggccgggatcagttcaggaagtgacaaccaagaaagcatggcccggttcatgaatcgaaaggcgtccctcctcatgttgaccttcccgctggcctacgtcgtcttgttttccgtatccatcatcaggatcgtatgggatttcggaccgaatacaccttcgccagtattcaccgcaatctcgagatggatgatcttcatgcagggtctgttggacgcggtgatctacggactcgtcgagaccttggtcaagcgacaggtcaaaaagaagaccaggcgtgtattgggtacagggcttggcacgggaggttcttacacggatcctagagcgagtgtagccaacaccagaaccgacactgcttctcgtatatgaccccttcttcttatcgaaacagagagggaaagttagttaagcggaggggtttcgcttcttcttttgccttgcctcctaccctttcttctactttcctacatatccttctccaacccagtaaagacttgaaccactacatgctttatttctgcttatatcatagaccttcttcgttttttttttcttccttccttccttccttctttttttcttgctcatctttcttcaagactttcagctttgattttcctttttttccaaaacgttcctttcgttctctttttctttccaaagtttttcctcgaccacaacttgtatctgtagtaatcgatgcctcccatcacatcccctctatattgaacccactacggcatactctacaactcgatatgaccacacgtacctatcactcatatcctaaacacgcagtccagatttcccactttgtacgtcgggttcgtactcctcaatccttttcttttcatccatcgatcattagatcggaatataccagatcgaggatgccggcttccttcctttcttccgttcaatatatcatcattttctcttgtgattcgaaaaaactttgccgatcacccaagaagcaatcgaaggtacctttctgagcgaaagaacgatcatattatataaaccacaatccggacgagtcgaacaagaagccccaagccggacctgcgtgtgtgtgtatgtgcgctctcacttcacctttgatttcctcctctgattgggtggccctggattccctacccaaccaaacaaagctggttcagtcagctagatgacagcgaagaaggaccgagcgtacgccaaatcaggaggagaaaaaaagatcaagaacacagctaggaacaagcaagacgaaaggaggtagggaacttcataggcctttttgggacaaccgcacatgacggctcttcatccctccgctcatgccctggtagtaaggagagaacaggggagggtgtattccagtgatactacgagaaaccgatccagtctttctacacatacgtttcgaagacgtaatcatgtagagagatcggaaaggattcaagtcttctggtttctctagacacttgatagagtcagagaaaccaaaaggaaagagatccaactccgggaaaggggttttaatcataatttcctctgtctcgaaacaatttcctgctttcctacttgtattcctttaaagttcgagatgtagatactacacaagtcattctgaagctgttactcacatccggtttggtggtcttcacgagcccggggtgcatcgatgtgaacgtcttggtagcagtttgccgagtaagtttgatctggatcgacacggaggcaacacacaagaaaaagagttctcagttcacggttctgaacttctaggaccaaatctcatcgtctgttaaatggatacaatctttggatcttctctctatccgtccaaagagacggaagaaaagagagaaagtatatgtatacttcctttttcatgcgggcctttcgataaactccatctctcccacttatactaaaacaggggagaggtccagaatatttttttttgaccaacccactcctttctcagtcaagagacaaaagaagggaagtcaaatctcctcggtctggttgtaatcatgtcgttttacttgtcgatggagcgggtgttgaatcaaaatgtgacttaccgagtcttgcccatagccttttcaacttctgtaagcattgcgaattcctagcttgtcgattctgagctcgacttgatagaaaatcttgaggcggaaacaataaaatctgatgatagcggaaatccattagtagagcatggtgagtcggaaaatctggcgatatgcgatatctttgctgcctggagtctttttattgtgcaacaagactggtctatatcgatacaagagcattgatctggggttattctgaaagaagggaagaaggatatgagatacggatagatcagtatagacggttctgaggatcattgtagttttaggctatctgaaatggacaggaagtccgctcttcgcatcgataaccgagtcggaaaggaagcttaggagtggccagaaaaagaagaatgaaagagatgacactgaccaaaataaatcatcgtaaggctcaaaccaaatatcctacccgcacacatttctcgtgttccttcttcctctgcctacttcccacttcaacctttcctttttccttttgggcattagttctgaaacttatgcgagaggagagataagtcgaatgaaagacggctgggggttcgactgcctcattccgatgacgatgatgagactgatggtcaaacaaatgaggatagcggataagtaaaggaacaagtagtctttgcgagtatgatctggcataaaacttgatcgaacgacacaagaaaaaacgagaaactcacggaacccagccgtacatcatgacggtctgtttagaaaatagccaacaaaacgaaaagggagaaaaggaagtataagaacccaactggacgaagaggaaaaaaaggcaaaagtcgatgatcaacgtacgcggccgatgtcgacagccttgttgattcgctcctaaaaatttgaacggaaacacccattagcgatagaaaacaaacatgacaagagaatgaactgaccttgttctcctcggaaagcatagttgtgtcggttagagtgtcgggttgaaggtgaagcttgttgaaggtgagagatcgttggtctttcgagcgggggaagaactcgatgtgagagttgacggtgtaactattgttacgatcattactctggctacacttcgccgtgcttagtcagcagtcggtgcgttcatgacctcacagtttacaccctagatgatacaccaaacttatgtacagacaacggtaggatggaggatgggtctatctctgcgctctgttttcaggacaagatagcgggctagtccgtttgatatatgatgagtcggcacgaacaacctttgttggacaccgtcgaatgatgtttcttcggtccacagcctctatcacaccaagtctcgtctagaactccttcagcatctttgcaacaagtacgagcactggttgatgtcttctgcttcttgacctatctgtcggcgctcaaattgcgaatgacctaattcctctgacaacaaacagaaagttttgatggacttgatattcgcatctgagtggtaatgtttgaagtggacaattgaatgcatcacagtttgcctacgctaagcaaagttcccaacgtcgctttctccacttcgcttgaccgtttcttctatctccccgggataatcaactccgattcaaccagatcatggtatttgtcagtgatctcttctaagacaatagcagacaaacagaggcatgtgagcttagccgcctctttacgtcatctgatgctgatgcatcgttctcatgaatctgtgggaaactcgcatgagtgagtgtgatgagtatgatgagtatgatgagtatgatgaatatgatgagtatgatgaatatgatgaatataataacccgacgtggtctctcagaatccatggcttccttgtacaaccctcccatctccatttctgaaccagtgaagaacaaaccctgaaatatcatggtcgctaagatcgctgtcatcatctactccacgtaaggcgctagcctgccctttacttcagatagaagagtcactaacagaaaaaggttccttgttctcgtcctcgtcatctcaacttcgtcctagttggggacacattaacactgttcgtcttcaatcttttcttaggcgctcacttcagagagcatggtgtttattttcccacatccagcttggtgtcagaactcacttctgatcgtcattcattgaatcaaagctctctgagtcggtcgtcgccgggctcaaagaatctggggcagaggttacgcttttccagatccaggagactttgtccgaagagattcgggccaagatgcacgccgcgcccaagctggacattcctgtgatcactcctaaggacctcccacaggtgaaccatttatcgtgtctgtgcctttttatcttggttctcgaattgttgacagtcgctggtgatgagaatctactctagtttgatggtttccttttcggattcggcactcggtatgattctacttcagccactctcgttgacatcatagcgaaactctcttccagcttaacacgtctcactatactatacactcttgatgcagatacggccgagctccagcctcggtatctgccttctttgacgcgaccggtaagtggagaaaactgagtgtccgagtagacaacatccagactaagccctttcttcctttttgacatcctatagggggactttgggcctctggagctcttgttggcgttagttctatcaagttctttctaacttgttcctcgcgctccatcattcgcttgagcaagatctgaataaggtttcattgatgaggttgtcgtagaagtttgccggagtcttctttggagctggtagtaaccacggaggacatgagactaccgctttggtatgtagactcagaagtatcggctttggagaaagtacctcgagagaactgagccatcacttgcattttttctgcaatttaccgcgcagactactgtcccattctttgctcatcaaggaatgatttatgtcccaatcgggttcgtccgtccggagcttagcatcgtcgagaaggtcgttggtggaagcgcctacggagcatcctagtcagtcctcgttgtctgcatccctctcctgactttttatcattcggcgtctcatgaatcgttctctccctctcttccatcttacagtattgcaggttcaaagggacaacttcctgtgactgaggaagacaaggccgtcggtcgttatcagggacaatcgttcggaaccttggtcaacaccttcgtaaagggacgaaatctctagactgatctcttcgagaaggatatcgctgtccccttatgccattagctaaatttatatttccgtatgataacgtcagatgtctatgcatcaacctctgagtgtgtgtactgcttgctttccgcgaattgacgtacgctcagtcatcgtcgcaatctctttctctttctgagcccatctctgtttaatctcttttgcgctgatggttcgatatgtcaactcatatcaaatggtcggcgatgccgagaggaagggtagagttcgttgagctcaaccaacacatcaagggcgagcgatactagcaattgtaaggcgggctcgacggtggatttaataatcgtatgcccaatcgctttaagagataaattatagatgccataagcagcgtcttgaacgtcccatcgcatgaaccacacccccacacccacatttatctaggtcatgtactgacatactcaatgcagtgttccaaaaggatcttgcgctacagttgttttatttcaagaaaacgatcaaagagataggtagaagagggactgatctggcagattgtcaacttgccggttaataacggcccggtctagatctcacctgctgaccaacagagtcaataaatatcaggtagaaaaagaacgatctctttcttctttccgacgttcatcgactgcaactcactctatacttgtactgatacgtctaaaccatgagattaactttgccaacaaagatcatatccagaccggcttcttccacattcaggggtccaactagcttggtggcaggtgcccatcagatcacctctcttattcatcaggccaacagccagtctccttgtccatgccatgtctgttcgatgagcaggcaggctcttcctggcgctcaacagtctcttctatctggaatcaggcgaatgggtgatcaggtcggcagtagggccgacaaggagtatgcattcgaggtgcgttgaatcttcgcttgtccggtggccgtcaattctgtcgtgaaaactcaacttgatcttgttttcgcgctcaaccaggtcgctgctagcaacatccgatatggagacggagttaccgctgaagtcgttcgtccaagcgaattgctctctctgtgtctaacgtgttgaattgaaatcgatatcctctttttctttttttcgtagggaatggactttgctaacttaaaagctaagaaagtcagcgtattcacagaccagaagatcgtcaagcttgatatcatgaagaccgtgagtgaatcttttgtcgatcgattgcgacccaaattcttttttgagtctgacctcttgtgcgctcattgaccgcatcaacaggttcttcaatcgttagaagcaagcggcgttgcctatgatgtatacgaccgatgtaaggtcgagccaactgatgagtcgtcagtcgtttctccatctctctcgtcagatgtctgaagctatcagcgattctctgacatgcaatggttgtattgttttccagatggaaagatgcgatctcctggtctagacagagggacagcacacatttcttggcgtgcgtatttcttcttcctgaataccactagttgtaatcttataaaccatcgttatctcataatctgtatctacagcgtaggaggagggtcagtgatcgataccaccaaagcagccaatctgtatgagtatctctagcagtctcttcatgtataggttgaagattattaacgtatagtctccgtctgttcgtacgtcagcttcactgtttacaaagaagcagagcttgaagatttcctcaatgcgccagttggtcagtcaatgttcttgaaaaaaatcgtttcactgtacatatcatcattctgatagatgaaaattgtctgttggcatatgcatatctcataggcaaggggcttcccgtcaaagaaactttgagacctttgattgcgagtccgtattgacttttttgggtgcgatttctgataggtagtataagtcccatgacagctaacccgtccgtcttctctgactcgactctcaaattaactcgctctacatgtagtccccaccacagcaggaacaggctctgaaacaacgggctcggccattctcgatatcccaagcaaaaagttcaagaccgggatcgcgtccagagcactcaaacctctacttggtatcgtcgatccgcaaaacactgcaagctgtccgagagatgttcacctcagtagtggtctagatgtcgtgcgttctcgccacgtcctggtttattcacaggtgctgcctcacaagaagcaggagtctgatatcaatgatatgttccctgtctcgtcattggtagctgttccattcaatcgagtcgtacacagctattccgtactacgaacgttcgccccgacctcaaaacccaatcgaacgaccggcttaccaggtaggtctgctcagctcttctctttgcattagaatcttccttgcttacgatcacgattttgacctggatgaaatatggtatggccatagggtcgaaatccgatcagtgacgttttcagcagttgggccctccggacagcagtcgagatgctaccgagggtgtgcaaggatcagggagatatatttgcccgtgaacagatgttactcgcttctacggtgagaccttttgcttatgtcttgactccttcctcgaacatgtgggcttgtatacgtaaattatccgcgaccgactgactaaatgaccgatcgatcggacgattacatctcaatgaatcagtttgccggtatcggttttggtaacgctggtgttcatctctgccatgcggcatcttatcgtttgtatttccctctcagtctttcgactgcctctcctgacaactgaacctgtttcatacgttctttatctcaaaagccatctcctcgcaaaataagaccggtcccaaatatcgtcaagatgggtataaccttgaacaacctctcatcccgcatggaatagctgtctctttgactggcccctccgttttcgaattcaccgcaccttcttccccggagcgacatcgagagatcatccgtgtcttcggaggttcatctgccgaagccgaaagtgcgaatgtagacgatggaagcctgggaaagatggtaggcgaggttttggcaaagtttttggatagcttgggtggagttcccagagggttgaaaggagtgggttacaagaaagaggatcttggagccttggttgacggtatgctggtatgtcgttcctctttaaccttttggtcttgtttgatccgttctcaattaccatcatcctttctctcttgtactgtacgatttgtccgaacgaaagcctcaaaatcgagttatcagtctttcaccgacagagatcaacacgaagaacgatgagggcagaagatttctagaagagatcatccggcgcgcttattcatggtgaatcacccagccggtgcgcgcgagatatattcaagtcttcgacgaatgcctcgtcattgtattgtgatacatgtacatcaaaacatattgatacaagggcacatcatcacattccaagattcatgaaggatatctagtctcaccaatgaggacagaaacaaagagcaaccgaaaagaaagggtatggggcaaggggtataacatcgtgagagttggaagaaaagacgaaacaaaagatcatagtgagataccagcccttctggctctgtaagttcggagaatattcttgaggtagatggcgcctttagattcgcctgctattcgagtatcacctgcctttcgctccggcactgaaggcgaagaatgacgttgatgaaagaatcttgtcagatactgattattaaggtttctcaataaaacagaacaaaaagacgaaacgtacgccactctccgttgcagacgaccaatactctcatcctctcgtgataatctaacccagtgagcaacttgggcgtcaagagaaagaattggccagcgtccttatgacatgtcaccctgaccatctgattgtgtacttctctttcggaacgctggtccattcccttgatgatcaagtttatttcgtgagaatcatacaaccgtacgtgaggaaccgatttcagaaaacctgcatgaaacgaggattcgagacagattttgaaaacaaagaacagcagatctcacttgattgattctgagagtaagaaggttagaagaaaggtatcagaactgattatggtcacaatatttgtccacatatgataggaagagcatgatcgggcacttactcatctaccagggagaagggagcattagagagctctatcaaactcatcagatacatgatcgtagccaaagaccgttcctaaaacgtcaattaatcatcagctggttagacacacaacaatattgaaaagccgaagtcgaggcacgtagatcgtcaagacttactcctccagattgatgggttgacgtcaacagttgtaatttgtcttgggctcggaacgaaacaaggatctcaattgcccattgatcgtagtcgtcgtgctctttgattctgatttccccacgatcatccaaagctatggtttgaccaagatgtaagatgagcgatttgagcg

SEQ ID NO: 2766 - DNA, 14304 bp, Xanthophyllomyces dendrorhous
gaacttggcattgaagtttcggatcagcttttgaagctcaggataccatttgctctgttcggccgtgaagaggttggtgcaagacgattgttagctgtatatgcaaagagaaataacttcgctgaatagaggagcgcacccttgttgagttgacctccctgctgatcctgacctctttccgttcgagtgagtttaattcttcggaaagcttcttgatctatttgaaccacagaatctgttacagtcggcttatattcaggtcagaagtatatgtagaaatgacaaacctctctctgagctctctcatatttatctacaactgtggggtcagttccacccagagtaccaagctctgcttgtatgttgaccagatcagtctccaatgcatctacagtcggaagattttcattattctgcccgactaatgcctacacagaatggtcgatggtgtttgttagaagaagttaccatagtactgcatggagtgaagatcagagctcacatctttttcagtattgaactgatctcttgattcgtcgtccatctgatccagaatatcttcgacctcgtttaagctctgctttgtggcttccttctgagcttgaaattggtcttgaactacaattaggccacccccacaacagatgatttagtgcttccggttcttcatttgagtctcgcaaaagaaaaacataatctcacctctgtcaaacagagacttggccgtgagcagagcttctttgtctccctcagccatcagcgccacatgagaaatgttggcttcgtattgcagaagctccaaattcaattcacagagcttttggtacatttttgatgacttgatagccatggactggataattacatacaagcacatcatcagacgactgccaatgctttgcagaaattctgtagatgagcttacttgatattctagatcaaatttagtcttctctcgaacggctttctgcaattctcgactgagttgcactcggttttgttcctcggacggtgcagttttcaacctatgtacctgaccttcctgacggtctacgtaatcgcatgaaggtagagagatgaaaatccgttaaggttgaattactgagtttctgatggaagggaagcgataactagggccttactgagcttgatctccaaagcagcaagatgacttgcaacctttttggcttcctcaagtcgattcgaaaccagtttctgaaattgatcgaccggtcagtggacaccctttaagcttaatttgtctccgcgttatatgaaagggcacttacgagttcatcccttgctttgactagttcaacattgattgcctcttcctttgttctgagtatctcatacgcctgattaagtttttctaaagcgcttttctcaatagtgatagattcctgaagctgattgatctgactctgatcaactgtatcagccgcacacgttttcgttaattaaaaatccgaagtacatcagaacgtgaaacaaaaggatgaacgatacaatcaacaaaagagtaacacaccagttgagacgaaactcctggcttgccgtatcacattggtcgaatatgacttggttcggttaccataccgagacacagacgtctggtatgacgtatcttttgcgcaaaagttttggagttcagaacaccggttgacagcactccaatcgagtccattaggaccgctgataggtcgaagagtaatagcctgacaattttatcagacatcagaacgccaactgtcagctgctgctcttcccgtctgacgatagtatcaagacgtaaacgaaacgtgtatgcgcaccgttcgatgcattccaacattggattccaaatactgcttgacaggatcagcagcttgaacgaagtcaattgcgtagccttcgaaaccaagttcaagtaattgttccctagatgtaggtccctccatgggtcgataatcgggctcaacttgtgtcacatgtacatttgcgaccttcctcttgaaagggttttcgtctgatgatccgaaagaaagaattttgtcgaagtcttctttgcactgacaaatgatcgtctatgaggaggtagtgatatgagagccatatgacgtgagagacctgagaccaatcagtggacaaaaaaggatgctgaagaacaaatggtgttggaataacgtaccctcagctgagtagcgttgaaactagcttcaattaggcttgaatacctcttatccggaacgtcaacacttagacaaggcggctcaaaaactttcatcttgaaaaatgatgcatgtccctgagcgactctggcttcgttatgtcgaaggaattgaacgacttggtagatgtcttctgagcttggccaatgtttcagattgttgagccgctgagattcgacgtttcgtagattgatgattctacaagtttaaccccgtcaaattcaaacttcaacttgacatcgctacaaaagccagatgatctggcaatggttgggttctttgatgattaaaaaactaaaaaatggaagacgcacttttcttcggccttgctgatggtcattaatcgcgtgtctcgttctctttccaactgacttcgacccaacccagcctctgttctagatcggtcttctagagttcgatactttgcttgagcgtctctctgagttttaccaaagtggaaatattatcagaacgtcaagtattagattgatgaatccaaacaaatacaccaacgaaccctttgttgctccaggtcgccagtcggtggagccggctcccggttttcccactcatgtttaagctctagtagcttctcttgttcctgtagtagctgggctttctttctctgggcagaaactttgatgttctcgatggagttggtcactgccgttacattctcttcctgtgagatagaaagagcaccccgtacacacgttgatcgcaagagataagacgttttaatgaggatttttttaaagatagtaaggagatagccacatgagtagagaacgaactgcgtcaccaatcttattcgaaactgtcttcatagttttttgaagggtcgtctgactgtcaatcgtttctttgatcttttttaccgattttttcaatcgaataccgaaatccctatttcaattgatgcgcatgagccagacgaacatcagggagaaagctcaacaatagatattaaaacttactccttgagtttgtcgtatggctcaatagcagcttgagcggccttcaaatcggcatgcttgatttttcgctcctcacgaagaaccgtatatttctctttcgcctcgctgtacttggcgaagctcattaaattcgtcttgaagacgatctgatcaattatagagagtttgtgaggcatgttagtcggagatcagcattacatctacttgatacttaattaacaaactgagacaaacctcagcagccagacgttctcgttctcgggcgttctcgacctctgcttcgagtcgctgagcaccttgtgtttttctctgggcttcctcccgcttgatgattaattgctaaagaaattgaggtaaacaaatgaacagtttaaattaagagtgtccgttcacaaaatgcctatttacaatccctattatatctagtgaagccagcgtaaccaagaacgtgcagactgacttcttcgagctccctcgactctttacctaagatgatcaagttctgatgccactgcgtcatttgcgggggaccggccgctttctgagtctgctttagtagctcttgaggtgacatggtggcaaactcggagaccttatcctgcggtaagaaagaactgaagtccgcaagttgtgcgcgcaaaattgttaatcagaaccctcaatctggaaaaatcgagccaaggcgacgaaccacaagttgcccacttgaatgtttagctcagtcatcttctcacgaatggttttcgcagggacgttttcgcctgtaaagtatcgcacgcgggtatggagaaatattttgtcagtccatacttgacctcatcagagacataagatgattggaaagtatcgtaccatcaagagagaactgagatttgttattgtcacgatgtatatcccttctgactacaaggtttggctgcccagcaaagttcttgagttcaatctcggtaaagcctttcttgtgaccatatttaagaaattggttgatttcatctgctctgccaagaacctataatgacagttgcacattgtgaggattaagaaatcatgtcagctgtttgactactttgtcaaaggtaaaaagccgggttgaccttcggtgaccagccgagaccgatagcgatagagcacacaatagtcgattttcctgacccgttaggacccttcaacgcagcgacatgatatcgaatatatcagccatatctctcgaaggtagctgatgaataataaccacagaacgcaccacaatcatattcaaatgaggaccaggaaagaactctgctgaatcgtatgtcagaaaattcatcaaagatacccgtacgacagccccgggtagatatctgtcaccgttctcgtaaagacccactgtcagcattatatgatttcgagtggagagacgttgtatatagggtttaaacccacagggaagagaacgcacccgtcatggtctctcatattgagtctttctctctgttcctcactcagatcagccattgtcccatccccgtcgtcttgctctgcatcctcttcttcctcgtcatcattcccgtttgtaggcatgtctattccctcgttcccctcctccgcgtcgtcttggtatacactatgtttaggatctatcctcgctcgcttcaacgtgcctttttccggatccctcgagttggagctataagtttcggtggttgagaaggattctccattgagggtcttacgcttggatgaaccggacgcgtgagcttgagtatactggcttgatgacgagccgtcgatcggttcagccttgacgtgccgacgtactctggacgttccaccttctgtcaaacgggaggaagtctttattgatgaggacataggagtttagatttctcctctcaattacgtgaatagcagaagaggtggtgttggaaagagatggtgaaggtgtcaatgttgaagaggatcgaaacttatgatgatagatctgacgcgtctaacggaaatgccttatttgtctctggacgtccatcgcgttaacggttcaatctcctgtcatatcatactcttgtagcttctgcccatctctcaaggaagaccatagatcatgtcaaacggcgtcaagtcagctttgaacagtgtgagtctcgaacgcccttgacgaaagaagaagtgttgttactgctttgttatcctattgcttacgtccatcaccaaaaaaaacctcagatcaagccttccatcaagcgacaagtctttcgaccgattgatcctacaaagctattcaaaacacaacctccgctgtacaacaatccaatcgatatcaacccgaatacacattcgtctagatggcaaattcaagagaagcaacgcagggtcgagaaggagcgtcaaagactgaatcgactggatgatatgagggatcgggtaaaacaacttgaagctcaaggttggtcgatgaagaaggattgataaggaaacccacaatagtatggtgaggttctttctttcctctctctgaagaagtaggtgcagctcgttcgttcttcggcatgatcaaaatcgtcttaagcacactcgtgcaatgtgacaaagtcgaatatgactgacattggacatcaaccgacgccacccagatcaatcgcaacatccgtacttcaaaaagcgcaatggtagctctcctctactacagatgacccatacaaaatgcgcgcatacagcaggccaattgctagataggagagcgaattagtctgttgttgaatcagtttaatactttgagctatcagagtattaccacgaaggaaaactctgggttttccaccatgagcacggggtgatctgactgtatccaggtataccagcgatggccaatggttgtagcatgatgtgtcatggtggggacttatatgtacggatcaatcgttccagccctatcgaggacggtatgattgtgtatatgaacaatggttggttaaattgttctctgacatcagaaatcaattggtgtcccaacttctcaagaacaatttcgcagaaactagttatctcttatagtcacatgttttagacttcataatataaacattaacttaatcagacaacgcgccagatgaagaagaggaagacagaaaagacaggcatggaaataagattacaaaaacaaaaagctcgtgtatgaatagataattgagaaggaagtcgtacatataaaaataaagcagaaagtcgttgaagcgaaccgtcaagaaaagggaaaggataagagataaggtaaaaaaaagaataccgaaacggttagaccgaaggtcgagaaccatcctccgagacagagtcgtaaagaacgacaaagtcatcgtcaccatcatcgacatcagaagacttatcactagcttcgtcttgaacaatttcaccaaaggcgctcatctcgctgttggcctctgactgaacatcagatccttcttcatcatccgtcacggttgagatgctcgacacagacttggtggtgactgaagataacgttgagggttgaaacacagactcagaggcctgttcggagggcacatccaggataccctgcagagagggcgctgtaggcatgacgatagatgaggcgctcagagaggaggatccggaggaagaagcgtcgaccacttgaatgtcgacccaaactcgatcaccaaagtatgtagcatcgtcctgtagtctgtagaacccaaggtatcgtccaacatcctctggagccttcatctctaaagaaacttcgaaagtctctccaggctcaactcttccgacgttgacttgattattgacggagaatggtcgagatcccccgacatgagataggaccgtatgagacgggaagggggttgatccggtgttcttgagtttccaaaccttttgaaacatagctcctccaggaagctctgtgccatccagaacggtcatatcttcaacaaaagttgcctggagggaggcgtctttttcatctgacggctcccgagaaaacacgggtcgagagatgatagttgaaggacctacaacagaagggacgaccgaagtgggtagttcgttcatcgaggcagcaggtgaaggggcagcggtgtcaaaaacagaattcggacgggaaacatcagccataggtgtagacctatcctctgcggagggttcagcagaggtgttggccggaatggcactgttggggccgtcttggtcgaagaacgaggtggcatcaatgtgcatgggggtccttagcttcagcataggatgtctaggatgacgagggatcggagctgcctcgcagtcttcgcatagatccacatcagggcatccgggatgtacacatttgtatcgaatcccgtggatgggctgatcgcatccatcgcagatgacgcccggatgatacgtggcggctcgagggatcttggatcgtcggaaatcatcaggagtctcgaatcgaataaaagaatgaccaggatgatgatcctccacggttcttttgatggtgaaaacaatagtacgacatcatatgttaagacaatttagtcgagtggtagagaaaaggaaacagactgacccaaagcaggaagcacatgtatcgaaatcgggacactcttggcacttgaacctttctccgatgatcctgctgctacagaagtcgcaagttgccatatggactcttcggggcggagaaggagcagactgctccgcaggagctggaaccggggctgagctctctagtcgatcagcgagggacggatggacaaaggacttgaacttgtgggatcgagacgagcccccatggagcttggaagaaggaaaacaagtggcacactgaattgaggttggaagaaaacaaaccccaagttacaacgttaacttctgttcataatagacacctccttaaggtaatagagagaacctacgagatcaaagttagagcattcgatacacttgtatcttaatcccaagacttgtttggagcaaccatcacaccagacctagtgagaacgaataaagagttatatctggttgtcagtcagcttgttcacaggacagcaatggaaacagaagagttgacacacgtgtacaggttccccagtctcggagatccagacattcccggcgatggtttgcgagattctattcctattgacagatgctactgcatgcatgaaatctccgggaggggcaggctcgtcctttgtggttaccgcctgttctccgagattggccgcagtctctttaatatagcggtccataaacccgctgagaattgacttgatatcatccttcgtcgacgccagggcctctacaaggtcagacttggtgacgtgatgagatgcggtgggtacctcggcttgatgggcacagctattggcgtgcacatgggttctagccttgagcttgggagggacaggaggaggtggaggaagaggagcggcagctgtggccttgggtggggacaaagacagcttccgaagagtctccaatgtttcgagagaggtctgcagagtggctgaaagtgtttgagagatagcttccttcttgggagaactctgctgatcctcggtgggtgttgcctcggtcgtcggcggggggacaaccgtgtgctgggatgaggaaggagacctcgaggactgcccctggaggatgatgagcgtggtcttgaagtacccgttggccggtaggggggttccgtagagagcgttcgcatggagcgcagtcagccaatctttctcgcaaagcacttttcgggcaatcatgatctggccatggccgtctggtgagaaaatcaatctgtcgagtccgatcgatgtgtctgcctcgatggagaacagccgttgggtctgagatacggaacgagtgggtgcgagtacgtcagcaatcagacagaaattcaggcaaggggtgaatggagatgaaggacagagaactaccaatggcactgtcgccaccaaacctaatgggtcatcaggaacgagctcaccttggagacgatcacgttccatgccggatatgttgtcccggtgacggcgaactttctagtgtgctggccgtaggtgaccttgacggtgaaaggcatgtctgatgagtcgattctttcgacgatgggctagatggccattttgaatggaaagataacagaaggttgtaaatgagctaatctagaacagaggctaatggctcaagaggctgaaacgggaagagccaaacagatgaaccctcgctctcacctggagtatgtttcagttgtgcagacagaggtatacgtatatacaagagcgtatgtttagattcctccacttcaaggttgagagaaggacaagaaagcagaacaggcaacagaatggatgtgctggaggtgagagtcggtggatgaggtgagtgtgacctcgacagaacagaatagcaggtgatgatctctatcgactgcgcacgcaatcccaggcacgcatagatctcgctcatctccgttggattggttcatctcacatcggctcgtgtagatgcaacattcacacatctgactctcacaccatgatgctcgctcgtcttacttcggccatgcttgtttgggcttcgttcacgtatgctacgaagggtgtcaagcagctcggtattcaagacttgacagagatcaatgtcgagtatcaacaacaggtcaaggtgatcatcggcgtcatgtctagatggtgtgtcttcggtcttcttccaggttctcggaatgacattctcatggtgtatacatcctcttctctagtcccgatgcgttccagatggaatctacattcgacaaggtgctcaagacacggtctgttcgagataaggtcgatcttgaacttgtctatatcggaacgtatgttgattttgccgttctggatctcacgtttcatcactgcaggatctgagttccttctcttgaggatcgtttcaccctaacgacccattgcttttcgaacatgtacatcagtccaaacgccacagatcatatcggtgtgagctgcaaacatggggaaactgaatgctcaggaaatatccaacagttgtgcgctcagcagtatgtcgatcagaccgtctggtggcggttcgtgacctgtcagaatgtacgttccccaaacgataaagaagagtcattccgcaatatatttattcctctatcagactcatgttctcacaagttcttttctacatccttcttcttctgccaaaaccaaccgcttgatgatcgatagtattactcgtctaggatcggttcacctgcacttgctaccgagtgtgccaaagtagcaggctttgactgggacacgtcccctgtctcactttgcgcatctgaagggggtgagggcgaacatcttctcagacagagcgtcaagagatcccatcagcttgaaatcgaaaagagcgctacgttgttactcggggatgatcatcgggtgggtcaacggatattttcaatcgaactgaacggaaaaaaggattcccagactgacaagcctttcaatcatttaatgccaaattctttaggtgagatgcatcagggatgggggagtttggaagaattgcgatgagggacacaccgtcggtgaactggttgattccattttagatacctgggagcgggacaatcgatttttttagagcgaaataaataaaccaaatcaaagtttccaacccaactcatgaatggtaacacaaaagttgcccagttccagagagtgtatgctgtgtatatatgtgacgttctctcttcaacagttcttcccgtaccgaaaactagaaataaacatcgagtagtacgcaagaaagaatcgatacagggtggcaacgcaatcgaagaaaacggacggatctctaagtctaactagatgaaaagaacaccagtgggcttctcaacctgaacctgctcctcgaccacctcaacccattcaccagagggatcctgtccaaagaccgagatccacccatccgtctgtccggaagcaacaatgtactgtccatccttgctcagtccgactcctctgaactctcttcccttccttgggaaaagatgcgtggtgaaagagacttctcctgactgctcgttcagattgaacagagccagagcgtcaacgtcccgaccggtaatcatcctggttgaagcaacaatcgtcttgttctgcttggtaggcaccaggagaagctcagcagctagaacagggacgtcgctcgctatgcttccaacaagagtaggaggcaacaccgatgtgttggacttcagaacaggcgccgacgtgtcgctatcgatctcgtaatgaagaagagccggtcgaagctcgttcaacacataaagttgcttggctggaacacggccaaggcgcagaagtacacgggaatacacagttcaacagttagaggttgaaaatattcaggatcatttgttcgagataaatataacttaccatcgctagaaacaaggatatgcctgggtccccctccctcatcgcccgtcaacgactcgtcctccttaagcttgaagcccatcttgccatcgacagtggtgatcttgaatcgccagactttatcagaccctagatcaggcgaccagacctcgaactagccatcgacgacgacgctgacaacctgatgaggatggggcttttcctgtcggtccaagtctctcagaggagaatctgtaggattgaatggaagcttgaccacggtgtggtcctcctccgggctgaacaaaccggtcggaagcagagggatcaacaaaacggaagatcccaagtagtttgccacagccaaagcagcaccattggcgactatgtcacaatgagcactaaaatataccgacgagatataagttcagattgagttgttctttggtttgataaacagagaagaaaagtagaatactaacgggccctctccttgagtgctagcagtagcttcaacattgaatgtctttccatccgccgaaactctgatcacagcgaccttgccgtcttcctccccaacagtgtagacgagatcatcgaacgtagggtgcctagccacccaagagggcgagttcatcaccttgtgagaatctcctacagtaagctttccatctcgtactccaggagcgctcggtggctgaaagtagacggtatggatcgagtcggtgtaagaaccaaggaggatagtagaagacatgtgtgtagtttcgcgagagcaggtggggtatgagagagaatgtgtagccagaagagagatggcaaacaggaagaccaaaaggttggccaaagtcgatcgggcacacgtcattctaccagatacgatcgattattgtgctgttgcttttttttttcgtcttcgtcttgatattgagaactctgcggaattcctgtcgaactttaatagagaagcgacacgatgaacatcagcaacaacaagctggctcttatagaaatccatgtgtctcaaatttgaccttccaacaccccgttatatttcacgtttgaacccgaccctgaccattctaggttcgacggattaacaaaaacaattagaagcctcggcacgtttttagttcctcgcaacaaaaaacttcctaaaacaacaagaatatcaagattatttcgaatgttcgtcgtggcatcgcgtcatggttacatgcaagaaactgtcaggatattgtcaattctggtcacacccagaagatcgtcaaatcatcccttgttctctgtcttcatgtccattagtcgttcttatgcgcctcgagtctcatgatggaactgtagctgatcggttgtggttaagattgataagatagaatgcaagggcagtgcttgactttggtactgtacaaagctaaacacatccatcgttctagtccgtgtccatccttgacccctcctgctcaccttgttctccctgagcagcttcaccgatcgctctcaagaagctctcaactcctgagccagcacttggaggcaaacccaaggattgcatcattccggcgagcgcgcctgtgcggagggctcggtccaacgatcgtacaccatcctggaactgggaagattcaatgatcgctcggacttcagatgtcgtcggtgggtttgaaattggcaggtcggagggaagatgcgggaacagggaagctcggaattgttcagaggcaagaatgggagtcacgatttgaggagtctacatcatcacgtaagggagcagaattcaattagaatatagtcactgtcaatccaatctagatgatcataggggaattactgacaaggatatcgttcaggctgatatctataacaacaagaagcgattgattggagggtcagccaatttagtcacatccaattcgccatgtacgttgagaaagagaacgaagcttaccaaattctggctctgccagctctgcgatatttcctccgccaatgatgtccctcagacgagcaagctctgcatcgctgtattgagcctgtctgactggattgggtgcctgaggcgtaactgaggcgatggtctgatgagcaggggtagcgggggggagagcagatctattcaacgagtatcatgagtatctgtcgtcaggctaacggagactgtatatttaacgataagagctagaactgacgagggagcagaagtcgtaggaacagatacaggttcgtctgccggaggaacgaattcaggatcttcgatgatagagttactagtatcaatacaatccaatacaagagattgctgtaagtacagacaatctccgtcatcgtccgtcaaggcactgatgggaaagagacgaacatgtgggaagcaaatcgagcataaggagcatcggcagcttggaaccagaactagaagaattccaatcaacattttctcaaagtcagctttcatctatcaaagactgatttgcctgttgaactttgacgcccatctatccaacaacggttcatagcccacccatctttcagggcatctggaaagaaagaacagacagacaagaaaaagacagagaaagagaatacaacacgaacaaagtgcttttccgcactgctttcgaacgtcaaagcgaacacattgtcctgaccggactcaggcacatgagcaaaactggcgtcacccggaaagatgatgagatcgagagcgacattggacgactgtcttgg

SEQ ID NO: 2767 - DNA, 4583 bp, Xanthophyllomyces dendrorhous
tatcgatttccatctagtttgacaccaaatcgggcttttcgggcagcgttcgcatcttctccgttgtccatcccttcaatatcaccaccttcatcgacgactcgtgtcgacgaactcatcggctgttgttgctgatcgttatcgtcatcatctaccaatgcgcccatgcgggtcaacgcattcccggccgacctctcaccgttgaacgtacgagatttattacctcctcggccggaccctctgatggataacggttgtgaaaaatgagaggtcggtaaatccatcggtgtttgagagaacggacgggatgaaggtagacgagctgcatgaacgccggcactgccgtttcctccagcagcacctcctcctcttgtccatcgaagattacctctagaggaagatgaagaagctgctgacgatgcagagtcagacggagggatatgcatgccgactctgtctacacgtttgtcgttgattgatggatgcttgatggaaaggaggattggaaacaactcgcctgatggtttttccttgtagattactgtaatcttccgtagtacatcttgagagaatctctaattagaagtgcaggcacgtgttttcggctgtgcctatggtatatatgttagatgaatatatgtgtaattacataagccatcaacttttttgaagacctctcagacaaaccgtttctacttactactctcgtttcagccaacagtgtagcttgtcgacgtttgccttcgacactcagataatcatccaggttgacacatatgacatcctacgctcccgcacaggtggtcaaacaccctcaacttccgaccatcggtcgctcgccggaagcaagacattggcgtcggtacaagtcgccaacgtacatcaaagagtatgctccgatcgtacaccttcagtttgctccttcaaaacctcatcgattggcagtgacatcctcggccgaagtcaaagtgtatgctcctaggacgaacaaggttgtcaagaacgtttctaggttcaaggagactgctagaagtggagagatcagagaggacggaaatctgctcgtcgcaggagacgattctggtcttgttcaggtaagtggcctttctgtttcctcctcattcacaacgctgagtgcaagagaacaggagcatagcttcttctttagccttttgaactggataagaactaactcgatgcggatgtttaatctgtcttcccttcttaggtcttcaatttgaactcccgagaaattctcaaacagatcaaacatcatgctcagtaagaacagttgttcaatttactgatgcctgacctgattcacgcaccaacactgattcatgtatacacgctctgcttgttcattcttatagacccgttcatgctaccaggttttctcctcacaatctttcgcagcttttgaccgcgtccgacgacaccaccgccgcgcttcacgacctcacttcttccactcctctcatgactttccatggccataccgactacatccgcacagctgccttccacccgacttctccttccacgatcatcaccggttcatatgacaccactgttaagctttgggacgtacgaacgggcgaagctgaaatgacgctcggccacaccggatacgctgtggagtgtgtgttacctcatccgtcaggaggtatgcttctctctgccggtgggccggtagtcagagcttgggatcttgctgcgggaggtaaagcacttaaggctgttagcaatcaccaaaagacagttacctgtcttgcttgggatggaccgggaaggagagcactcagtggatcgctcgatcaaatggtcaaagtttgggatgttgcgagttggaaggttgttcataccatgcggtactctgcgcctatcctgtgtttggctatttctgtgagtttgatcaagcctctttctgatttcgcctgcgctcttggactaaataactcgttggcttgcctctccaatgtcttttcagcctgatgatacccacattgccgccggtttatctgactcgacattgtcaatccgtcaacgagcgcccccgaaaaatgccccaagctcaagtgcattcccagctgatgacacaccattgaacccgtctacttacacctcgtttctctccgctggagccgatcttggacaactgatccagacagctgagaccggtcgagtgaaggataaggggaagcaaaagtctgcgggagaggttggggagatcagggtgagcgatcagaagaggaacggacggatgagagtgtacgatcgcttcttgaaggagttcaggtacggtgctgccttagatgccgctttgaaacgggtcagtctacctcttcgtgtgttgtttcaagaagtagttgaagagaatacgttgcgtgaccccggaatactgatccttgcctatatttcccgtcacatcttatgtaggacctcccgccgacgacctcgttcactgtcatccgggagctctcggccagagatggtcttcgtatagcgctttccgggagggacgatatctcgctagagcctgtcctcaggttcctccttcggaatatcactgatacccgattcagcgctatcgctgcccaggtgaccatcgtcgtgctcggtgcgtttgtaactttctgctgtttcctctacttttgtttgttttgaattgtcgtcatgtgctaacttttcttgtctcctcatgtttcatagacctgtacgcacccgtgatgggccagtcgcctctgatcgatgacttgtttgttcgactccagaagaaagtagctgaagagctaaaagtccagcgagacgttgttctcggtctgaagggaatggtcgatatgttgatctcaaacgctatggtctctgtcaagactgctggagcggttcgaaaggaggattcggtgactgggactggatcggtagctgtttagacatgtcccttgtgttgtcgttttctttttctttcttttttttttcgataaatgtagatttttatcgtagggcagggatacgggatatatccacttgtcgcatgactgctttcttcgaagatttctcgctcacttggcccaccaactctggtcttgacccactctttgcattgaagccaatgatctacactgtccgttcactcggagtgaacttgaccaggaaggaaagaatgacagacagactgatagataacgaatgtttgtgctcgtgttatgatacgatcatgcgcctgttgaaaaataatataccgggatctgtgttgttgtgattattcttgattctcgacaaaccttgagtttatccttctcgtcttttttatttgtttggcttttcggctctatcccatctggttcctatcaatcgacattattttcagcagctcacctctttggttcttcatctccctggtgtcgacaccttctttctctcttcagtcttcaaaattcttctgttctgggttcgtgcataaacgttcagccctcctttcggagctgcccgagtgcaaagaatcgctctcgtgttctatatcgcctttctctgttcttcctgtttgtttggtttccccacagatgtttcatgaaacagcttcaactccccggcctcgtccaccgaacaatagtcgaaacagaacggcttccggccgtcggtttcatcgaccatccctctcggcctcagcctcgtttccatcctcggcctcttcctcgtttagcacatctatttcgtccagtggtaatcttggttccgaatctggggacctaaccgaccctcggaagctgagatctatcccgtcttcaatcgtacaccaatacagctcgccgcctccgcctccgtacttgtccatctcgggactacctctctcgatagaggaccctgatgaaacctccagagttccaggtgggttggtgggcatatcagtcgacagtgagggatcacagaaggaaagcgagacaacagagcagtgggtcaaagccaggagcagagaggagcttgacagattgcttctcgaagcagataaggttatcagagagcgagaaagaggtctgtctatctgtccgtctcttgttgaagttttgatttctctagaggctgaccggcagttacttttcaatgaacgtgaaaagagctcgagctagctgcttccatcggaaagtccttactggagaacaacattgctctccgtaagcgacacgaatctcttctagcttctctgccagagactatgcctacctcgcatagacggccggtccgaccgtccgccgtgactgcttcctcctgggtgaccgacgactcagacgctcaactggatcaacctgcccctgactctaggccagaacttcatacgccagcccggtctcgtgtccattcattcggtttgtactcccattctttccaagagtctcttgaaccagatgaagagttgttccaatcctatgatcgacctccctcgcgcgctcccgaatttctatcatcatcatcgtccgcgaaaacgaacgtgttggacgcagcgtcacatatggcttctaccactacagagtcttctcctacaagcgcaaccttctctggtacgagcacgaggtgagatggaggga

SEQ ID NO: 2768 - DNA, 15472 bp, Xanthophyllomyces dendrorhous
ctctggtacgatcacgaggcatagaaggagacaatccagtctctcggcgtctcctcaagctttggcattcttaagggagcaaaaccacgagctggccgtacagttggaggctttgcaagaagaaacggaggatgctgatcaaactggttcgttccatctcgtgtgtgatctttgtgagacccagtagaatctcgatcttaacgtttggctttctctttctcaggcaagaagaaacttcgaaaactcgaaaaagaaattggatctcttcgggccgcactagaaggaacagaagctatcgtcgataccttgcgcgagaagaatcagactctcgaacaagaggttggaaagcgaagttctagaggagacaacttcgcaaactcttctcgagacggcggttgggccgaacgaagacgagctcgactcgaacaagagatcgaggagaataatgtgaactccgaccgaaacagcagcgcgctggagagtagaaagttatccacgaacgaaccatcctctgcttcaagttcaccatcatcagaccgagcatcaggtttcaaaccgaagaacgcgccggctgaggatggttcgcccatcgaaacgtcctctctttctccctccatctcacctcgtgctcgctcgctttctcttcttggtcccgaactctctgcaaagtcgtctcctcggaagattcatccccagactgctgactctgagacggagaaggcgctgatatcacagctgttgaagaagatagaggaactcgagcatgctaatacagacatccggaaaaagagagatgagatggatgccaagcttgataaagccaagaaggaaggagatgaactaaagggagtctatgagattctcgaaagtgaggtggagaaggctgggttggaggtgattgacctggacgaacaaactgacaaagctgaagatgatagcagatcgggcagacggccaacaagatcctcgtcgcggaaaggatcgcccagtttgattacaagtgaaaacaaggcaaggttgattcccacgacacctggaagatcacctaccacatccagcctcgagatcaagttcttctcttcgtcccctccgatcactgaccggctatctgattcgaatgcactctcaccctcgccctctgttcttctcagctctccccggtcaatattgcacgatgaatccccttcaggcttactgtttcatgctgctcctgcttctgtgggcccgacgtctccctcttctagatttggaactggaaaccgacttacaatcgaacggagaagacgaactagagcggctagccctttcatctctccaaccatctcaactttaacttctccaacccgtctacctcgaggcgcgcatgattcctctatcggtcttagtcccgaaggttcttcgcgaatgcttcacatgggatctccactaaagcttcgaatcagttatactaccgagatgactgattgtcatcagcaggtccgccgaatgacactagagaatgagttcggagagattgaagagaaatcgagaacaacagactcggaatcttcactgtttgatcctgagccgaaatctggtcagccaagctggagaaaaccacttgagacggcgaatgtgtccgggacatctccttcgtcgttgccgtcaccgtcgtccatgacatcgaacagcagaacgaggttgtctggaagacattatcggcgggctcggttggaaggcgtcccacacactccgtctccatcctcaatcttttctatttctactatacgtgacgaatttggtactgttgatcctacgatggaaggctgggaggacgagccgtccggggtatcagacggctcttcttctttctctctgtctccttctcattctaacgcattgatggttcgatctcaaccggaagagctggtgatcgaccgagagtcaggcgttggacactctttagaagatcaatacctagacacgtcgactccaatcttccctcttggctctctcactcgactctccacgttttctaattcagagacattcgaactgctagatcgagccgtctcggaacgtgttgtcagatggtctgacgagtcactcgaccctaccagtcgaactggtacttctccccacggtattgttccggccgcggatcatgatccaatgtcgattgctactgcactttggtctttccttcctacgctcattccattgaacgtgtcagacccgttcgagacgacgttctatccggaacctgtcgagccggacgaagaggatctgataactgaacgaaggtcgttcagggaggaacgaatgaatgaagctaggcggaatggattagatccttatagtagggaagtactccgcgcgcctacgaagcgagaactcgctgctcggcgagtagcccttgatcgaacaatttctgtacaggataagaaatcctctggaggtgacggaaatggtaatcgagatgacgaaacaaacatcaatcgagttcgatataggagctggtcatcgagagtgatttcgtacgaaacaatggaccggataagcgcgcgctggatcgaaacattgatggatctctggttcttctgccagatcgtcgtgatcgccgtggtattcataaatgagatggttaggaatggtcggaagacacttcggtacgccctttatttaacagatgcctcgccgtcaaccaagtatcactgaatgccagtttacgtttgttggtacttccttgtcccttgacaattctagagccatcgatagacatcatccaactcacaaacaacgatgaacgagtcacagttccttacgttttccttattcacttgccaatctcaccttgcttctagctatcatcatgtcaaactctcttctcttgtcaaccgacatattctatgtcttcgggtttccactttttagtcaggctccatgttctttatcccgtgttttcacttttcaacttacgtacatatgctccatgtaggtcatcaccgatcggccatgatacccctctcttcctccatccttgctctttccataaacctatatgtatccgaacactgtcttctgccatatactcccttatgttattcccaacaaacaactccgtacatatgtctataaccacgtggagggaacttatgtgttcactttcattttccccctttttttttcttcttttgggactttgatcaaactatgaaatttagaatgatggcaacgttgatgtttatcaattcaactaatgatgaggtccaatcaacaacagcaagggtagtcgtggctctcacgaatttgaatgccttgcgacacatgaaaaagtatacaatccattgatagcttgaaacaagagaccatatcgcgaaaccccctccctaagtgaccagagtacaaagacatacaacgaatgcgagaaaggaaggagaaaagagaaatgcaattctgactgcgcatagaacgacaaccatatgtggtcaaacagaccgtgaaggaaagagtagtgaggattgagttggaaggtttttttcaccccctttgaaagatacaaatacatttgatggcgccaggttcttaaaaggcgctctgtgaaccgttgaaggacagtaaatatctaattgggttagagctagggagaaaatcgcatcattagaaagacaaacgcacgtgaagaccggtagaggcgttggattcaaagctactggaaaggctggtggacggagaggtggaaagctcggaagaaggaggggattgatgtgcgacgacgtaagaggttcgagcgatggaggaaaggtctgctgacgtaacattgaacatacggaatcagttcacatacgagagcttttaaagcgaggtttatttgctgaggtgtgaggcaggaatgaatgcatacagcatcgatgaaaggggaaaacgttggctgaatttgaaattatgacaacgtaccaatctttcccttgttcgctcgcttgacaaagttctttcgtacattcaggtcctttttgaactctccctcccggatatcagccgcgacctgagaacgaaaaggggcagaatacgttgttaggatttttcaacgaaatgaaagacagcacaaaaaggtgttgaaagccgagagaatcaagaagtgatatacccattctaatgtcaaatccaatattttcaaccagctctgtaggcaccaacccagatagatggagttcgcacgaattcatccaacatccagccaagaagagacggtcatcagaatattgccatcccctctgcatgtgatgccaaataccaaatgaaccccctctatacccgaaatcttccagcgattgaaagaaaccaaagcaagaaaagggactcaagggagataaattgagacaactaaccttgtcgaccttttggtcttcggtgggcacatgcttaggaggctgaggctgaggggtctgtgaatcaaatgcttcgtcctcttcctcgaaagtaccgacgacgcaatcgtcgtgggtgatatggtggtgacgggccgagatatttccccagccgccgtagccatctcgcttctgagactgatctcggccgtttctgcggagatgcggatggaatgtagaatgagaagggaagaacagaaaagaaatctaaacaggaaacaggagctagacaaacttagagatggatcgatcgtgagcgagagcccgagggttcaatgctttgttgcttctagtcatgactgtgtgtttggctggagtgagaatatgatagatctgagataggataggtttgattcaaagggtgatggatgatgagtgatgggtggtgggtggtggatggttaaaaagaaggtaagagaacggaaatgtttccccagtgaattctagaaggcacaagacccggaagaagacacggattagccgagatgccctgaatttagatccggaggtccgtgcggcgtgatccgtgtaatagatggcgaccgggcagtggttacaaagtcacgcagtctaaccctaacctgaactccatctcgttgttgttcttcgtattacctatcctgttctttgaaaagacaatgtcctcgttgtccatctttcttgttctttgtgtatttctatgaccgccccagcttcggcttcattctatctgtttcttctgttcgttgccgttctgtaggtcactctcttgtccgtttggaacactctttctttctctataccatccaaatcgatgactatatgcgccttcatctcttcttaaagattcgctgcctttatcctgtggcttatcctatcatcttgtttgggtgagttcactcgaggatctctcagtccgcaagtcgaaagagaagatgtctgctgacacattgcaacttccttgatatgctcgtatctttcaggagcctcgattcgagacccagtcccgttccaacagcaacgacccaacagatacagaacactcgaaagatatgtacccatcatgcgcacagacagtcaggacagcgctcaggaaactctggagcttcaaatcagatgaaaactctttcattgatctggattcgtctctaggtttatctgtgttccaaacttggcgtatctagagggaataaagaagaagagaaaagcatccaggaatcacaccaaagacatatcacatcttcagctgtgttcctcatcgataaggctcaacgggaacctcggtcgaactcgtaaagaaaacggataacactcacaataataccttcagttcgctcattccgctttcacattccctcttctttgccctcaactcgttcatcttggtctccattgcttccgtatccttctccaacgtcttgagtgctcgaggtaacggcatgtggaagaacgagtcgccaagcttgtacctatcgcacaatcgaatgataaaagatgaaatcatgagaaacgtagttatacaaaagcagtattcgtacttgtaagacgtcaagaacgaagagacatgacttacagtacaggctcatcctcatccgctagctcgagctccaaggcgaggtcatccagagcttccttctcctcctgaaagttaaagtagaaatagagacaagaaatgtgtcatgttaaaacaacaggttcggagcctacacgatatcatacgattcgaaaactcacaagttttcgcttcaattgatcttcgacctctgacagacgggtgttcagtttcgaaaaggtgttgatcctagattgatcctctatttacccgtttcacacgcacatacgcacaataaataagattcaaccaagagctattcagaacagatctatatcaataaatgacaggggtctaattgagagacgcttttaccccagttgacctcgactgcctcgtccggttcttcatctcgtttaagctatttcataaagaagcagagaattaacatgaagccagatgatttacgaatatttctggctctacaaaggatcgtatacatgagcatgggactactaaccatcttgggagccatgtcggctgattctatctggacagagtacgtttatgtcgagggaaatgaatgagagcgtgaaaatggttcgcattctccgagcgactaattactttcgatacacatagataaacctctgaataccactatctttacagccggcatacccgtcatatctatattgatcatcaatctcagctctcgcctctctcgcacttcacttgctttctaaaccaagatgtctgttaaatgggaaaacaaatattatcaacgggtaagtgaaattatctctattagtagttgactgatcaacaggtcgctgatcatatctggacgtcctttgggaacttcgttacttctattttttttttcggattacagactacaggtgaacgatccagtttctgttcactcttatgttctctcgcccaccatgaagcgctatttgagccttgctgatgtgattgggtcgactgactttaatatgcctgatgttctcaagcgtagggaccggtcggccttgttatatttgctataaagagagtactgttgtcttggcgagtgggttcttctcccaatctctttagctactcgtcttgttgaaaatgatgtgctgatgcatacggttctactgtttattcctgcgtgaatttcttagcaatcaacacaacagactttttctacgtctgtccatctcatttgaccgacagtggatttgcgactctattgactcctcccccggcagacaagccattgaaggaagagatcggaaaagttatagccgagtacgaggccaaggaagtgagacggaaagagaagtctaaggaggaaagggagggcaaagacaaagaatcagagaaggagtcgataaaggccgggaaagaagaggctgaggcgaagaaggcttcgacaccattgattccgtctactcctattacgccaagtcataagtcgtatgctctccatcgtgtgagtcttgattcgttcttctgtgcttgagttgaagacatgttgcttatgtgcttgacttcatacactttactctcgttcacttaggatatcttcaacatgcgaataagcgacgcgaaaaagaaggaaaatctgatgaaggtatgtatccgtcatatctgtcctgacgtcaactacgattcagactaatttctgcatctctctcttgtctctcatcaggcaaaagctgtttccaaaggtgcgtttccgattgcgctaagtaccaaacgtctcagcaagacaactgatgcctctctcctcatgaacttatttcacctttagatcttcctcgagctcctactggattcggccgacattgagaagaagaactgtatgggatgtgtggtgcttccatgttgtatctatgttgtattcctgacagtcgctatgctatagaacaagcgatgtgattgctaggcttgtaaatgtaaccggtcacgcgtaaccatggtcgatgacgtatgatggatcgctcggtcgtctgttcgctcggtctttttccatacctgtttcaaaggacagcccatcacttccatcatccgtccacgtcttgtccaatcctcttaacacgatgtcgactccttcgacaatagatactggcacctcccttggaaccgttcttgatttgggagagcctgtcgaggtgattgaaagagagactgttcaacaaaatgttgttcatcctccggttgctgctcctgtagttgtgatcccagctcctcctccagccccagaacctatccatcatcacaaagaagatactgtggttcagaagactacgatctactcagaatacaatcagatccctactatatctaaatagtgcgtccgctctttctctgactagaacatccttctcatcctgaaaagataaaccgaaaaccatcagagcaagtcattctatcgggaggcggggtattttgttatagagattgatttcattctattttggtgattgtttgattattcagtctggagaaccaagagcgagagcatcaggataactatgatggtagcctgagtgatgatgagctgcaagaagccaaggatagagaggccgagcaaaatgaagctgagaaagaggacgataaggacgccatcaagaagaggatgaagcctgatgaaggaaagaagactgacgaggtatgtctgatgcattcaattcaaaccttttaagttaatctgcttgagctaattttgtgaatatctcatcaatctctcctgttcttgcctccttctctttaggttaaagaaaagaaaggaaaacgaacggtgaaggaccccacgactggatacgcagtaacaatcaaggatgcagagatgaaaggtaaggacacatgcaaatccagtcgataaacctgcgtcagttttcactctgaagattgaccgttgccatatcaaaacgttctctacagaattccctctctcttccttaatgaacgccatccggccacctccatccccaaaggaaattcatcattctcgaacatcccctgttcctgcccatccttccaacatttcccttcttccatacccttcttctgaatcacccgcgctcgagtcaattcatcagtacatcgactggttctccactttcgctgtcgcttcgtctgttctgttgtgggctgtcaccgcttcgtctggcggttggatcagctttgtacttaaaacgggcttgataggcgcgttaggtgcgggaggttggtatcttggtcgggaaatcaaagacggcttgcacgccgagttagaagtagctaagaaagatttcaccaagaggagaccaggaaagtttgaaacgccgatgccggagagcacggagtggctcaacagcctcgtcggggcgttctggaagctgctcagctctggtgcgtacacgtgtcgactcaaatttagtgcctagttgtcgaagacaaaacgctaacgaggatcttgtgggtgcgccacgacattactttcgtctaacagagatgtttctcactacagctacgggaattgaggataccataaaagcttctgctccctttcttgcaggcgtcaaattcacagatatcgatcttggtaggttgtctatatgactttgtcagaaggtagtcttccgtgctactcttactcatcgatatattcaacttctcgtcatacaggagcggctccgctaagaattttagaaatccgaggacttgctgattcgccctctgatcgaaagtaagaaacgtttttttatatcaaaaccaaaagccaattgctggtgagcctgacagatcaacggtggtttccagatatcctcgagaagaatggatcaacttgggaaaagacaagtacaaatttgaggaatcccaatctggagactacaccgttagtttctcttctatacactctctacgcgttaccttctaccgactaagatgaccacttatccggaactttgcgaatcatagaatctagaaatttcgtttgcttacagtggaaggaagggtgtaaaaggggacacacggccaactaatatacaattcactcttgagctagtcgcgcaggtaagcgatcgagtagctactcttgctttcggcatcgatctcagatttgcacatgagatctatctctcacttcaaacaatttatttgttatggcacttcagataatggagaagtacaaaatcccaatccctatctggatcaggcttaaccgaattgttgcaaccatccggcttcggcttcagttcattcctatcgctcccttcgttcgaaatgtctcatttgctctcgtatgtcttcaacacatccatgttcaagatatccttgaatcgagatgctgattgataagctgtttgctgtgcgctctgtatctttctgtcttccctaaaaaatgggatacaaaaacaaacgaacggaacatagatggatgctccagacattgacgtcgctatctctattcagaaatacctacccaatcttctggatctacctctattgtcttctatgattaagctagggcttaagacgggtacgaaatcattaaccgcgcccagatcaatgacgatgaatttgcaggatatggtcagccctggtatgttctcatagcttctttcttgagcttcggaaggaaaagaaaggctcgtgggactgatggttgcttaaaaattgtatcgatcgattgctcctgtagtcgctatcggagaaactaagacacagggtgtgttggtcatcaccattcactacggagaaggcttgagtgcccaggataggaacggttcgtgattatttctatattctagctagaagcaactttcttttatcgactgaatgacatttcctctatcattaggttcttccgatccttatatcgtgtacgttcaatatttagagatagcctcacaccttcccttactctttctcgtcttaataacagattctttgtttgaaacacagaatgtcatacgcaaagtttgggaaacctttgtactcaacccgaatcatcgttggagacctcaaccctgtcttcgaggagacttgctacttacttgtaaactcggatgacgtaaagagtcaggaagcactcagcgtctgtctctgggactcagatagtacgtgacttgcctcagttccttgtatgtgcaaatctagtcaagactgacgacctactcatatggtttgatcgcactagaattaaaatcggatgatctcattgggcgaggtatgctacaaatgttcaagccacacttttcatagtgatactaatgcgacggtttctttgtgaaatacttcattttcaaccacaacgaatactcacagtaaatgtccctcttttggatataatggcgaggccaaacgtaatgatgcgccgaaaggatggcctgtctgggtttgaaggtgacctctctcattaaatttcatgattttttcaaaaccagatttagacaattaatctccccttttatgttcttatgatcagatgctaactcgatgcaaggaactatccactggtctgtcggatactacgagcgagctgctcttctgaaagaaatggagtctcctgaagagaacccggctgcacctcctacaacttctctgattgagacagagacgatgatgccgggagagaaagcacctttcccagcaaagacgcctcctcctccaccgcctgatgcaacccgaactccgtgagttatcttgaccacatatatgtcagccattggaaacatctcaaaatataccttgaactgaatgtaccttgttttacggatttatgaacacatagcccgaatccgaagtataaatctggaatcttgtctgttcttatcaaccatattaacagccttgaaaggaagcctaccgatgatccaaaggtcagctttctcctttctattccgatgcaagacatcgtatccagacaaactcttatcgattactccgatttgcttgacaggcgccccagactcctccgagtgcttatatcgagcttttcattaatgaagaattggcaactaaaactcgagtccgacaatacacttctatgcccttctttgtggttcgtttcatttgtctgtctgttatagcttgactttgcactcgacttcaaatatactcaaagccaacggttgatcgacatctctttactccaaatattaccagacactttcggagcactttgttcggaactggaaggatgcccatgttcagatggttgttcgagatgcctcttggtatgaacaggatccgattctaggtgtagtcactctagatcttatagatttgttcacgaagtcaagtgaagtcacgaagatgtttgctgtaagtttctccgatcacaactgtcctctgctgtatcgggcctttcgtgactgaccatcaagtttcaatttgtggtttagatggagcatggatctggaaacggacgtacgttatttgacatttcagaaataactcctcgccttgttatcactgacgaagtttgatcctcttcattctttacgatagaaattcacgcctctctgaaattcagcggagtcaagatggatctccctcccaacctctctggatacgaggcgggtaccattcaaatcactgagcctatagttgcagatctatcgcctcagtacaccgatttggcggaggatctcaagcatcttcgaatggttacgaatgactcatccgagcgattgcctaaaaaggaggctgttgttgatggatctagaatcacatgggatgtcgataacgtccgacttcctgtgtacagtagatatcaatcctgcctatcattccagttccagggcagtaagcttcttgggttaggcaaggagctcaaagctatctcatcactttggctccaggagctcgttgatgaagaaacgaggactatcagaatacccatcatcatcgctaaagatctggttcagcttcgtcagaatgtgagacactactcccattcttgcttcacgtgcatcaacttgactgacaaaacttccccatctctttgacaaacagtacttgaacgacttctgcgccagcacgcacgaatataaagttgttggttggctttctaccaccgttcttctcgacgccggtctggatgaagtatatccgatgctttggtcttcgtctttccccccaacatatgttttttgaacgaactgacacgcctttaccccttcaaactttgatctacaacctataacaggaccacgaggcacgaacccgaaaccaagcacaccgacacgcctatgaggtttggaatgaggtcgatcgtaaagaagaggttgtcgccgagcctcagatataccatcctgagggggtgattgatcaggtttgttcttgtttcctggtattttgtttctttttatttcgcgaaatttaggttgttgaatcatagacttattgcacacgattttttttctttgggcgtcgatttgtcttccgttgacacaggaggaattacatcagaaacaagaggtgaaaagggttgagattaaacaggagaagaaatctacccgccgacatcggtctcgaaagtacgttctatgtctattactccgacttcttcattaattaaaaactcttgcctgacactgatctgacatccatgatccttaactatgtcctgcttaggtctatgagtcacttcatcgagaagctgaagggccaccatcatgactagttatcacctttgacccttagggtcatctagttcctggtctcatgtcttttcacaactgtcttccattaattgattggccgacagctctaatatcgcttgaatttcttctttctcatccttttctatatcctcatttgctttgaatttctctgtgttgtctctctactactttgtttgactgtatctacccatctcaacatattcaatgcacacacacggatttatgtttttcactttgagacattcggtttatgtataacaagaaacaacaaatttagttttggaccacccagatgatcaaggaagtcattatttatcttctgaactcccctcctcttcctccgaggactctttcaggttttttattgtccttttcgatctagggtttcgtttaatcctcggttcgaccttaacctcgggtttgatcttctttggattctttggtgttactgcgttttttacttttgagatcttgagtactttcggagggtttcctagtagtttgagacccgcacattctttgatccattctgcttgaactttttttttttttgcgaaagaagataggaaagggcggtgttctcattagcaggcgtattttcatctatccgatagatagtacacactggttggtagatgacttggatcttcgagggtctcgagttgatgaagctaaagtcccggtaaataccgtagccattaggaggagaaaagatacgagaaagacggataacgacttgtcagtatactttaattaagagattagatgtatatcatgtgcgctacaggctgggccgtgaaaacacgagtacaaaccaattcaatctcccgcttccagacctggtcgtttccattgttgggagctatgcaacaaacggaatagaagaaaagcgaatcgattgtcaaccgcaaagatgtgaaccagcgacgaaaaacaacaaacacaagttcctctcaagactcactctccaggatccagaggacatctctccacccttcccaatccttctttccctctggtccattccaccgaatcaaagaccagaacccttctaacccaatctgacctacccctatattctcatgcctgtctttcttcatccctaagccaaatttactatcatttacatgtagtgctttccagtatctgaaaggaaccatactgtcaaaccgggtgagagtttgatggagtgtcaagggggttcgaatgtcatttgactcggacgcagcgaacagatgacctggaaagaaacaaaacaaggagatttcagtaagacaaaacttgtctgtgactttataaaaataataacggataaaaggaggcgaagcattcgatacgaacatgtatctatgcaaactccaatccttgatttatctttcacaagtttgatgatgtccctcaagtcctcgaaataagaacccaagacttcaccttggcctgccttttgtacacaagcccaaaatcgggtttcaaaaagttatgcggcacaaaaaattagcaaaataagcatagagacagaagcatagagacggaccatgttctcaagcacgatcgttacgtgctttgtctcgttcaacgctctattgactccttcagccacccatccaatcgctctaaccctatcctctttcattggagacccaggactgagcataaaccaagcgaaatgactttgatcatcagtaacctttccgtacacgtcttcctcaacgaagggctatagagggtccttactgaaagttatatagtccaatccctaaactttcacagcgcttgatgtcatcaatgaagcactcgtacgacttttcccgcttggagctttccggattagccaagttgaccaaataagacccatgaggctatat

SEQ ID NO: 2769 - DNA, 6878 bp, Xanthophyllomyces dendrorhous
ggctatatagcggaattgagtatcgcttccatcagcaatgaaccaaagacgtgaatcacaaggtcaggagtaagcttcgcactgaccaacatatcccgctttggattgtatgaaaattctaaccatctcgcaccattcgtgaggaataagaatgagactctaacacctgatcgatagagggaaggagggaaatgtaagagtaaagcagttggtttactcacttttgcaagcattagggaatgattccttgatagtcgtctctgctaacgccgtacttttccattgtctttggcttttcaggaacaaagcaaatgcattcgctctatggaatcaacatggcgagagaatcaatcaactgcttgaaaatgaacatcatgaaaatgtatctcaaagactcacccgatcttagctgcattcttcactgcgttctctactccacctgaggctgaaacgtgagcacccaccctaatagcgcttccacttctctctggtgcgatgtcctcttctgcgacagaactcttgagtattctaaccctctttgcgggagactccttctgagaagcagctgagggagctacggatggaggagatgctggacgaggcgagaccggaggagggaactcggaaggagaatgaggaggggaagatagaatggacgatctagcggaggcaggaggcgagggagtgctcatgaccgcggaatggactcttttggggcgagatttcatgatgaacaagtgaggagctaaatcaaccccctggattagatattctttggtgagagagaacagacttggaaaatgagtatgtggagtgggattgggtaaatgaatgttggcggagatttgacgaacagataatttcgtagcgcgatcaagagataagggatgtcaccatcatagcagtatattagacactcgacatccgacatagctttcggcgagaagacacaatatgtaatatctcaagagcaacaatcatagcgaaatagacgtcgtgaaaaagaaagaacgttgaaagatgcaaaaatgaaagaaagggtccgtgtattcatagccctgtaaaggcttatagagatggcagatagatagcgagcaagcggtgaaagtgatagtctcttttttactacatgaaaagacgacaatagcgatggtatgatacgagggaaaacaaagagaaatgttttttttgaactggatgatttacaaaatctatcgcccacctgccaatgctctctcgagctcctgagctgggtctaatccatagacttcatcaatcgggatctgctgactgcctgcctcccccatcccgtacgtcggctgagcttggtttttatcagttcccacaggctcaacggccggtctggtaaagatcacgaatgcaagtcgtatgtcaacgatcaccaaggtcagaccaaatgaaggcgtgcagaacaagatgaaagtatcatatacatactgttgagtgttatgtgcttgttcccatcctcgagcctgattcctaacctcttgacggaagacagatacttcatcaataatcaacgaccgcatcccctccgtactttcttcatcctcgaatgcgaaatcgacatcgaactggcacgtcggctcatcatcttacgaaagcaagctggtatgatcaggttctatatcaaaaattgaaagaaaccaagagaaagaagcgtactaggatcatgccagaccgagagatacggatgatttaacgcttcctcgcatgttattcgtttcgaaggatcaaacgtcagcattctagtcaataggtcgattgccagtgggttcgctgattgatacacgtttccaaacggtattctcggcttgataggaagcgatcggatatattcttgtgcctgaaggaacggtgagagatcgaagccagaacgtatataaagagtggcaaaacgcaatcagcagtaaaaaaaatgaggacatagagaaaaaaagaaacgagacataccctcggggacccaacccgtcgaagagtgtcttcgcttggtgtacccaagaaatgaaggatttgattgagctggtcgacgtaatcccgtcctttgaagataggtttgcctcctaaaagctcagccaggatacagcctacagaccagatgtcgactgtaggaagtgatgtatacaacagaaaattttgagcagtgatgtaaacgatgatttgatacaaaacaaaaggacagagcaaaatcttggacgtactggatgcggtgtagttggcaaatgaaagcataatctgtttagcgagaaatcatccatagtgagtttctgtttcatcatttctgaacaggttgaaaagagaatcaaatctactcacttcgggagctaaaaaatcaaagattaccagtatcatgagaagattagtgtccgagcgatgacaagagtatgaacattcggattatcaacatacctcggtaccatctcgtcataacatattccgtcatgattcctggtccgcccttgtcttcattcccgttctcggcaaatcctcgtgcaaggccaaagtcacaaatctatgattatgatagagcgcacagagaactggtcaggtctatgccaaatgatgcgccaactgaaactgttatgttacataggtatccctatgcgtagtctttaccttcagttcacaatctgcgttaaccaacaagttacctgatgaacgaaaggttgaaaaatagttttctcagtgtgttgatcaatgatctaggggaagacgcacataaggataacatgtacatacccggcttcagatctcggtgcaaaacatttgccgagtgaatgtatttgagaccacatagggtttgatagacaaatgattgaaagtgcgcgtccgatagtggctggccggatcgaatctgagtatgaaaatatttgaagtcgattcaaaaaacgatgtctctactgagttttgacttcatgacggagcgcaagattgaacaaactaacgattgcatgtaggtcggcctccatcaactcctcgtaaaggtagacttcgttgaaagaacccgcatgaggatcaaacacaatatctagatcataaaggcaggtaatctaccatgacaaaagccacttccgaaaagcgctcaaccttccaattgttaaagttagatcggaaaagatctcgacttacgttcttgtgtcctctaaaatgatggagcaacttgatttctcgaagacatctcttggacagaatcttcttagagaatatattagtgatctgtgtatatagacagagttgatgtcgatgtttccaacagagatccaatggatttggagatgcggaagatgttgagtaggcaaacaagtcagtgtccggaggaagaggtgaagttaggatacgaaagatatttttgacagagaactgtatgcctccgaatagacagacggaccttcttcacagcgcacctatatagaaacaacgcatagaaaacccaagggggtcagattcaacttacccaaagcaacaaataggaaagagagcagaaggaatacaccacgtatgtggtgcaacggtactgaagatatctggtctcccgacatcggatacttacatctcaccggttccgatatgtctggcgctgatgacacagccgtaagcacctgcgctgtgattgacgaaggagaaagaggacaaagtggattcatacagtcagtcggagaatggttgaaagagaaaagcaagaggcatatttgttagccgatcaatcaggtggcatttgtggtcagatactatgagagaagaacgtgcccgagctccttcaccatggtatacgaagagtcgatcacactgttagataaagtagagcgagatgagtaattgctctttgttcttgttggtagaccgaccactctcggcaaaacatggaaagactgaatgctgacaattgctggttgtgcgaggtgaacaccgttctttgtggagacgccatgactggggtgtgtgtatacgtgcgggtgtgagtgtatggtaagaattggagcaaaagatctaggaataggattctttttcccatcagggacaggaatgacaagcggtgaccgtcgaccattctgactgcgcaaaaggcggtggataaaaggcacgtgtttgtggcgttttgctcactactatcttaacccttcgcacttctttctgtttcatttcgggagatcactcactatacatcctgtctttagctcgcatcagctccttgacaatgtcggaagcccccaagtttactccaggatcgctatacgcaggcatatcgttctctcagtcggctgaatcctccggctcaagttcatctaatccatcaacgaatgtaaacgcggattcggcaaacgcacccaaaaagagtaagatcctcaacaggtctaccgaaatctattgagtactcaaaccaactgactttgattcgttccttcttactccatctcctctcttcaatctcataatatagactggtcaactgcgcttgcatttgctcctattcgtcgggcgcccgctcaaaaaccaaagccgcctcggccgtccgccgcgttgttctttactcctactccgaatgcttcttcaggttcgaagtcgacagatatcgtgcgagaagcagcacctgtgatccataagcctagaacagacccttccatttcgaactctagactcgcagaccagacgtatacccgggccttaccctctcttactctggaagaagatatcaatgggttcaataaacgtctgaatccctcgtcctctgcatacgactcagcccaggcccaggcgaacaagaagaagaaaaagagaaaaaaccgtggcaacccttcagaacaaaacagagcaacgttcaatccattggaactgtacgacccggcaaaacccaatgacattgaggagtacaccagatggaaggccgaggagaagaagagaaaggagcgaatccgaagggagaaaaaggagtatgcgagaaagattgagagtgaaagcgagagttcttactacactgaagatgaggaagaagaagagctggaaagagcaagaactggccgctatatcggtttgtcgggtttctactatttcattcaccatggaggcctctgatctgatctccatttctcaatggattgttacaggccaaccacctccagcgtcttatagcactacaaccccctcatctaacgctttcccagtctttcaaccctctacctctcattctaatcccttacagtccgatttagatccttcagccccttcatttactcctgctagtatcgctgctactggtacactaccgccacctcctagcttggtcgtgccacctcaagcgagtctttcaggggaagaagcttatctccgtcgagctgccttatcctcccttcaacagccgactgtatcatcagatgctcctagagaggcagtatctataccatctttctcgtcgtcgtcgtcttcttcgtcggttcctaccggcgcagctccaagtgggattgatagtgaagaattccaacgaaaagtcgaagaaaggaagagagcagcggctgcaatgtaagaactatcagttttttgacatctttttgtatcaaaccttcgtttacaatgaagtactctatgtcattcatagtgctgctcggtttgctaagccggctagcggagttgctctagctggaaacacggaaggaaatctatcgactcccccgcctccaaaagttgagagggatcccaatgacaacagagactttgctacccgaatgatggtttgtctgttctcactgatgtgtaggtgttaaaaaacctggattgtgtttaaaatcctcctctcttcgctcaataggataaatggggacataaaactggagaaggtctgggagtcgagttcgtagcctcttctttgtcttctatttgttggcaggccatgcttgtctccatctattgtaaaacagactgaactcatcccaccgtccttttctctgtttttagcgcatccggtataacaaatccccttcagatcgctcaaacgtcaaagcctaaagcgaaactatcgtcctcgtctgatgcaccttttcaaccccgagcaatgggtaaagtgatctcagaaacgacttcaagaaagaacgcagaagatttagcaaggtttggagagtccagtcggatcgtgcttttgatgcatatggtggggtctgtagaggaggtggatgacgagctaagccaggatattgcagaggaatgtggaaaattgtacgtctttctctatctgttttcattataacatggggttcttcgtcctacaaagactgtttccttatcggaaaatctctttctgaatttgattcgttgattcagcggagtggtcgaacgagtggtcatccacgaggtccatccaaccccctcccggcctgaagattccgtccgagtacgtttctccgtctcttaccttgcgtggcggatatcacatttcctctgtcacaaaagtaaactgacttctctgtgggtttccttcaaataaacccttctctcacataggtattcgtggtgttctctggtccagcaggtgcatggacggccatccgtgcattggacgacagattttttggcgggaggtctatcaaagctaggtatttctccgagaataagttcgatagaggagatcgagacaactagtcctaccctccttcctacgcttgctcgcttgtttgcctactcattttctctttatctttgaatacgatatatccaatgcgtctctccatgtctagttcttttcttgctgtcgcctgcgacaaattttataaacaagtgaagctctatacggtttgtcaagtcatctatagatttgtttcttcttgactagaccgaacaggcatcttgttcgcccacctttctttccaccg

SEQ ID NO: 2770 - DNA, 15963 bp, Xanthophyllomyces dendrorhous
agaaaaaaagaaaaaaaagaaggaaaaaatgagacgatatgcaaagttatgaaagaacagaacagagacatatatgataccaaatctcaaagaaacagaaaagagaaaagaaagaatccccaaaaacacaaacctccctttccccatcttctcaggggaaaagaagggagagatttttattttctaccgtctgagactacttcgaacgaacgaagatgcaggactaggggtagcataggccgatccataagcttctcggaagtagagtatcgaaaacaagaggaaaaggaaggcgccgatcaatgtaactgtatcagatgaagaagttgaggtcaaaattagcaagactaggagaccgaaaagacaaaaagaagagaaggaagaacaaaactggtagaacagaactcactgtacttgacagaaatctttgtagataaccaacgaccaccaatgacagctccggccgtacataagccgtgaccaaggatggtaccgaaggcgataacatagaggttctgattatgaccaattgacacgaatcgtttcagtaagggtagaagcaaaggaaacaataggacaaggaattagactaagagaagcgcacatgagcggccgccaaggctatggtggcgatctgacttcgatctccccattcgcccaggaacgtcaacacaaatgcttgcgcaaataccggactggccatcacgcccaacatttgtttcgccttttcggcatagcctgcgatgcctccttccatactgccggatcttgatgcggatgctgaaccagaccgggggaacgatcgaccttcctccatatcgttgagtggtattgagctggccgggctggaagagagctcttcttcgacctctcggatctcctcagccattttatcggaggaatcggtagcagacatggtcaccccctcgtgagccatccgaactccaaacaccaggaagagcacggcggcctagagataaaccaatcaaagtcaaaggtcagttctctgttttgatgatagttgacaccacatagatgctgatttccaagacgaaaagaccgttcacgtccgctcgacttgtacccccaaccgaaagcaaagccgggacaatacggagaaaccaaaacatatggaacagacttacagcaaattgggtccactctttcggaacgagaccaatgactctacccatggctgcactgaggatgctcatgatgaccagactagcgaacgctcctgcaaacacggtcatccggggttggcgcgaggccaagatagctgcaatcaggaacgtcttgtctccgatctctgagacgacctgttgggatgaggagaacgttgagtatcattttttaggcctatcacaggcagacagaagcatgtaagggaactcacgatcatgatgaacgcttgccacaaggcatctagaaggggagaagagttaagagaggatcaagatagcgcgtacagtttatcaggcttcggcttggcagcgtctaatcgtgtttgatagctgaggaggatctatgttctgcatagatgtacgcactaaagttggtgacttcctcttgagaatccatcttgaattagattgtttgtccttagatctccgataaaaagaagagaatagagaatggaaaacacgaaggaaaggaaaatgaccaagaaatgaacgaatgaacaggatggggtaagagacagtttgaggtcttgactggagagatggccgagagaaagcaggtacgtaaccaaaagggcacatggttacaaaattggtcagtttgccgcgccgccggcaaactttccttgacaagggttgccggttccgtggacttagtcgtgagagagcttgggcgaacgaggaacggcaattaggtaagcgcgttcacatcgtaaccatacgctggtaacgatccgtacgcataaccacgccgtcttttccgcccgctttttcatcctcgtccctctcgtttttctcatcaacctttctctcgtctctctcttgtcctcctcttttctgtccatcctttagatcaccatggcttcccgaatgctcagcaggtctctcaaggctccttccagggtcagtgtcctatgagtttcatttgtgaatacgcttggcgttttctttttctctttctttgggaggagaaaagaagagaaaagacagcgaattgcgtcggatctggttggcgagaacccgatcagatcggtttttcaatcataccacacgtcggaaaaaaaccccgtactgattcttcttattcttctaccaacgatcctactctccgtcgatatgaacgcgtctttaatttttcggttgaatctatcgatgaattagctcggtcgagggctcgctaccgccgcccccaagcagccgctaaccaagatctccacccttcccaacggtcttgtcgtcgcttccgttcgtcttttttctcttgtgtcttattctttctcctatgtctttttcgacactcttcgtttcctcgtgctcactcatgagtccttcgactttgttgtctggggtttcaaaacctataggagcaccagccccatgcccagactgccaccatcggagtttacttcgacgttggatctcgacacgatcagaaggctggtgtcgctcacttcgccgagcaccttgtaagtttcttccctcctttcatcctctctatcttctgcttaatttttgagactcacacgttctctccttcgtgactggtaaacgaacagtacttcaagggtttgtgtctttctcgattccttttcgtcactatttcattcttggaaaaaaaaactgaccaatgacgtccgccacaactctctccttcgtctacaactgtttttctcacatgcattcaatcaacatctcctgttcctatacaacaacactaccctgctctctatctttcatggatctccttcatttgtggttaaacttcaatccggtcccgtctacttgaactcgtatatccatcgtcaacaggtacccctacccgatccatcaagcagctcgaggccgaggttgagaacatcggaggtcgacttgatgcctacaccgcccgagagatcacttcgtacactggtcgatcccttgctgacggtgtccccaagatgactgagatcattggtgacatgctttccaaccccactttcgacaaggctgctatcgatgctgagaggtcgactatcttgagggaggctgaggaggtcgccaaggacaagcaggaggccatcttcgaccacttgcacgccgtcgccttccagggtacgtttatcaggtcttcataagatgttccgacattctaaaaaggcttgatgagagctccggtccttgaaaaagttgagccagaagtaactaaaatatctcttactaactccataccttatctcgtctttacatttcatccttcgtcgtctatgttcgacggacaggtcaacccctcggatacgatatcctcggccccacccagaacatccagtccattaccaaggatgatttgcttacctaccgggctgccaacttgcactctgacaagatggtctttgctggagccggagccgtgaaccacgaccagctcatcgagctcgcccagaagcacctttctggattcccttcttcctccaacccctttggttccaagcgagccgagaagcccaggttcgttggatctgaggtcaggctgagagatgacacctgggatgattgccacatcgccatcgctgtcgagggtgtcagcaacaacagccccgactactgggtcatggtatgtacatcttacctactctagtagagaggaatataatatccaggatggtgcaggtcaagacgctgatagatgtgttgtctctgcttcctcctcccttcaatttagaacgttatctcttccatcatgggtaactgggaccgatccctcggcgccgctcccttgctttcctctaaactcactcacattctttcctccggaggatacgccaactctttccgacacttcaacctttcttacgctgataccggcctttggggtgtccacctcgtcaccgagaacgtatgtctccttctgatgctgcgtactagtcgtgatttcaagcctgtccctcactgacgccgttctttgaccacctatcttgattttcaaacaggtcactaacatcgacgagaccgttcactggaccttgaaggagtggcagcgaatgtccatggcccctacgattgctgaggtcgagcgagccaagtcccagctcaaagccgccactttgctcactctgtccgatgatggaactaagtcgatcgtcgaagacatcgcccgaaacatcttcacttacggaaccaggttgacccccaagcagatcgaggaggctattgatcgagtgaccgtcgatgatgttatgcgagttgcgaaggagaagatctgggaccaggatgtcgctatggccgctatgggacgagttgagggtctctttgattacgctcgaatccgaaacgacatgtcgtctatgatctactaaaacacagcgatcgtcacttaaagatccctctttcttacctttctttctctctttccccatcattttgttctttaatcctgcgttttctttctctccgtcatccattttctttttttttcttcgtccttgccggagggaacgggaggaggaagtgcgaaccttttttgttatggaaagattccatgattaaaaaggtgactgaagtctgcagtgataccacgttgaggttcaaagtttcgttcgtctcccctaccatcattgacgataaaaccacgtatatatatgccagacaatgagggattcacactgctctcactatatgtctataccagagggacagacctacggacaagttatgccgaatgaacgagcgagtcgatctacctagctattcagataaatccggtgcactttagagagagtggaggcacatttgattacagcgtcattcactttcatccatcaatctcccatcaatctcccatcaatctcccatcatctccatcatctccatcatctccatcacctatccctcatcctttcccacttccacatcaaaagccacaatagatccagtcatgtctctagaggtttgccctcacagtctttcgactgacctttctcctccaagattgttagtatcgagttttctccattatgatcgccccgattagttggcttcataggtttggatcttttccgcacacttgggctcattattctcttcgctcccttttggtccggatgactaaactactgggcatttctcttttatggatctttcaatcattgactgttctggggaaccttcttgtcaagataggagtaacgccgtccatagagaagaatgcaccctctgtttcgatgatcaggtttgtccatcccgctatatgaaaatcgttccttgaatcacacgtcgttctctactcttactctcatattggtacaactctatgtcactgtttgccacaggatcaaccggaaggtgtcgatgtttgtctaacctgcttcaacggaggttgtccatcggaagaaaggcatcacgcgagaacccattgggaaaagagccagcacccgatggtcgttaacgtcagaagaacaaagaaacctcaaccagacagggtaagaaatgtagtccttttcctcaattctttagaaatataaggacacagatagaaggtgacagtggtcctggtaggtgaggatgaggtcttgggtgtttcacgaagaaattagaaagctgactattctaccgttcctcatggtggatatcctcctacacgatggaccgaacagaatgatgaggagccaccgttgaaaaaattagctatcctcgaggcgaaagaggaagaccagtacgactaccatctgagcgtcagatgctatgcttgtggagggatcgaggtcgaacaaacacccgaaatcaagaatgtggtggaaggaatcatggcttccaattcatccgccaagcagtccgagatcaaagcctgggaagaagatataacgccttgtgagcacacgctgactcttcagcaggtcgaagcttatgaggtccggtccaccggtcagtccagctctttgcctgtaattccgcgcctcttttgggtctttgctgaggcaagctcattggttattttgcattcatcaggcgccacatgctccaagtgtgagcttggcgagaatctatggctctgcttgacctgtggggctttgggttgtggaagagcgcaatatggaggaaacggtggaaacggacatggactcgctcatttcaccgagacaaatcaccctttggcggtcaagttaggaaccatcactcctgaggggactgctggttagtatgattgatcaattcttcctggtgaggcgcgttcttgagactcatcggctttgtgatctgctttatttttctttgtccgcttgttgatcggcacgacaaacgcatttcatagatatctattgctactcgtgtaacgacgcaaagcttgatccagaattaagcgctcatctagccaattttaagatcaacgtcatgagccagatgaaaacagagaagagtatgactgaattggtaagtgcgcgccgccaagagattatcattgcaaccgcgtcgatcaagtgctgtcacatctcgtcaggcttctactgattgagcctctgtttcaatttgacatgatcagcaactggaacacaatctcaagtttgagttcaacatgaaaaatgatgatggcacggaactcgcgccggtgtttgggccgggcttgacaggtctcaagaatcttggaaacaggttggtgttctctgcatagaaatctgtctggtggttctctatgatggcgaacttcttaattttttttaacactcaatcttctttcacttattccatagttgttacctcgcctcaactcttcaatgtctctttcaactcccatccttccaatacgcctacgactcggccaacaagtcccatgcttctacatgtcccagacctgcggacgcatgtgtagaatgtcagatgaggaaaatcgcagacggactgttatcaggacggtactcccacgcggctgaccaagaagatcgattccagaagggtatcaagccgactatgctaaaagatcttattgggaagggacacgaggaatttgcttcgatgaggcaacaaggtacgtagtaatcaacatcgagcatgttgaatttatggcaagtcgcaatgtatgatctcatcttatatctccttcccctcggtgtggcagatgcggaggaattcctacagcatttgatcaagactcttcgagctgatgctcttaagactaaaaacatctctcctggatctggccatgaagcagcggacgtctttcgattcggactcgaacaacgcctgcagtgtactgagtgcggcggtgttcgatacaggacggacgaacaagacagtttgagcgtaccagtggagattactcctttaggcacggactcagacggaaaaactacttacaaaaaaatttctgtggaggatagcctaggcgcgctgatggcaccggaacgtttggagtatgcgtgtccggcttgcaaaaagacagtacaggcgctcaagtaggtgattttgtgtatcaaaatatcagatagtcgattttgaccttatcaatttcctttcgttttttcatcgtagacagagtcggttcaccacattccctgatgttatggtgatccatgtcaaaaagttccagctcatcaactgggtgcctcagaagataggttcgctagtccatgtatctctcttgaagcatacagagagaattatcaggtcggaattgctactgacccgcattattctttctgtatggcagatgttcctttcattgtgggctccactctgtctctggatccttggactggaactggtctgaaagctggtgaggttgctttgccagaagattcggatgctggtatgtgcgacgtgacacctatatgagccatttcacttccctcctatgaagacaaaccttgactcgcgttctatgatcgatatggtgaacttttgaagctccattgcaaccagagttcaatgagcccgctttggatatgctccaagggatgggattccctcttgttcgttgtcagaaggctctattggcaaccggaaactcggacgcagaagccgctatgaactggctgttcgctcacatggaagatcctggtatgtctcatcttctgtagctgtctcatgggggtcattatctgagtcctaacgttccaacctggttgcgtgagaagatatcgatgcacctctcgatctatcctctgggcccaaatcatctgcagtcaaaggtccatcagcagagcaaatttcaatgttagctgacatgggtttcagtcctgcacaagctcgaaaagcacttcgagaagcggtaagcgagcgctatacatagcttcaggctcgatttctctaatttaaggagacgtaactaactctgctcccttgattgcgataatccccctttagaatggaaatgcggagcaggccattgagtggctgttctcgaacccgggagatcccggagaggaagaatcgatagcgacttccgagtctgccacagaaggaatcccatctggaaacataaactatggaggatcgtcagaactaccagccacttacaagcttaaggcgtttatctctcataagggaccctctgttcattcagggtaagtgttctgttgtttatcggttgtatcagcaaaaagtagttagagttaacaattccgtgttttgttcggccgtgtcattgcgctctggctttggcgcgatagacattatgtggctacagtagaagacaccgaatctggagcggttctgttcaatgatgagaaggttgttcgaagtgagggcacggctcattctgggctacgagagctagcatacctgtatatatttacaaaggtttgatcggataccttttccttgtatgaacatgatgaatgtccgagagaccagacgagaatagagagagcaatgtacagatggcacacaaggagaccttgagtcgggcttatttagccaaaaggtgaataaccagagataataggcgtgttaattctcaacttcttgacccaacagagttccttctaccctcttcaatcgccatcattcatcccgtctgtctcgtcctggttcttgactgaaagacatccacagtatgcaaaatcagcaggtctgtcgatttttcctccaaggaaaatgccatttcggcaacagctgtaaaaatcttcatccatcaggcggcaacgccgctcagtcttccttcggcagtcagttccttctctcttgatctatgcttacctttgtctgctctctcttttggatcattctcccgggcatactctgaaagaccgttgcatgatccctttcttctgtgatgactcacaggctctggctggaacagtgctccatccaatgggaggtttgggacgtcctcaaataatgcagtccctggaaagtttactccgtcttcgaagagagatccattgaaatacacgtttgtctcgatcatctctcgataatgttctttctcaatttgaggacagtaggctaaaggctgtgctagcttgttgctgacgaggcttcactctatgattgggcttattctccgcatcaaaatggatgcttgaacaggacggaaaacctgatgactgatttagtgcaagagcaaccgatctggaagctatcgtcctacggaccgacggcttatccaaacttgatcgccaaccaagatctaagcttcgaagagcttcggttcaaatttctcgagtccggtggaaaccaacaggcatatgttggtcttgtctcttcattcctatgggatctttgttgtctctaatgctcaaccataccttattaccgtctttctctcttctatccctacgatattcttgttttatcggtttataggctcaacaagaagctcaattgataaacagtgccgaaaatcaattgcagcaagctcgatcgaactcacaaagtgcggttcaacacatgaatactctggcttcgtcttcccagcctgctcctgcgacaagcgcattcggtgtatccaccggtgcgaacagtgcttttgggagtgcgctcaacaaacccagcgccttcggatcttcaacagcaattgggtcatttggaggtggaggtaacccaggaccatttggatcgtctgccagtggaggaggagctttcggatccggctcatcaagcgcattcgggaaaagttcgttcggtcaattctcagcacctgcttttggcagttcggcaaatacatcctcctcatcaccatttggcggaaccccagcaaattcgacgtcagcttttggatcggccgtcaaaccttctccatttggtgcgcctacttctagcccatctcctttcggagcaaccgtaggatctcccagctcagcattcggcgctccatccgctttcggagcagccaaaccgtctccgtttggtggatcaacgagccaaccttccgcttttggctcctccgctgctccatccgcttttggtgccccagcctctacatctgcctttggatcttcgggagcaacgtcaggaacagctgcttctccttctgcatttggttcggcgtcgaccaccaggcctgccggctcagctttcggtgctcctagcgctttcggagcttcctccggcggctttggagcgtttggttcaaacccacccggtggagcgacgtcaacagccggaccatccaccggatttggcgcgtttagtagtagtaacccatccggatcatcgacgacaacgtcagcttttggatcgacaaccgccgggtctgctttcggtcaaccatccgcttttgggtcgacggctaatctgggatctgcgttcggtcagccggctgcatttggaaagccatccgcttttggagctactgcaagtaacatcggtattgcgtctggtgggtctgctttcgcgcagccttctgtcggaggagcatttgggcaaccgtctgctttcggtcagacggctgctcaaccgccatcaacatcaacatcaataccaacaacggcatctgcatttggccaagcttcagccttcggtcaatcaagttcaagctcggcgttcggtaatccttcaagtccggcggtcgttcctgccgctccgacgagtgctttcggtcaatcaagctcgagcaccgtaggatcagcgtctggccaaccatcatccaccggtttctctgctttcggctcggccttacctgccaactcttcggaactttccgcgacaacggcggctccgacttcttcggcttttggtcaaccctccgcttttggaacaatgtctcaaccatctgcggcctttccgaatactgcctcttcaggagctttcggctcatcacccggacttggagccggagctggaactgggtttggatctggatctggatctggacgatcgacaacgatttcaagagaagatgatccatttgggtcatcgattagccctctggaaggtctccctgaagcatggcgtcttgccttcgaagcagatgaattcgagtttggtcaaattccagcggttccacctccgctgagtgttagataattgctttgataagaggaattacattagtcggtcgagggtttcggtgtatattttgactgtatatttgcatgaaacgttatttttttctctttgaagcagctaaacaagtttgtagcctctagatggggaacaatggacagaaaggcgaatgtgaaatccaagagttgatttgagacatcctgctagcgttaaccgagagatcgactttttttttgaatgttgaacagacaaaacatacgtaatacagcgaatgaagtatgcgcgagaagggacggaacagaagaaacaaggacaaggctacgctcaatacaagggaaatatagagaaagagggaagaagagcccaagaagagaaagaagcagtggcaaattctatcgttccgagaggaaagaacaagccagggtattactgtttttcaaagtcgctctgatgatctactcttgctcgtggaagacagtgaccggtacccaagaatcaccgcagaccttgaatctatcagggagggaggacaatttgtcgacatcctcctgctcaaggaccaagccgtcaatgtcaaagtttccctcaattcgactgggagtaacactcttagggatgaccgagaatcccttctgaagaccccaagcgaggaggaccttctgggtcgaagtcttgtatttatcggcaatggaagcaagagtcttatccttggctaaaggagagtcggtcgatccgaggcaggagtaggcggtgttgtgaatgcccttctcgttacagaaagcgacgagcttcggggtagggttgttagggtgaagctcaatttgattgacggcctaccaagggaggaagtattgagaaaattgagtaaaaagactcaaagatacatttgcaatcgcaggtaggaaagatgaaaggaagatactaacaggggtaaccttgacagtagggaggagcttgttgagactggtgatgtcaaagttggagataccaatgtttcgaactcgcttgtctccggcgttgtaaatctcttccatcaccttccaggtatcaacaaagttccagtcgtcgtaaaccttattgggcacatcagcgggatcggaagacacaggccaatctttgagaagaaagacgagataggatgaagatcagtcgaaatacacaacacctcagttggagaaggacttacgcataagccagagatcaatatagtctgtgtcaagcttcttcaaagagtcggcaagggcatcgtgcgctcgcttgtgatgagggttgtcaagcttggtggtgatccaaatctcctctcgggggactccagagtccttaatgccttgtcctacctcggcctcgttgcctaaaatcaagaaacccaaagaaacggccatatagatacgataaatccttaggaaggagtggaagagggaaatgtgtatatgcgctactgaacgaaccataagcggcagcggtatcaatgtgtctatagccagccttaagggcggcggcaacagcctttcggacttcgttgggtccagactgccacgtaccgctagaagagaacgagattggagaagatcagccagacgatcgctcgcttcgtgagtagaagggaagagacacgcacagtccgaaagcaggaattttatcaccagtgttgagggtgaaggtctttctgcaagagcgaggggagtgtgaaatgatgatatcagctcgatagaacccgatccaatgtccttatgcatcgtattctaggaagctgatctgtctggtgagaagctaacgacttacttggtccagtttccgtcagacatctttgtcgagaagtttctagtgatcgttcgggtggcggtgggggagatgattcgatgaagaatggtgggcaagaagactggtattggatggggaaggagaagaagcaaaattgaaaaacgagatggattctaggaacaggtttatataatccgaggcccgtgcggtggagtgggagatggatcgtgcggagaaagtgtccatcggacgaaccgggtcaaaatgggcagcaaaaggtaaaaaggctgatgacgctttgagctaccggctaagtccttggggcctcgagtcagcctgacaagcatctcggtgaatccgtttccccgccttcttgcctctttgggagctttctccgtcattatatccggcttatgtaagaggttttgtctgtccgcggttgcccttgatatccatcgtgtctgtattcgctcggcatgcttgtccagcttagtgatattaacgatgttcacacatgatcatacgtatttcacatcgcaacttgatgtataattcccgcaaggtgaggaaaacagtatgaattcattgaaattcacagcaaacacaactagaccgacatttaatcaacctcatggaatatcaaatgcgagacgaggcaggctttacttccagatatcggcctagttcagtgtgagaaaggcaaatcagtgaagagaaaatactccacaaggtaaaagtgaaaaactcgaaaccaggacatacgaagaaatcgtccttaggagccgtagctgaaggcttagccgaagatgaagcccagatgtcttgagtggagctagccggtacaggagtagcgtcccagatctggttcaaaaaaagtgtcgagatttggtcgttagtgggtatttactaaatatgctgcttccgcggtttttttcgaaagaggattcgacaaacttacgctcgaagacgccgcgccagtacccattccatgactttggaactctccccaatttgatccgccgttcgattgccgaggctgctgctgttgttgaggaggaggaaccggtcgggatactggttgcccccacacatcctgccctccccctccaagactcagtcctccaaagctgctcgggagaccacctgtcccagtcgtcgccgtcgtttgttgaggctgctgccaaccatttccagtccctcctcctgtatatgtggacagaggcgcggatgtggtagatgatgatgaagccgagaacagagacatgatgccttcaatcccactcttcttttgttcacttggtttgttcgccgcgccaccaaaagaagacgaagtattcgtcggtgtaggcgcgtgaaagtcgagatcaaacagagaagccgaaacgatgggtgcagctgactgaggtacagagccaagagcagaggcagaagtaggagcagaggcggatgtaggggcaggtacaagtgcaggtacagttgtaggtgcaagtgctgaaggtggagcagtagcagctgaagataacactggcacctgtctagagaggagagggtgggctatattggaccggaccgatgtcggaggagctctgacttgaggttgagtctctgccagaggtgcaggtgtagcggccaaatctggagcgtgttcggtctggagcaaaatctgaggatccgaaggaacagggccagagattgcccatcgcctcgattcatactttgatctgatgaatgactcaattttactgttgtcatcatccaacgacacgtctgtatcagtccagggtatttttataatcctaaagcacacgatcaaaaggattgcaaagaacaagaactacatactgctcaggaggaatatgtcctggtttgagatgggcttcccagtaaagattcgcaagcttgttaccccatctttgaatattcttcaaatcaaatgcaacaaccaacacccacatagaatggaaacgacaatgagcccaagtcaagacaaagtatttctttgcgacacacatagcgtgctccctgtgtattataacaaacatactcacgtccatttgctccggtgtccagatgtctagatctacagacttgactgagagccccaagttttgtaagtgaagaagacgatgagttcacacaataataagcaggcttggtagagtgaagacagcaaacagagagacggcaacagctccggaagacagacctttggagatatgggtgcccatgcttcgatgaattcctgaacatcggatgcacatgaagcagcctaagttccaagatgcccaacgagcatctgatttgatcccaaaacaacagccattcgacgagagacctcgcctccagatgagctcttcaaatggaaaaacacaagacgaagggtccagataaacaccagaagtaaaagatggcctctgaacggaccatttctcctgcagtcagcacactgcttgttgtccggatgcttaacaagttcccggagaacttttgcgtttcggtctgtcgtagctttatcctgacgagacatgtgagtgaacacgaagagaaacagaaaagaatgtttggaggatagatggacgattgtttgtgcttattcctctcagag

SEQ ID NO: 2771 - DNA, 12714 bp, Xanthophyllomyces dendrorhous
caagagcaaaagaccgcatgtcctccgtgaaggggtgtgggtggagtatcagcatctcgctttatgtggtgtagctagtgtaaactagcaagaccagttatatctctatagaaatgaatcctgcagagtctgtagagaggaagatgcgcgtcaaagcgagataaggttagctatcggagggagagtgcgaaaaccatagagggaggaaagtgaactaacgtggtcaatgaataaaaaccaagtctctgagcggcaatttgacgaaatttatacgctggaggaagcggaactcaagcgtcacgcacgtgacatgtttaaactccgagctctttataaacaccctcactaccgtcactctctctttttccaaccaagacacctccctttagagtcgcttggcctctatccttttcgcggagaaacaggtgctcgggaagtgtcagaccaatctagctttgggcctgacttgttcaggtcgccgtcctgggttcatactcttgcttgtgccacggacgattttttcgtcctcacactgggccagatgatatcttgtcgagacggaatattcttttctttttgcttcatctcttcttcattctcgactttcttctatcgctcttgatatatagaccttgtaaagctttgaacgctttaggatgcatttatgtctggattgtatgcaggattaatatgaaaataatttaaagtcacgtgacactcgcatcagtttctgcaatcacttcccgcgatcatcatctacatcatcagctagcactcaacatcaccatctgcaacacactgaaccggatgcacagaccattcaacattctctacctcggatccgatgtgttctctgtaggatgtctctctgctctcctgaaaaacaaacgtcagttgtcaaaaatgtcctcaacatcatgaacagtcattccaaaggctcactcttttctcatgaggatccctcctcacacaaacatgtacacgcccgtagacgtttggaataggatagatgtcgtcacccctccgatacaagcatacggaaaaagaaagcagaatctttatgaacgtgaatctatcctatactctcttgaagagaaaagacacatcgcctcgagactgacagatgtaccctttacggacaacgcctggggacagcacctctcatgaagtttgcaatgtcaaactctatagaggtaacgaccgttccagaagagggcatcagatcctggcttgtcagtcggttctcactttcttcgtttgcgtgcacctacttggctaaacaagactgcttcttctgaactgtttttgtaactatgatcatttactcatttccgcgtatgccttgtccgacagtagcttcctcaacactaccagacaccttcgccgacgaatattcttctgaccgcctcgttcggtcacattctaccttcatctcatctccaaatgtttgagtcaaatcgagccctcaacgtacacccatcgttgttaccgaaatatcgaggggcgtccccgattcagtacgcgctgatgaaccaggatgagatcactggggtctcaatccagaatctgagtgacagaggagcagacacaggagcactctacaaacaacaagaattcgtgcgtcattccgtttccttcaatcaggattgcgaaccagactgatgcagatcccgtccgtcacatcgtatgcgcgttgggtacaacctggggttcgtcaggctatcccaccaaactcaacattcgaaacgcttctatctccattggcgactttaggaggcgaactcttggttcagactctcgaaggactactagcaggaacggtaagtctgcgtgacttcctgttcccactatacttgtactaggcatacgtgttgaacaccacctctcgtcttttcttcaaagctggaatcgataccgcaaacagaagtcgggaagtcaagggctcggaagatctctcatgagctcggcgcgctcaattggaacaagctgaacgcgtccatggtttatgcccgataccgagcaatatctcatcaggtttgcctcttctatctattcatctgattgattaggatcattctcgagtgaacgagtttccctgaagagctctcttttccttacatttgaatctcgcagcaaagtcttcatacctttctccctcccgctcctcttaccccatcctcacattcctccgatgtcattctcacaggtctattcgatatatcgcttcctccggcccctgttcccttcccgacgaagtcaagtcaacaaccttcttccaaaactgaccttctcccaggccagacattctacagcaaagcacagaacgcactagtcgtacagacggtatccggtcaggtcctcgttggttccgttcacgtcgctaagagatcaaacagggtagatgccagacaggcttggttgggttggaaggatcaaggacgaatcaccgatggtttcgttcagtttgtaagcccacctggttcggaatgaaagaaaactcaagacaagaaaaaaacccatggtcaagtattgtcgaggagggtattcatgaatcacatatgtatacatgttctaacaggagaacaatcttatttccaaagtacacatccacccttgtgcaatgccttcgagactgctttgttatcctttctattgggcacaatcgctaacgccgttggataattctcgggctgttccatccactgaaagaaagaccaaacaagtaaaggggacgacaattgtgatcagcttgctctgataagcgcgagtacaagagtagtcggagatcaacattttacgagtgaagacgaacaagaaagtatttggacccggttgtctccaagtggtcgattgttttttgaagagtgttcatgtctgtcgtcttttgagttgggaacaaaaagagagagtgagcgcagaacggggcgcagataactctggatacacatccttcctgaacttacctggtatacgagctgatcaatcgattatagatcgagacaacaacggtcaacggtcaatcctacagaggctgcgaagaacaaagaaggaagaggcaaaaccaactttacgcatatttggcagatcctcaagataagtctgcacattcggttcatccttgaattgatgaaggaccgccgtagaagcgtgagaggcttgagccatgagtggaccaacaggccagcccaggttctttactggtcgtgtccatttgaaagggaaaacaagatgaagaaagaaacaacaccgagcgataaattgatccaacaagagtgaagaggagagcatgagaaacaagatcgttcgaggacgaatgaaagagtcgatggaagactggaatttttacctcgaagagatctcgacggagaataatctgcatcctcagcggtccagccggatgggattcagtgggcacaacaacagcggcagttgtggtgtcgactggaatagaagagctcatcatgcggcgtaagaatcgctgtgagaaaccctgtgtggtcgattgcatcgaagacgttgatggatagaatttccgtagcgacagaatctccttcaacgataaccgaccaaaaggccttttctatcctgaccatcatcacttcaaacgttcatatccacatcctctctcgctctgctttgtagatcaaagaaagctagtcagttagacgagctctcgccatgcggatctctttactcaaccggccgttattcaactcgttctttggcatcatggacatcaaacaaggtctgctcgcgattgttttctctcttcgcttctttacggatagagatttgatgccaaccattcatgatgtgatgcaaatctatcgcgtttcttctcttgggtcataggtgctctcttgatcgtcgctttcggggtacgtcctatccttgtctcttccgtcatcatcagcttgctcgtccaaagtcccaacgtcgcgtccttatcggctaacgtctcaatcctctgctctttcttgtaatcgcatcgaccatccttcactttttaaaacgtcctgtttcaagctgcttaacaagatagcaggtgtctatggactcttcggagcactcttctctggcggtaccattggacaacttagtttctatctctattcgaccgtgacgcttgcggggttcgtttggggtttgaaggccatctccgaggtatgtctccttcagctctttcttcctttttatcaatccttcttcgttgtggcgaggataaaggaaggttggcggacaatctggctgctcgcggatggttgtgaagacgtctataatgtacatcgtgacgtcaatctctctcagccacgaacggatgttagatgaatgatgttttttgttcttctacttaccgactatgatcctaactcttcctgtatattcttctgttctttctgttctacgcccgcacaggaacaaacgacgaatgtgttcaagttttcgcatctgtatattctcgatcatctcgtcaccaccttttatactttcctcttctccatcgtctggtggttgtatataccccatgacggtcgtcgagtctccaactcacccgcccaggcggcgatgatcgcgctcgctaagtcaagaggcgagctgctgggagaagacctatcagacgaggagcgagtcagaatcgcggagtcattgtgggatcacgaaaagatctttgctgtgtttgtcttaattgcgtgctgggcgctgaaagtaagctggatttcatcactatcgtctccttccttccttccttccttccttccttctcttgaaagcatagaacgtatttgttgataccattcttaccactttgtccggttcgtagatttactttgctcttgcactgtactcctttgcctcgcatcttaaacacaactcctatcggggtcttcctatgacgaatacctcttcgaccaacatgtcttcgattggttctaattctgcaattcccatgatgacgacgacgacgtcgtcacccaaccacatcaggtcaggatcgaacggaagagaagaagatgaggaggaaggaaaggatgtctttaaatgggatagcgaggatgaggaaggcgagtcttccaataaaccaaagacaagcagacgggcggatgaacgcgtgtgagaatgtaaactggtgtgagaaggcaggcatgctttcagttataaaattgatatcgttgtcatcaacatatcctttctacaaaagaaataagaaaggcaagaaaatccatcggcggaaaagatgggcgggcgttacacgatacatatacaaaaaaatggggtacaaaaagtggagctgataaagaacagcggatgaaggaacagcatagagagagacgagtaacaattcgtctccgctattcaccttcatagcaaatcacacttccttcggacattccatcctcttcttggagtgttggttgatcagatctagatatcgaatccaggatcatctgcccaggtatcttcctatcatcattatcttcatcgtcatcgtcatcgtcatcgtcgtcaccactgtcagatggggcgtcggaatcacccagctcagctccatcaaacagccagtaatggctattttcgaaatttaacccggggttgaaggaaggccaaagaaaaataaacatatgaatgattgaacaaatagataaacattgcaatcgagaggagacgacgaagagggataatagaatacatacgtgtttccgactcttgtaggttccctactaggttcagccgatgcgttctgggctcggcctaattcaggtattggtatgttccattcaagtttctcagagagaagacgcacgatcccatctgcatctccaagaagattaatatccgggtcgaaatatttgagaggggtcttgttgataaggatttgcggaactgagtgaggcagatgggccaacacttccgacacgggcgccacttgtaggctacttccaataacgagtagtagatctacagattctcgatctgcaaacagacagcggtcaaaccgatcgtccaatggctctccaaagaaggtgatgtccggcttgatcacagccggaggaaggttgctcctccatttcaaatcttcctcttctccctcttcatctgaatcttcccccgcccaacctccacgtctctgtttccctcttcgtttcttccgttctttaacccgctgtttcacttcgcgctcttctgactgaatgcaaggagtacatcttgggattgtccggcgcatgatatccgactcaatggccgagcctggcatctgacggcggcatcgaagacaagatgccgttgcaaaggaacctaagttgaaagccaggtatgatcaacgcacttgagaagatgaagtataggaaccaagggaaaggaaagagctcaccatgacattgcaagacgttcttaattcccacttgactttctagagctatggaaatagttccaaacatgtgttatagtagatttctcaagctgcaacaagaagaaagttcgaaacaagcgcttactgtcaatgttcctacaaaggtatatggagagtacaattagcgaagaaacaatacacaagcctaaaagaactcgagttgaatttactgagtatagtttcttaataatttccctttgtcctccaggagtttgatccaccgatgacatggagatggctgcagatacgaaagtggttaactcatatttgtaaacgtttgaaaagtccaatcgtaataagatctgcatcttacagtaaagttggaagctaattgatccaaatcaatcgtcaaagaccagtcgaatgaataaaggaatggcttgatgaatagtaaacgaagtgggatgactcacgatatatttgactgattgcaagaaggacatatcatgttcggaagataagcgaggcagtcgttcatcaagagaaagacataactcactgagcgaatgaactggaacagaaagatgtcccgaattcagtcagctgataatcacaaaataagaacctcgcttatattcatagatcccttcacttactagaatactgcaggagtttctttgaaatatgagagttcaaacctgagccggtgccgcgacactacggttaacctcaagttactcttgcagccagtctatgaaatatagaaacacatgagagacttacatttgttggggatcatctaaatcatactctccttcatccttaagcttcgcatacaatcctgttgtacttctaaaatctacccaaaaccaacacgcaagagtttctttgatttcagtatctggattggtgcatccaatcaacgagatgatggaagaaataatcgacataccaggaataccacaactaacactaattccagctccggtgagcaccaatattctcttacttcgacgtatgagctcgatcgcatctgtccaggtcgaatactcccgaagtcgctccctttttcttagcctagaagagcatattatcgtatatgaggttagcggatgcggtcgcgcaatttgagtctgggacgatgagccgtacgttttagtcagtgctagtttgagtatcggcatgagcaagaattcatcgagatttggatccctgtaataagttggctgttgtatgatgttcatttaaataaacaataccaaatgaagacagaaagaggttcgtataacaagtcagatatgtggtctgtaacgtcgaacggaagtgagaagatagaagagtttaaacgcacaaccttcatttggaaagcgttcaataaccgaagtaccgagaacttcagctcgatcacatatcgcttgacaaaattcaacaagcctcaagagagcacacaatccacaataacaagaaaaacaatgctcagcaaggcactcgagggttattgatgtctcgttttccaatactcgagattcacctttctctttcaagtaggccgtcattgtttcgatctcctcatctgaaaaccgattaatcgctgaacattcacaggcgttattgatagaagaactacttagcaacaaacacattccatgcatactgtgagataaacaagagcgacataccctgccactgaaaccaccgaagatcatctagcctactttcataagattgaagttctgattcctctttctctaataaatcttcctgtttcaagagcgcgcagacatgataacacaacaggaagtcaatttgtacaacatctaggtgttctagaagaggagggggcaagatgaacccagagaagaagaagggaggacgaacccaatcagcagagtcaatactatccgccagctgggcttttagcagatcatccgatatctctcctccatcgacggtggtcaatcctgcccgctccaatttatccagtaatatcttctttccttcttgctcttgctctaatcttcgcttctttactggtccatgtagatgcgcttggtcttccccttcctcttcctcttctgttcctggtccttcaatcctttgacgtatcatgggttcgtgtctgggctttgaagtggatgaagagtgaaaggtttggttgatctccgcttgtgtagccgcagagatacgcgaactcgcgtctacgttcgcgtccaaatcctcaacgtggttcacctcgtttggggtgtcctccattctttcttttaatagatgtaaatttttctgctttgactgcgagtttcccttctcttcaggatgcaattcgatattcccaggcggaaggatatgcccggctgatctgataatcatatcaatcttgattgcctctaccggcgttcctggcgctgaaaacaacgcacctgccggagctgaagctgatccggagaacagagacgaagactgagctgatggaccgtttgtattcgacctgttcttgtctgatgaaccagatcgtgaggctcgatgggatgaatcggacggcatggtcgagggttgatacgtataaaacgcgttcgaaggatagaatacaataagggagatctatatcgaatgacgataacaaattcaagataagaccggaaaaagacacgccctaaagattgaagatccgttctcgaggtgatactgagcttcagaaagagagtggatgtttcgaaatttgggaacaaataggtgatggaaagagttcggcttggggttttggagaatgtcgcaattacgtttaaagtctttgatcgatcaacattcgggcctgtctatgaatctatttattacgtctaatgtatcgttatttagtagttgaataaatctcatttttatatgtcttgtgttgtaacgatttcgatatctcagtcagaagggcgcagaagatgataatacaacggaacgtaaaagccatgatattgatagcatcaagtagagaaaaacatacacgcgagcaaaaacgtcggtgaaaatattggaaaaagagtgagaaaaccaccgctggcgaaagaccgccaagggtgcctctatcgtaagaaaagaaaccgttctgccttaaaggatagaaagactttgttgacttagaagcactttcggtggacgatggaaggtccagcctcgtcgtactcctgctttgagatccacatagattggaaagtgctgagggaagccaagatggatcctccaatccagacggagtacttcctctcaggaggagcaacaatcttgaccttcatcgacgacggggcaagggaagtaatctccttctgcattcgatcggcaataccagagtacatggtggttcctccggaaaggacgacgtttccgtagagatcctttcggatatcaagatcacacttcatgatcgagttgtaggtggtctcgtgaataccggcggcctcgagtccgaggaaagagggctggaagagagcttcagggcatcggaatcgctcgtttccaatggtgataacctgtccgtcgggaagctcgtacgacttctcgagctgggaagactgagcggcggtctgcatctcctgctcgaaatcgagagctacgtagcagagcttctccttgatgtctcgaacaatctctcgctcggcagtggtggtgaaagggtatcctcgctccatcaagcacttgacaaggtacccggtcaagtctcgaccggccaagtccaatcggaggatggcgtggggaagggcgaaaccctcgtagataggaacagtgtgactgactccgtctccagagtcgagcacgataccggtggttcgaccagaggcgtacaaagaaagcacggcctgaatggcaacgtagaaagcgggagcgttgaaggtctcgaacatgatctgggtcatcttctctctgttagccttggggtttagaggagcctcagtaagaaggacggggtgctcctcaggggcaactcgaagctcgttgtaaaaggtgtggtgccagatcttctccatatcgtcccaattggtgacgattccgtgctcgatagggtacttgagggtaagaatacctcgcttggactgagcctcgtcactgccgcatagaagacatcaggttaataacaagagccggttacggacatcaagagatgtgaaagatacgaacccaacgtaggagtccttctgtcccataccgaccataacaccctggtgtcggggtcgtccaacaatggagctgtgaagattggttaaccaattcagaaagaggtacgatcagcagttgcgtcatccatacaaggagttgccactccgtctttacgaatatcaagactgagacgtgaagcatgttcttggatcgcttttgctctgtcatgaatttaaccaagctcgacgaaacgatactagtacttacgggaagacggctcggggagcatcatctccggcgaatccggccttgcacattccggatccgttatcaatcacctaatgaatgataagaaaaccattacaagagacaacgaagaaagcggatatgagccaaggagccaattcgcatcatgaagatatttagaaacacatacgagggcggcaacttcatcatccctagagttgaagaatccatcgcatatccatcacacgatatggaaaaaaaaggatggatgataaggccgcagtcaatagggtagagtgaattgattataagatggccgaggtaaatccaaagacggggaaggagaaagacgaaagcaagagaaaaagaaaggggcagtgcacaatcaagtgtcaaaaaagacgaagaaatgatgatttaaaaaaaaaagaggcgaaacgcagatgaagtgaaaaagaaaaaggaggcgatgagcctttccgatcgccatcttctataacaataccacacgcatacacttcagaaagagaaagaaagcatgtcgacgtacatggtgggctagactgtttctttttaaaggtggaggaggtacgggagttttgttttgagagaaagagagagtaagagtgagtggtggtcgggaagaaggaaggaagaagagaaagaggagggaaataaagagatggggcctgggcacggacggttgtgttgacggctaaattacggctgtaatttagaatataattcgatcgcagtcgtaaccacgtgaaggctagctgactaagccgtgcggttagacctccagctaatccatcagtcaagtccacagaggcatcttccatcccatcttgtgtgctctcagtcatatcttctcacagacacagtcatttcaatcgatactatcttatacctttatctaagttaatatggcaccggaagtaagtttatttggttctggaccagctcttccctgattagaccgtacaactcgtctggaggctgacttccacctctcacttccattcacatataggctgtaatgctcttgtacgcctaacttatgctcaggatcatcaatgcacacatcttcttcttgtgtctctagcatgttaccctgtatcttacgtatcgctactattcaatttttttaatccgtctatgtaggatcgactcttcggagtacatgcggaacggagatttcacaccaacacgtatgtaccttgtttcaacttgtcttttctaggctttctatcaagttgtccgctcttcagtcaaaactgatcttgcagccgttctaaatcgcgtttttcgttactctaggttttgaggcacaactagatgccatctcggttatattcaactcaaaagttaattcaaatcctgaaaatacagtgggcgtgatgacgatgggcggggctggaggaaaagggtgagatcattcatcgccctagccagagcacaattcgatttttgactcgatagggtgcgccaaactaaatgttccctccttcctgtctatgataacaaatccggtttcatcagtccggaagtattagcaacaccaacaaatgatctgggcaagatcctctccgctctgcacaaagcgaccatcggaggagagtctgatctgcatacaggtattcaggtcgctcaggtgggttgtcatctgtccttttcccatcttgcgagttcttcatttgatgatcgttccgttttgatcacctcacaaaacagctcgccctaaaacatcgacagaataaaacgcagcgtcagcgaatcattcttttgctcggctcccctctgtccgaatcggcaagtgagaaggagctcgtcaagctgggtaaaaagctcaagaaaaacaacgtggcggtggatgttgtgaccttcatcggagatagcgaagctgatggggtggtcaatggagaggagaacggaggagccgaagccgtgttgggacgcttcgtggaaagcgttcagag

SEQ ID NO: 2772 - DNA, 17981 bp, Xanthophyllomyces dendrorhous
gagtggagagaacaggttaggcccttcatatctcatcttacgagatgaacattcttaaatttgacagcttgaacgcatctcctattgtctctgccacagccacatcatcaccgttccggccggacctcatcttttgtcggatatcatagcatcgtcgtcaatccttcgtggagaggatagttattcgggcggaggcggcggagatggaggtgtgggcggaagtggaggtgttggtggtggatcgaactttgagtttggtgtggaccctgatatggatcctgagcttgctatggtttgttctttcaaatgagcgttgtatatgtctgtactatcatcgctataaactaatctcgcttatcgactactactcatatccacaggttctacgaatgtcgatggaggaagagcaggccaggcaggctcgagcgaacggggcagaatctgtatcgtctgctccgttggccactgtgccagagacttcttccaatgctgctcccgccgagattgtatctgaatcgacagctttggcgcctgtagagactacatcatcgagtagagtaccagcccaagagacagagaacgaggacgacgagagcgatgcagagctgaaggcagctcttgcgctttcctcaggagccgatagggatgttgagatgggcgatgaagatgaagaagacgatgaggatgaggaagaggtgtgtttgttttcttctgatagtcttcctaatctgactctattgtgatacgctgtctaaacctgtctttgtcggattcctttgaacaggcgattcgaaaggctattgagttgagtatgcaggaggaccaggagaagaaataaattcagcatcttctctattttctctatcctcattctttctttgacctgtactctgtctttgagtgtgtgatcttgatgttcatgcctgtgtgtgttctctgagatgaaagacgaatatatgcgcacgctttggaccttaaatgaagatgttgagatacttaaatacgggcacgcctcctaccctttgtgtgcctaagcgcagtcgattcggattgatttcctgtcatacaactctcgttcctatccctttcacattaggtgtcagccatctctcaatctctttatttactattcattgcccatcacctacctcttctcttcatcaaggcgttctcgacgatagatacagatacttgtactcaggatctgttcttcaagaactgttatcagtggccaaacaaggcgtttgagcaatcagcattggttcgggtatgtccttttatcttgattcttctgatccagtttccttgtcaaacgatggttgtatcttttgtttgggacaaaagaggaagtgaagaacgaagaggtgaaaaagtgggaagacggagagacggagagatagagagatgactctagaaggtctatcaagagatgtaccaagataatcctttctgtcctaacctttcgatttgtttgttctggcgtgcgtatatacgacagattcttatacgaaagtcaagcttaactttggatcaaatctcgaggaacaaattccttagctcagccatctcattcagccaccttctcttctctcaagcctatactgtctcactcataacatcccagaatccgagaagattttttgcccttgtatctatcatcacaactttccagcggccgacataaccgcctgatccaagatgtcaaccccgccgttcgaaaccggattctctcttccaccgaacgacgcagcaaccgttcgatcgtctgccgtcgccaaactccgccgagcagcttcgatccctcgaaataaggacggtcgaagaacggaaataccgaaggtctcattcccacctacggagtctggtgaaccattgccacccccgccagccgtcattgtcgttgaggcttctccgaacatcaaaacgagagaaagtactgaagacttagaacagggacacctctccgaagaaagtaagagatcaaaatgggcagatgaccaagcgaactttcattcttttgaacttgaaagtagtgttggtgcagaagccgagttgggtaaagaaattcttacagaagatcaactcaaccgatcccctccctcgacgatgtcatcattgccaacttcatcgcataatgtccaagaagaaactcaggtcgagcgacagcaagtggaggatgggtaccgaccatccaggctgcctactctcatgcagcgatcagcctcttcatcctctcagaattcatcgcattacccacaaagatttcctgctcttccgtcactctcagatattcaatcccgacatctgcttcagcgaagtaattctgcaagtgcacgacaggacgccctctcaagactgactggcgtaccgcccccgccctctacgtccccagctcctcctgtgaactcggttgaacaatctcttcatagctttcatctgtctggaatttctcaatcagaaggcgactcgatgacgaacaatattccctctctcactcgtccaaggttgggaaggagtttcacaataggaggtagccatccgggtggtgagcgaagaagtgtggtcggtagacgaatgatggctcggttaggaagtagaaccgatggaggatctacatcttccacatcaccctctctattgctcgttcctgaaacgccccgttctcgatcaccttctcctgctctcttgaatctaatctcagatgaatcagcatctccagatgacccagacaacccagatgggaagcatgatggggacgaccgagcagagcaagttgaggaaggtgtaggggatcacatgggtgaaactgaccgggaagaaatccttctcccttcgatttcttccgctcgatctgctgcatttactcgatcgtttgagaatccgaccaattcttctacgttcttggagcgtaattcatcccggccgttcatgtctcacggttattccttctcggagtctctcccttcctctcgttcaggatctccccatcctttcccggactatacccgaccgagcaggctggggtccatctcggttacccaaccttccactctgtcaaattctggcagactctcaaacgcttctagcctgacattcgatagacaatgggccccgtctcccgacacaggtgagccaacagatgcatttgaattctcggatctgttgaggtcaaattcgagtcgaaccgcgaggagtgtgagtccaagactgcccattgtgtctgacggtacggacggtagacgagaacgccacttgggagttccgtccctgccgagatcacaggaggaggggttggaggaggttgaagtattgacgtcttcagtgagatcagtcaattcttcgtgtagccaaaacaatcagttttcagcggctttgcgtactacgccttccatcatcaccactaccgtcaacaacagcagcgataatgatagatacgacagtgatttcagcaatgacgggtctagtagagatgtttccaaagtgcactctagatccaacgcctccccaagccactactcaacacctacctccgagttttctccctctattcctatcttaccacccggcttgaccgcgaatttgagaggcttaggtccagacggggttgaaaggggaaatttggatcggtcaaggacgggaagtggagatagtttcccagcgagcgttgcgccgagggatgaacacaaagcaagggcgcgcagtgtgataagtggttctcctgcggacgaagatcagtatcaggatgatagagaaggtacgtaaaataaccttgtttccttgatcttctgtgaattaatgcttgtttcattgccttggacttggtcctgtgtttttcttagtgtcaggacaagacgaattcctaactcctcttgaaagcgttgagagtttctctagaccaggatctgcatctattgagattgaacaattgtccaagatgccgtcttcagcactcttaggcacacgtagagatgacagtccggtgagctcccgaggcccagatgagagatctattgaatcaggaacttccgcggcgttggattacgccatgaggtaagataatgatggatccttgttacatgtgtttctcagtatccctctaagatgtacagctaaccagttcacctgtccatttctcctatctgtttcatgattgagttgggcgagcgtgggtgaaaatgcttcgagttcggctgagactgataagaaacacggacacaaaaagtcgctgtcatttgtggaaaaattggagcgaattgctaaaggaacttttcgaagccggtcgtcttcctctagccaatcaagtcattaccaacccaggtcgcctgcgctagagacacgagaccccctgagctcggcgatgaaccgaagcacgtcgaaatctacattgcgctcatccggatcttcttccgggcaacgacggacctccagccatcagactcttgaagatcgcacttccggcttgaccgttgaacgacactctacctctcaaccctctggcggacttcaacccccttctcaatcggtcaactcctcgcctactttcggctcaagacttcctccacctagcccgacagaaccaaagtattctgacgctaaattgatgccattccctggaattgtccaattggagatcgaaagggatagaaaacgagagaggagcattggttcggtttctccttcaatagaccgatatgtctcgtctgacgccggtacgccggcatcgtacgtgtctccatttgaggtcacgggtgatttcgaatccaccttatcgccaggaatatccccagtggcatatttcgatctttctcctagaccaccgtcccctaattccaagaagtcttggctgtccagaaagttttccactggagcgtttaaaggactgagcgaagatcgaagaaaagtcttaaactcgccggacgatcatactagggtgatcgatggagggatgctcggtagagagctgtcagcttcgcccaaagcttccccacattctttctcttcagcgagcagattttcatctcctaaagagtccagttcattattcgccactactcctcacagcccgtctccttcctcgccccaaaattctgagccgtcaaggcagtcggtacggtcgtcacctccgttgacccatgtgaataccttccctgctgggtcaacacacttggtcgataccatatctgtgaaatcagctacgacatcgacgctgcccaaagtgaaggggatcttatcaagcgctggattaacaactgtgaccgagccttcggaggaagagactcctcgtccatccacatcgtcgtttgatatgtctcgcaagacatatcgggctcattcgctacaggagaccgttcaacctatgacaattctcaatggacaaacgggctcatcgagtgaagcgcaacaagaaacaagaaccaatggggcgccctctttgcttgatttatactcaaagaattctgaaggcgattatcagtcggcatctcttcatcaaaaagaagatcagccaacttgggagcagactgaagagaagacaatggatactcaccaagagtcccaaagagaagtcactgcttcttcgccttcgtctttcgaaacacgttctgctcagcctcttacgttatcacctcagacggcacagattttgggtcgattagactcggttctggccctggcatcgacacaacaatcgacaagctctcaattgaatgacccgccgaggaagctattgctccattcacctgtgctgcaagtcgtgaatgccaacgcagcgaaggatcgatatttgttcttgtttaccgatgttctcgtcattggttagtcatttcttttcgccttcatacttataaacattatgtggaaacagtttcacgatctgatacagttgcacatacatttcccccattagccaaaccaatcttgtctgaaggacaaatgccctcgctcgataacaagttcattgtcaagagtatcgttgaactacctaagttgaaattgagcgggttgaaagacggggatgcgacttcagattctatgaagaaacagcacccggtaagcactttgtcaaccctcagctgctcatttatatgtaactaaacctttctgatttttcttgattcgtttttctcgataccagattgtgctcaatttcatccagatattttctcaagacccacaccgagctgtcgaatacctcatttcacaaagcaacctgtcaagcgccagtatctctggtttcctttttaaaacaactgagatcgatcgcaccaagctgggcgagttcctctctcaggaagtaaatgaacgacttctagaggggtttgtcgccagattctctttcgctggagtccgaatcgatgaagctcttcgaactttccttttgtctattcgactgccgaccgaagcgaatgccaacgagaggctactctggacatttgccgctcagtggcacgaggttaactcagaggtcgttccgtttagcaagcaggtctcaattcagctcgtgcttgcgatcatgcagctcaatgtatgtctgtttttatgagctcttttttgtgactatgaactgactgcttgaatgtttctcaccctttattgtaggatgctctcaatccaagcagctctggttttggaacctttgcttttgctaatcaagctatcacagtggacgatttcattcaggcatttcgagttcacgactccaggcggctcgttacgaacaagtacctcgagtctctctacatctcgatcaaaaaggaaaagctttctcaggccttatcttcatccgaatctcacctgcaaagggacatatacctcttgccaagtcaattgccttccaagcttacttacatggttccttcagaattgatttatatcacaatgcccgaaatggacccaaatttggtaatcaggttgcacgggacggggctcacttttgatcctcctgttcttacattcactcaaaactctcgagcttcattcaccgtcactggtcagtcttccgcccttagtcttttcttggttgagtgcaaattaccttctgatgctaatgaaaaatggtggactttttgttacgtcttggattatttaggaacatctctggggacgaaaactatgcttatatcccgaactggagattcttctcctttgtacaatagcctgccgacgagtaaaacgttcctcgtcgaaagagcgttccagagagctggccatactttccagttgtcctttatcagagaaccaaccaaccaaaaaagaaagtacctcatctcgttcgagtcgtcttctacccagcttcaatgggctggaagtatccaaggacagatccgacgatcgacggcagcgctggagtacaatatagaaaacgagttgttacctgtctcggtccagaaagcagccagaacggtcgctctgcaagtacttcgagatgcgttggttgccccagagtcggatacttccaagggggtttctgggcttcaaaaggttccgtccttctctcagatctatcgtaagtcgcttctttttttaccttgatcttgtattgaaatgagccgatttcttaataattatacgaaccgcatttttaacagctcttcgagcaggccgatgtgagatcgaactcaatgagcaacttggatcgactaaatctaccaaggctccttctcaaaatcgagcaggcggaggaaaaacagacctcccgactgtcactgaattggaagaacgtgcggccacgactttctttactgctcgaacaggccatgagatcatccgtgaatgtcagcaaaacaggttagtatggtgctctttgtctcgagtttgcatatgtggtcaatgatttgttgacccttggttatatatctgctctgatgatcaatgctcaatctgacagtttggtcccactgatgctatcattccttcaagccggattgaagccaatcgatctacctgctgcttcacatgccgttagtttaggaattgataccctttcagcccctccgggccaccgagggtatggatacttctagacaactcgtctccttcatttggaatctcttacggatagtgaatggtgatttctttatctcgtcaaagaccgttcaaaaaatgtatactaatacagcgcttccggtgccaaatatcagaacggtctaaagagagaaaagggctttctgtcctagatgtaaaactaaaataatctacgttttgaaaattgtgaggaatgaatgtaagggtgtcttatgacgaacatgaattatgcttataggaacggaacaaacagtcatatacaacaaaaatatacaaacagaggagaagaggtgaggtatacttcgctagatcttatgatgaaaactatgatagaagcttctcaaaacaggcgtctttgaatgagataaattagagaatttgaagcgtagcctatcgacttgccttctccaaggtgtggttcaatctgagctctccctttttagatagacgagcaacgagtccagcctcgagggaagtgatgtatgtcgtatacttttgatgctcttctttgagaaattcttttttacgtcgataattgtcatgagctctactaccctgcaagtgtcgaggtgacagctaataggaaagaatgaaagtaaagtttggtcagtaagattcagaggaagttcagacgggcttcgttgtttatactgttctctctctatatatatatgccattgaaaacaccgaactcacaagtgacgattctgccgtcttatgctccgcgatatcttcatcaagcctcgtcaagtactttcttaacgcttccaactgagattcttcatcatgtctactaggatacagtggttgcgatgggggtttccactcattcacatgagctgcgtggccgtttgaaattaatgagctctggcgtttcgtgctgagcacagattctgtttccgaattattaccgaaagatggtcgaccccagccgtaatccatattggacacaccaccagtcaatggctctttggaaactcgagcagcccagtagttgcaggttgagacccactcttcggtcaatgtgtctgtcccgacttggaagtaggtttgggctccggatggaagattgatcacgaagacaaatggtctatgccggttgtaaccaggggctggtagagtcttagagagactatgagagagagagaattcgtcgactatagtcgcgttggcctagaaataatttcaaaggcagttcagcattgggcctgtactttgaacaaaaatgagaggatacgattctgaacttactagccagttacctccgccaacggtcttgtcatttgcagagttcccaggactttcaaacgtgaatgttttgaagctccctttttgaacaaccgcgaacaaactcctccacgacttgtcctttgatcgtctccctccagaatccatgtagtatttccgagtaactaaaccttctttagcccaaggggagcccagaagtgctagctcttcgtctaaaatctctccgatggtggaagcagagacactactgtgaacagactcggcatcatgttccttgatgatagtgtggctcagattggaaacaaatcccatggaagggttggattgataaatagaatcgttgtatccctacctccaacgaccagagctggtcagcgttttgcgtttttcgatgtttccatgtgaatctagaagaaataaagatccttacctctcccattgacgtagctacgcttaatgttggactcagccttccactcgagttattaatactataaggtgatccgagattgcctaagcctcctgtaagagacgtgaaaccacgaatactgccccgtttgagtgaattgagtcggctggccgaagatgactgggatcgaacactttgatttcgggtcatcatttcaggagaagtgggcgaaagattcccagatagacgttcatggtcagacgttgtgtgaagaggttgtataatctcttgactcttgaccgagttatataagtcctattgatgaaaatagaaagaaatggctcgacatcaaatcaacgagcatttgtcaagccgattgttagttgtaagacacctaccttgagggtagactccatctcatgtgaccatgactttgagaacatcgaaccgagaacactagctgacgagtttgagactcctaagcccgatatactcattctagaaactctgggatcataagagacgcttccaaccggggtgccaaccagtggactgctcgcgctagatccgaacgacatggcggtcgaaatcacactttgtgatgatggttgatgaaccgaatcaagcggcgagtttgatctggcttctggggtggaaggtatagcatttatcaaactatgggacccgttcggggttcgactggatttcttggaccgaatcgagatacggtcagaaggtccggaagcgtcatcgaagacatcttgagtttgggtgttgaccgcgctttcatctgagatcggtggatcaggagaagacgaccggaacgaaatcttcgactggtcgaaggagggaatatcagtacgaatggagctcattgtgttttcaacaaactggtttcgagtcatttttcgatcctggtcggccacatgaagatcggtattcagaagaagtagactgtatgcgacttggtgcagtatatctggcatccaagagcgatgtctgcttagcattgagaattaagaaggcgactcgaagaaaagggaaggaaacaaaggaaaaatgaatatacataccgacagacccgaacaacgtatccggattgcactccatatatctttcacaaaaagcgacgataatccgatccagttcctgcgtttccgctttgaagtataactctgatgtcagtttcctatatcgagaggatattgtcgttgtcagcgttcaccttctgttacgattagagtgataagagcatgacggaccgaatggcttggtcgagcttcattcctgtgaattcaaatgattccatatagagcgacgcagctgctacattgatcggatctctaacatacagagagaaaaggaacgaacaagaacacattgggtccaaacaacagcaacaaggtaatgccgcaagtcagtacttctgaagataaaaaaaacgctgagagagatcaagactgaccgtccacctagaaactctgcaattcgattcgtttgtacccatttacaccccaaatctttcctcaggatcttatctaccgcctctccagcttcatcccgtatctcctgatgctcgtgatcgttttcgtggccactttccaatatttcctggatatcaatctcatctgtacccttcagtttctctatcttgacttcttggctgtcaccatctgcatcatcaacgccgagccccaaaccatgtaactccctctgcccggcgttaataccatctgaaataggcaagccatcgtgaggcaacctgggcaagacaggcgaaggcgatgatgggatcaatcggatagtgttttgtacgtctagcgcgttgacaggttgtgcttgctggttcctgatagagttgatatgatcgccagtaggggcacttaatgtcggcgagatcgaacgaccaaagttgtacgcgggcgtagaaccatctaggctgatagatgaaggcggtgatggtgatgtcaaacgggttgtagagaaagagggcgacgacaagttcttacgcgaagaatctattatgtgtgatgatacttcgacacccttgatcgatttgctgccagattcgacatccaactttgattctttatgaggttcagaaatcgagcgtatcatatggttggctggcttcggggacaaatgatcttgagaggtcgataggatgaagggttctataggaggaccaagtacaggcccggcagtagattccatggactgtgagtcgactgggctcttcttgatcgaacgctccacctgtctggacaaatctttcggagaatcaactagaggagatcctcttgtgttgccaccatgtcgtagctttgaaggcgaatgttgacctcctttttgggcgatcccatccaacaatccctcaagatcacattcccaagtcccgattcccgatatctctcccaccgaaagactacctttctgatggttcccggtcggtccagtcggtccagtcgagcgagacaaggaatctgataaatgatcatctgccaagaacgtcaagtcaccatcctgaacgattgtctcgtctccagtcggtgtgctcgatcttgattccgaagaggacgttttggttgacggcagaggcgaggtttcttcttccacttgagaacgagtatcggtcggtgtgagatccaaacttgattggtcaactataccagcgctcggttgggaaattacttcgatgaatgaggtcaacggagatggtgtagtatccaaaagtgtccgatcgtgcttcttgccgctaatcaccacgaaagacctttctttctccagccgattcgtactcgttgtaatatcaacactagatctcggacctcctgcttccatattagatgcctctccatttgtggtcacgctcgcttctgaaagacgtcgagacgtgaatctgtctgttgagtcagactcaaaagatttgacggacttgttctcaccgaacagaagatcaccttccggctggctcctctcttccggcccaggtaacgtcctaatcggttgtccttttgttacagctggttccagaccagaattccctaccccgccatttgagagaccgctaggcgaactgttgaaaaacctagacaacgcgttcttggccttcgatcgaaaactccttcctggtgaagactctctttctagcccttccaccttaggtttggctccatgaggagtttttaagtgttcgactccgccatttgctttcatctgtcctacgcccagttgtctagttgatagcttatttgaatccttggtccgcgggttattcgagaggggaaactgggagtgactgttatgagagttcgtcgttcgacctgaaaggctagatattcgcgcaaggtcgggctgagggctaacagcgatacgagacatcggacgaatatcagacatagatcggttcggtttaggtagcgaagatgagagagaagatgtggatgaagaggctactgctgctgtgggtgacgataatgttggtctggtcgggagactaggctcgtcggatggttgtagaaacgagggtcgatttgcaatggatggcattgatcctttgctattccgtgcctgtaaaatacacgacatatcaaaaaacatcgtgttcatacgaaaaggaacaagaggaaaacccaaaacagaaacaactacttgagtgattcgaaagactcaataaagaaaatagagcttgagggacgacgtacgagaacacctaggtctggagaactagcagtcactcctttcttcgaaagaggctttctaccctcatcattcatcgcacttaacaacccattcttttctgagctcgatgccaggccatctgtttgaatgataagctcgacctgatctttgaattgaggaagttcagcacgttcctcctctctaccctccggttttctctcctccaaaaaggtagcagaaagatcagaaggattaggtacagaagagggaggtacaggcgcttgatgactcggtttcaagaacactggcgatccatctaagctcctgatagtgtcacttctgatccgtaccatttcgaccgaagatccttgtagcggcacatctgaacctgacggtgaagccgaggtcaaggccaaagccagggtcgaagtcaacgtcgaggtctcgtccagattcaagctggaggtttggtcgatcaaaggagagcaaccataattactatgtttatttactggcagaaccttagatgaattcataggtttatcaaaacgatcagaccgaaatgagtgagtcgaaccaaggggatgatgggagtggttgaaacggatggacctgatgaaatggactgatgaccggatatttaatctgtcaatatcaacattctttacttctgagtttgacaagatctccatttcttcctttcttctgtttttctatcgttctttgcccttccgatgttttctctgacggcttattttacctgtcagggagaacaagccaatctgtaagacctctattaggtcgcgaagaatgagggatatagatcgtagcgagaagagggagaggcgagaaaagaaacaagcgaaaacgggattgcatcttcccgagcaagttttgaatggatttttttgctatgaagtttgtgtatggatgcattttctcagtcttgcacaaatacaaacaatagatgaatgaatcggaatccaaacctgaacggtaactgtacggatagacatgcaaatatacatgacagagagaacgagaacgaggagaggtagagtgtttgagtagaaaagagcaaaaatgatagggatatgcgaaacccgtttgagaaatgagaagaggaaatgataaattgtgaagagaaagagaaaagaatcctccaacccagtggctcggaggaaactgacgattttcagagttgtaactcctgcttgcctgcttaaccgacagagcgggtacgacgtttacttcgtctcctgtgtctcctgagcagggccagaaggaggcactccacccatagcgacagcgaccatgcctaatacacttcctccacccatctccttgatctgtctttccctgagatatcatgaggaagaaaagaaacaaaccggaaaaaacacaagcatccctagtcagtgttaatcttgggcaagaaaaaataagcaaaaacgaaccggtcctcctccatcattcgcttgatctctccctcatttgccttccagtattgctgttcttgcagatacgcagattgggcctgagctctcttttgatcaagatatgatggtggtggcccgggcctatcagctttggccaccggcacgaccggccctgtcggttgttggggacctccgaagagggacgagaaagagaacttggatgaggacgaggaggacgaggcagattcgcccttggcgattgctcgtttgccggcaggggtggccgcccaggcgtcgtactctgtctgtcgccgtctggcttcgatcatgttgtactccacagctacgtccttaccgtcgtaagcgtgcaggatcggtcgaacgtccttgggctgataaattccgacggctgtatatgacaaaaacgacagaaaagattgttgagcaatctgcacgctttgtaagccagagaggaagagagacgacttgcattccaaaaagggaatcaaagcgaccaaaccgtcgtccccaggggttccatcccacttaggtacgatcaacgcgttatgtggctgggcggcggcatgtgctttgttggtgtcgagcatgataactttactaagatctcgattgagatatgacagatcctttaccgtgtttcctccattggtggacgaaagatcgagtcgagtggcgtccctataaagtcgatatggcatatacgctccgtacggatcaagtctctcagcgatgggcgcaccattcttaattagaaagggtcagtagtgtactgtttcagttatcgaggtcacaagagcaaggaggtaaacaaagggggatggggatgtgaaagcttacaatcgaagattgagtggtgaagagcacgatctcataaaactgggacaagtagctggagagaaggtaagaaggaaagaggaagctgaatcagtatatgatacaaacgaatgcagagaaggtcagacaattcatggtactcacgcaataaagtaatcggttcccggcctctttgcagtcctccacccatgctccttatcccactttgagcaggtaagaataccatcgagctcgacaagcaaggtatacggtctcacaggaggaatcggaggtggcaagagttcggtccaggcaggttcggtcaggtattggacctaaagggagtcgatggatgagagataaaagatgtgagcctttaacaataggacgtgtttcagagaaaagcttttcagacgaacgtaatggttagagaaaattctagacatcactctgtctttgagagaaggctcaggatcttcaggctgagaaagagaaaggcagggtccctttagccatcgacacgcatacactcatatggatgcgaagacaaaccttgattttcaggcgttccctctcttcttgagagagccctctggagagccaccaggtacctcccacaagaccaacaccaagagctcccaagagagccttatcaaacaaggtagagccttcattctcttttgttcgcttcgcacccgtctttttcggcttaccatcctcgcccttctcctctggctcgggaagtgccgagggatcaatgtcgagtgaaggcagaagagaccgatcgaatttttcgggcacaaactcttcttctggcactgaagatgaagtaggggctgaagtggcgctggatgatggtttgatcgaaggagcagtctcgggtgaaacataaggggaagcgggagtggcagaggcaggagttgaggttggggccgtatcagaaagaggagtggtaggagtcgactggggccgaacgagcttggtgggagtgtacgcaaacgtacgaggtctcaaaagggcccttctggagacgggggccgatctgatgagagatctagagagatgcatttaaagagatgagatcaggcgactaggaatgaagataatcactgaaccggtggactgtattgagtcgtcttgatgcttgggtgaaagaaaaggtgatgggatcgaatgacggcgaagagtaggaaaatgaagagtgtggctggtaaatcacgtgggttgaaagcagggctgtgtcaaattcatcttccaagttgtgactacttatgaccaaccagtcaggcaatcggcgactcatgctgtctcaaggttgttcagaagctcattgtaacagcatggacacttgtgcacgtacatttatgaattatactgtaagaaccatgagcgcttactctcgcatcgactgtgatttggatccatgcccgtcaggccggctacccatagacttataaggatgggaaggttacagtgcctattgtgctgggctacaaactctcttggctgatgtcggcacaatctccattacgtaatgaacgccaaaagagattcctcataacgtcaaccagcaaagacaacggatgtcgtggtttgaataatgcatataggatgctgtagacgaagaccaagtgatacacagtgagtacaagataacacatagcaataaatcttaagcttagttgagacccgataagacttactgatacatggtgaaacactcatccttatctgacgaatactacgtgctatgtgcatcacaatacacactatctactacgcactatatgctgactctcagcatacgtccaagtactgtcacattgatacagataagtctcgatccggtcggacgactggtgatcgattacgacaaacaaaacgatcaaaagcgagcgcagtcagggcaaagcacacgtacatccaaatgtatatatagacaacaagctcaagctcgggcctgggcccttgagtctgggcctataggcgattcgattacatgttccttgtaaccagaccgcccgcccttggttactcgctgctcctggccccaacacaccaacacttccgtctgtccacatcgtcttcttgccctttttgctcgtctcatagatccagaactcagaatccagaattcagaactcagaactcagaactcaggataagagcaacaggaagaaaaagaagagaggatcaaggatcacatcagtttcaaaggacgtcaagctttggttttcctagagactttgcctgcgggcttacctgctgcacctcttgcgtactcgttcccatccccatccccatccccatccccgccctcttcagagcttgcatcgatagctgcaaga

SEQ ID NO: 2773 - DNA, 2079 bp, Xanthophyllomyces dendrorhous
cgatagctgcaagacagacataagtactcttatcgttccctgtaggaactgtttcttgtcgagataggtatttcgtgtgtgcgtatatatttgtgtgtgtgtctgtgtgctctcgtctgcccaacccaccttctcattctcttctttatgtcccctttgcttctgtctacagaccaatcacctagcaaaccccgcatgtatccatctcctccagtctcaccctcggctcaaaccgttggtcttccaaagcgaaccccatctccaaccgacaggctttcttgtaaggatcattcacaccgaggttacaacaggaggactcgtacaaagacagccgagctcggcccttccaaagaccaaagagtcaaccattcagaaggggatctcaagtaggtcctcctggctagatcgttctgaaacatcaggcaaactgatatttctcttatcaaacactctcctctccgcttctcttctttcagacaggtctctccttcatatcttcctcgccgggtgccacccaaccggatggccagtagatcgtcgtctttcatcggctgtacaacgaagactaccgtgccgacacagaagacttcgagacagcagtaccctgctggtctctcgatcgtctacccgacccctcatagatggacggctgatatgccggcatcacctcatctgtaccgcgcatcttcgacacctcgccagccatccagagccgtcgaagaacccacttcgaacggacctaggcacatagccgtcaccggcagacgtcgcacgacggacgtccctatgtcgtcatcctctctttcatcctccccattgtcatcgtcaccttcatctaccgagctgactaccagttcgggaagccctaaacggccttatcggaatgcaccaagaatcatatcatacactctgccaccagaagtcgaaatgtcttggagctcacccctcgtatcaccctcgctcaacgccggtccggtattcttctctgcgccctgtaaatcaattccggtttctactccgtcttcatcacatcccttcattcgacaggaaagcgaagcagagtttcatctccgcggcgtcctcggcaagtccgacaagcgtgccattggtgtccgaccatctgacagacgttctatctcatttcggtcgtcgtcctcctcggcgattctttctgatcgagaggccgaagcaaagagaaagcaagccgagagggaatttgcggaagacatcgctcgctgggtagatggcgcaccggagattccccgggccctactttcgactgataagacgaaaaaagatcaagcagcgcacacggtcgtggggaacgttgccggttttgaaaacagaggcaggatgacaagaccatcgattcaggacagaagagtcactgcacctgtttcgtcgttttccatgcttcgaactgcctcgccggccggattatccaccccatcctcgtcctctaggcactcttcccctgctcgccaatcacccgaccgaacactgtcctcgaccaaactcattaacgacaacaacagcaacaacattactgggctcaacaaaaaacggacccactctacgtcatcagctcattcgatgccctatgtacaaacgcctctcggaagatcattccttgggtcatttcatgctactccgccaacgccgacaactgggcttctctcacctccttctccacactcagcgaggatcagcctgtcgagctcggttgtttcgccgagcagtactcgatttcccttagtcgagtcgagatcgactgcatcgataggctcagccgtccctcctgtcagaggagacttctccgaggacacattcgactctgagtctttcccctcgtcttcttctatcaatagtggtcttgtccttcccaggtctcaggcccgagccgaaagcggatttgatctcgaccagacgatggagcgatgttctcgaatcgaaggttatatttctttccaggaagttggcatcggaaacatctttgatggcgatgaggaagaggacgagccagctgagcaggatgcagggtcgaaacgaggcagctggtgggggtggttgggtggaggt

SEQ ID NO: 2774 - DNA, 2688 bp, Xanthophyllomyces dendrorhous
gtagcggtgggggtgggggtgatggtggtagcggaactaaggtttgaaacctggtcttttgagcacaacgaacatcgagtctggtttactcttcttgtctttgtcttctctttttctcttccctgggtgtcttctttttttcttttctttcctccatccttatcccaaagaccctttcacttgtcaacatttcaatccacacatttattccctcctcccacctcaagctcccttttatctattttcatcacctatatcccatttgttacgtacctcacccttcatgtcttacctctaaggaacaatcttctatagtccttcttcctataaattattcctttctcgccttttttcgtctcgtttcctgcggacagtttcgtggcctgtttatcttcgtcattctcaaatatgccctcctcttctctttttggtttttccttcttgggcttttctttctaaacatccaatacatactatacatattcataccaaagcattctttccgcatggttctcctcgggaccctttttgttcttgtcgccttttgctcctcattttcttccaccctttcgtttgtttttcttttcttttcgagttcgttttgtctcaggacattccttcctacatgacgcagtcttttcgcctagttatatccgtgactccatatatatttgttcaccgtctcgtgctttaggaaaccgataccagctacgtgtctcagcagatgagagaatatcgttttcagagaacatcgggagacgagaagagattacacacagtgtgaaaggaatcgtcaaccggctaattttgtttggcaaaaacagaaaaaattggttgactttcggtttttaccgtcagcattctttttttttccaattttcttaagatctccatctaaatcccctcccgttcacttctttcgccccctatcttcaatcagcaatggtaaccaacacattccttcaactccttcagccttccgctacctcagcgccgtcgtcatctgatctggatatcgtcgtactcgatggtggcctcggaacgacactgagagacactttcaagaggaactgtgaaggagacttatggtcctcacgattgttagccgaagatccggatgtcatcaagcaggctcatcttgccttcttcgaggctggagcagagattgtcttgacttgcacgtttgtctctttccacttatcttctctttcttttggaaccgcgtgataagcggatagatggatagatgaggagatggagcgcgcgcgagaggggctgacgtagagaatttcctttgcttcatttgtggtagataccaagcgttcataggcggatttgtccaccagaaattcaccgaagaggaagcaagaggatacatgaacaaggctgttgatctggctgccgaagctagagatgagtacgtcaatggggacaagtatgataaggcgacctcgaagaagctagcggtcgggttgagtctgggaagttatggtgctatcttgtgtaatggtgaagagtttaccggttcgttaaaaaacattgaaaacgtcttctttctctctttctctctttctccttctctatgcctttcgtctctatgctgatgcatcatgtgtgtatgtatgaaaataggcgcctacccggaatcagaacaatcagtcgcgtatctcaaagaattccatttggaccgactccgagtattcctcccttcgttccccaggattgatttcattgcgttcgagaccacacccctcgctaacgaagttatcgccatccgacaagccatgaccgagctttcatctctgtccatatcggtagcaggtggtggagatatcccgttctggatcggattgacttgtccggctggggagtgggctgacaaaggaggggcgaaagcggctagggagtcactttgggagggtccgggtcgattacccgatgggtcagtctctccttctgtttctctctctgtcttttcttcaaatgggttgatccttgtttgaactcgaagattgattaatttttctctcttgtcctctcctcttattattctgaataaaacaaacctccctttagagtggcgctgaactgtacagaaacatctgttctagcatccatcatcccccatctcgcaccttcgtcctcgtccgaatccaaaccgaacaagcccacgttgatcctttacccgaactacaacaccgcctatatgaacgagaccgacaacgctgcttcgtactggtttgtctcgtttccatctcctcttcttcctctttacattgaaaaagagatacagaaagagaaaaagagagagaaagaggcccatcgtgattgtaactcacacgcaaacacatactcacccccacttccactttctcgctctcgctgcgcgaaacatctacagggacacattcgacaaaggctccaagccagctcgtcttacaggccccgaatgggcatcccaattgatctccatcgcctccgaggccaactcctctggatcatgggccagcaaaatcatctgtggaggttgctgcggaacgcaacctgatgagatttccgagctgagaaagttggccgatggcggacggtgaacgtgggcgtgggcgcgggcatgggtgtgggtgtggggccgagcgtacaggtagtaccaaaaaccaagccaaggagaggaattgggaggtctccaag

SEQ ID NO: 2775 - DNA, 3824 bp, Xanthophyllomyces dendrorhous
tccaaacatttgggtttaaaaagatcgacgatcatcggttgtagattatcatcttcttgttttcttgtattcgttctgtttacaccgaacatgttctctttgacgtgtatccatatgagcattcttgttcatctgttcatcctacctgtccggcccagatcgctctctctcggtccatgccttgccagtcgcttgctcagattcattaacatacatacacatacaagtcttctttcgaaaacagaatgcgagacaaagcaaggaaggtgcaagaagaaaaataaagggcggaggagggaggggaagaaagggaatctttgaatgtcattggctcgagaatcaattctctagatacacccccttactgagtaagctcgacggcaaacccgacagccaacttggagaactcgagcatgtgagtgaacgagaactctgggtgatcgaacttgtcgttcgccgagtggatgttcttgttcgagttctcaaacgtcgactcgatcgtgaatgacgactggaagccagctttcgagaaagacgcatggtccgagcaagcgtacccacacttggtctccttccaagggatgttcagatatcgatcgacgatcgccttgttgaacgcggtcaagtcgggatcgacaaagtcagtgatgataccgacgacctcctcggttccctgcttgacccaagcggtcatgtccatctggatcattgccttgacggcgacgccgtctgctgccaacttttggctgatcgcctgggaacccaaaagtccgccctcctcggcagagaaccacatgaactggaggggggtctctgggatgtagccagaagcgacgagagcccggaaagcctcaagcgtcgtggccgttccacttccgtcgtcatcggccccaggggatctcaagaagggaagcatgttggtactatcgcagtgcgctccgaccacggtgaccggtgcctttctgttctccttgttcttcggggtgaatgtcgcgatcacactggtctgtgcccaggtgtgagggaacgcctgaacagagacgtgctctctgacctccttgggagcgtcggcgatgtactacatggccaagaacaatatcaatgaacagagaaaaacaaagacgttttttttttgcaactggaatgaactttctacatccaagggacggtatcgttcgaacgagatagacagacgaacctgctctactttggccaagagccactcagagctctgtttgccggtgtctgaccggtagtaccgagtatagaacgaggtgaagtctaccaagttcttcttgggctcatccaccgagagatgtttcaagattggtgacaccaaagtcgagttaggggtcgggtactctattttcatatatgattagtcacacaggccaatcagatataaagtatcagcagtgagtccacctaatgataaatccggaagaaatgttgacgcactaaaggttttgggagcgctagcacccgagatgagtgaaggacttcccaaggatggcgtttcggtactatcgatccgggatttcccccaattcaaacgcccaaagagtcagtctcaccgaccgaagcccggcctgtcaaatctaaaaagaggaaagacagacggaaacgtacatatccataaaccttcttcccttgctcttggcgatgatcttctcccgctcagtcatccaaacaggcctttcgtccgctccgaactggaccagtcgaaggtcattaagatcgagatcgaagccttggttggtttgaaaagcacaagaccaagaccaaatcggttaactttccgttcattcagtgggcatctgggtgagagaagatcaaacacgaaccagggacctttccctcgtactgagcgagttgaacagagaatcggtcgtccgagagacctccgaggatggcctgctggggcttttggtcgacgttcagactcaaaggaagagcggcagcgagaagggatgagcaagcgagtatgggtaggagtgtgtgtgtatacatgatgtaggacgatgttcagatggtctatgggaagagaagtgatggtcagaaagatgggtggacagaggcgatagcgggaaggatgatcgtggaagtgagatgtggcgtttggccgtccggatccggacgtgacacagcccggacacggcgaccaccgacgtcagtcttcgggtacatatgttcttctgtgtctgatcacgtggtccggactgggcaactggcacaattatcagaacgatctatgtgtaacagagcaatgaccatgtgtgcgcgcgcgtgtgtgtgtgtgtgtctgtctgtctgtctgtcagaggcaatgacaatgacagagagtgagagcaaacgttatcaaataatatactgaaacacagataaagctctggcccgaaacaagaagacgtatgtcaaaccaagggtgataagaagtattgaagggggaaatacagatagtaggaaggacagatggaaagaaggagaaacagaatatctcgagacgatttagtggtcgatgatggaaaggtttccggtgaccagcttgttctcgaggatcgaaccatcagggatcgagatcttgttaccctcgttggcgacgatgatgacggttcctcggagggtgaccttctttccaaagacgacgtctccgttgatggtgatgtgatcggcctcgaggatgttggggatcgtcttgaatcgcttctggaagttggcgaccttcttgaaggtatctccaagcttgacgaccggggtggttccgaacaatcggttcgggttcatgaccaaagctccgtgctcgagcgagtacagattactggtgatcaagagcaaatcagagcacgacttgacgggcaagaatcggtttcggggcacgttgattcccttggcgtttcggaagtgcttgatggcggctccgacagcggtctcgagctgaaggacggctcggccgtcgtcggtgaccttgttgttgacgatgatctccatggagagctcctcctcctccatcactcgcttgacggccttcaagttgacccacactgatgatttgaaacaagagtgaataaaaaggagacataaacgcctgatcagtttagcgccgatgtgaaagacaactaatgttcaaaagaagaaagccatacagttgttggtgttgaagatcttgaacttcttgatggacttgaagtcctcgaggtgctcgtcaggaacctgggcgacctcgagaagtcggacctttccatcgacgttgacgagctacaagacaaaagtcgaagattacctgtcgtcagcttgatggaactcggacggaatgtcagaaacgattggccactcacagttcctcccttgacatcggccttggtcttgtcggtgacctccatgaggtactcggatccagagtccaccatgtacttcaagatgttctggtcgaccacggctcccaagttgtcaacgttcgacacaaagaggtactccttaccggcagcgatgagcttgtcgatgagaccggtgttgtggagggcatcgaagatctgggaaagaacaaaggaggagatcagcaaagcggtcaacatcaggtatgaagaggctccgaggaatcataggtcgacatacatctccgtgaccgggggggtaccagttggacttgtcggacacggcctctcgggcggcaggaaggagagactccttgtcaactcgggggtatcgggactggttgaaggtcaagatctggaggttgtggttggagtacttctggatgattcgggcggtgtcgtcatcggtgttgaaagagttcatgaggatgaaggggacgttgcagttgtctt

SEQ ID NO: 2776 - DNA, 5940 bp, Xanthophyllomyces dendrorhous
  misc_feature (4857)..(4893): n is a, c, g, or t
ggcaaagaaagcaggagggagggcagaacggcagctggtcaatctctaaaggacggccgatgatggacgaaaacagaagagaacaaggaaacggtttacttactgacagagttgaggtgctcgatctgtcgaacggaaagatccaagaaggtcataccgtctcgaacctcgatgacagacttgggtccaacacaacccatggtggttcctgtagatggtcggagcgcaagtggacgaacgggtgagcaaccttggctgactgtcaactgtgagagccgaaagctcgacttaccgagacctccgttgagcttgaggacggcgagcttgttgaggatggatccatcggtggaagcagggagatcagcgtaggggacgatctggtcggcagcgggggggttgacctggtcccaatcactgtttgcgtccgaagaaatcggtccaatgtcagtaagaatgacgacagagcgactaaaggcgagctcctatgcttacagcttctcccccttggccttctcgagaaggtatcggttgaagagcaagaagaaagagttcatctgagcctcgaagctctgtgatggtggagagggaggatgcatccggatgtcagctgagctctcgatgagggtttgttctctgtcttgatggaaaacaaaagggacgaaccttcttctgggcagggtcctgcacgttggcgaccattctggtaagctcgtttcgcatggccttggcagcgacaccggtagtggccgacttgaagtcctgttcaaaggcgatggaggtaacgagaggacgcagagagattcgttaagaacgacagaacgaagaaaagaaggagaccaccaagcgtccaaggctaggcaaaagataggacctcgaccaaaaagaaggaacaagacgaacgatcgcggagtgtcctcgctgccgggacgaggacttgctgtgggacgaaaagaacggagacctgtcagcgtgtgcgttctaacgatcagaccgagtgaacgcggactcgtagacctacacagagggagcctggagagaggaagacattttgttcttttcggaggatgagaaactgatgaacggaagcgcgcgccagagagaacagtcgaacgaaggaacaagaagaagaaagagatggagcgtcaatttctgaatgcacgtttgaagaaccggatccacgctcgcgagacagagatgtcaacgtaggctgtctgtctggatctgatgcacgctgtatgataaagataggtacaggatgtactcactctaaggcataagaaacgagtgattcgttccaatcgcatgtgttcaaaataaacagaccgagtgaaggaagaatagaaggaggaaaaaaaacaacgggccagatggggaatgaggtcagctctcctatcacttattcttccctcgacactttcttctccttcttcttcttcttcttcttcttctgctcctcctaaaaagagacactctataggatgactgtccaccaagacgacgcaacgaacccaacgagatgtgtaagcaaagaaaagaggacgaacgaggtctggtcggaggtggtcgttgatggaaggagagagcaaaagatgcgatgggggaggagaaaaagagaaagagaggaaagaaaaagaaagaggcccggacggatttagctctctgccttttgggcgggcccttgctgcgcttctctcgtggggcggacagagatggggttagtaacccccagggtgaaaactgagacctcacccttggacttgttcgtcttcgccgcctgtttgttgtttctctggaagaatgttgggctttgttttgttcgttctcgttctcgttcttttttctttttgcaaatctcattaaactcttgatgtcggcaacgtttctgttcggtctgctgctgctgctgctgctgctgctgctcctcctcctcctcctcctccttcttcactcgctcgttgttgtattttgtttctctctctcgctttcttccttgctgatcggtttctcgaatgaacgagcgaggcagatcgaaggggggaaaacaaatgtccgtctcagatccaaccgacccatccctttcctcttccggccgtgatctggtctcgtttctttcctttcagaccttccccgcgctttgcacgtggaaatagccggacggacgatcatcatctatgaaacatgcacagagaaaccccacacgataataatagtattcaccaaagaaaagaaagaaaagagagaaagaaggaaacaagaaaatgaagaaagaaaaggaatgaaaagaaagagagaaggagacaaggagacaagggtagcagttgtaactttgaattcagtattgttttctcttcttttttttttgtggaaaataaaaacaaaatacaaaaactcagtcgtaggcccacgttgcgatcgaatgtaatgcaattcaagaaggaagaaaagaaagagtagagtaaaagaccgtctgctctctactctctactgttcactctgcccgccctttctttcattttcttttccttttctttctttttatttaatcaaagtgaagcggtctgtctacccttctcgggcttcccggtcggaacctcgaccgacaccgtgctctcctcggttccctccttctcggcctcggcctctgtcaaagcagattctagaaaagcctttgaggacacggcaggccgacgaccttcgagtgccagttgagcggccataagatctctgaacctcgagttttctcttgtcgactggttgggtgttgtccagatataaaaagagagagagagtgtgtgtgtgtgtgtgtgtgtttcacgagttggagatgtcaacgacttgagcgtacacactctcagaggaaaagaaaatacgagaaagaaagagaggagaaacatacgagatcagcgtaaagaccctcctcggtgacccgtccgttctcgagcacgatcacccgctccgcctggctgatggaactcagccgatgggcgaccaggatgacggtgatcgatgattttgcgaggatactcgagatcgcttggttgaccttggagggatgaagtgaaaaagatagagtgagttagcagagagggactggataggggaaacagagagtggtgacaatagaggattagagagtcgcacctgatgctcggcagcagaatccaaagcagacgtagctctacaagtcacaacgttggcagaggggagaaaagagaaaagaaaggtcggtcaaccgaaagactctcgggtcgatgagacaacacattaaataaaggaaaaaagaaggcggagcgacgtactcatcgagaagcaagactgaagggttcctgagtaacgctctggcgatcgagatcctctgtttctgaccaccactcaagctggccttgccgactgaaaggggggggggaggggagaaggaaaattgtttttttggatcgtcaaaaccacttcttggttagctccttgttctgacgcatcgtctctcgtgagcaagaaaaaagttgggaatcaaaacgagaataaaaaaataaaaaaggatggacgaactctgagtgctcaagccctctgggagaccaaagatgaaatcacagttcgcctgcttcgccgcccttagaatgtctgcctctgaagcctctggtgtgccgtacgagatgttctccgcaatcgtcccggtgaacaacggcgggtcctgtgggacgatgcccagtttgtttctccaggacgtggtggtaaagttccggatatctggtcgttggtatgcgccgaaaggacagacgagagtgagtttgaggtttttcttattattattattattattattattattggagactgaaggagaagaaagatagaactgaccttctccgtcaaaggtgactacaccagactcgggatcgtaatacctcaaaagcaatgcgtggatcgaggactttccgcttccggacggaccactttaggatgacccaaaaggagacgacaaccgagcgttaactgacttttcttgttgctctcaagtacccggcgcccagtgtttggtgcctcgagaaacgagtagaagaagaagaagatgatgatgatgatgatgggaaaaagagaagacttacacgatggccacgctggttccctgttcgattcggagatcgaccttctggagcacgggcgcgttcttcctggacggataagcaaagtcgacggcctcgaacacgatgtcgccgtttctcgaactaggcaggacggatcccacgtccgtcttgatggcagggactctgtcgaggagctcaaacactctggacccagcgccgacgcctttcatgagaccggtgaagaaaccggtgaggccggaaaccgatcctccgacgtaactgttcaagaaggaacacaacggtgttcatgttgagaggcctgttcttttgttatggtgaaatagcctgcacacaacggaaggggaacgtacccggtgtaaatcagtagactcgtcaagctaccgacgctgatctctcctagagataccaaatgtccacctgttgtgagggagagaggggatgagggaagagcgaagggtgaaaggtgaaaggttaagggtcaaggacagaacgcaaagagcaaaattggaatcagtcttgtcgttccctttgtttttcttgctctccatcctcgtttcaaatacacggatgtgggtagactgaccgtatccgagaagacacaacatggtcaggtttccggtcagaccggtcccaccgaaaaagatcccactcgccatcgcttcctttcgagcgagctggaggacgccgtctacctttttagagaacgaatctgcctcggtctttctgttgagagaggaagggggggggggggaannnnnnnnnnnnnnnnnnnnnnnnnnnnnnnnnnnnnccagacgatatgtcagcgcgcagatgataagccatggggaagtatgtttgacgcactgtgtgttgaaagcggtcaccgtcctgtaagccgacaacttttcctctgcgacctagcgcgggatggatggcacgaagggaaaagagaaggggaagggggggagccggtcggttagtctgtctgttttgagctgtagatgtgaaccgaatcgggagagctgtctacctttgtcatatctcccagagcctcttgggtctgcttggacagacttcggaggtaccgaccgtagaacacctatgagcgaagcgagcgagcgagcgcgagggaggagaaagacaacgagataacgacgaaacataagctgatgggcgcatgtggtttgacaagacggattgtgagtgagggtgaacatacagcaccgagagagaccggggggacgacggcgagcatgacgagcgtgagttttgtggagatgtagaccatggctccgactaggaacgtgttgccgtggtgtcagcggttgtgtaaaattattacgaggaaagagaagagggagagggagagagagagagacacgcggtcgagcgcggagggagactggattggaacttacctccaaccaaggcagaaatcatggctcttagaccgtcactcaggttgcttgtcacactctctcccacgatggttgtgtcactgtttgtgtgagggagggaaagagaggagggaaagagagagtaaggacggtggctgctgattatatgaatgcgctctttcaaagtaaaagagagagagaccgacctgcccaagcgagaaagaatgtcacccgttcctctgtcggcatattcgacctcctgtctgaggatatttttgtaggcttcgtttctgacacgagcgatgattcgctgaccggagagtctcattaggaatgctcgcccggcattggtggcagcgccgatgatgaagaatcctgtgaggacggaggctgcgacggggaacgacattcccaggaatgaggtctgttttatttttatttattttttggggggggag

SEQ ID NO: 2777 - DNA, 650 bp, Xanthophyllomyces dendrorhous
agagagagagcaaggaaagaaagagaagaaggaaaaaaaggagaattcagacttacactctcgggatttgagaaaaagtcgatgagctttccgatggtgagtgggacggacatgctgatacaactgctaacgaacaagagaccgatcgcgatgttgatcgtccttctctctggtcgggcgagctcgagtaattttcggatggacgacgaggtttctttgtttagcccgatcgaggagggaaggatccgggcgagagggcctttctttatggtcgagtcggacgctgacggttggacgatcgatgttgccgagctggccgccgtggaggttagcgggggtggtggtggtggttgtgtttgcggtggtgacggtgatggcggctgtggtgatggtggggatgaggagaacgtagttgttgttgctgctgctgctgttgaccgagaggagggggaggaggaggaggaggagagggatacgggcgtagtggtgagctgccgacggaggtgtattatgtttgatagacgagaggaagccaagggtagagggatcggacggggggaggacgagagagagagatcggttcggaaagagctgctcgacgtcgggtttgccagccgcgaggtcgatcggagggagaacgggggtttggt

SEQ ID NO: 2778 - DNA, 317 bp, Xanthophyllomyces dendrorhous
gggggtttggtggaggggatactttctgagaagagggggagggggagaagagcagcatgatgagtcttgggtgatcatgatcatgagaggagcagacgaaggaggaggagagggtgaatgtgaaggaggaggagaaggagaaggaggaagaaaagaaagccttactggagtataggcttgtcggccggctgccgatggagcccaggagggaggccctcgagggacaacctgcgagggcagagagtgatcgagctatcaccatctgtggcagggagggtgagaggctaggatagaagggggcgagagcacgaaagaag

SEQ ID NO: 2779 - DNA, 904 bp, Xanthophyllomyces dendrorhous
gaggaagaggaagaggaaggcggttggagggataccaccaggatgaggttggacgactgggagacttgactgccggccgactgtgaaccaagtacagagggcgagcgggaaaagttgcttttgggggaaggtgtgtgtgtgggagtgggagtgtgggattatgcttggttgtttctatctacctatctatctgtctctctctcttcctctctatcttgctttcttcctcgagggggggagtcaaagaaggacgagggagagagaaaccgaacgagatgacgaaaaaacggggggagaagaagaagaagaagaagagggagtgcaaggggggttaaccctaagaaggaagaggggagttaggggtagcagtcacgtgatctggagagcgcagactcccatcttttatcgctcggcgcctcgtgagaaggaggggagagaagaggagcgagagaagagagagcagaggagaaagaacagaagagagaaagaacagaagagagaaagaacagaagagaaagagcacacacacgcactcgatctcgctggatgcaccggggacaaacgcagggaagcgaggaagacaggaagagatcaagggaaaaagaaaaaaaagaaaaagactagggaatgtttgtagtgtccaatagaaactgtttctattgatcgctgtattaggcggttcgatagaatttgtagtgcgttccctaatgtgttccctaatgcgttctgtagtgcatcctgtggcgatctctgtcgatctctgtagtcacttggctaatcatcggcctaatagattgtccaacacgctttctattggattccctagtatattctctattgcattctctattgcattctctagtacaaccccctaatacacccccctaatacacccccctaatac

SEQ ID NO: 2780 - DNA, 761 bp, Xanthophyllomyces dendrorhous
aaaaaaaaaaaaaaaaggttccctcacgggttcaccctgatgatcgacaactacgactcgttcacccacaacatctaccagtacctcgaacagtctggcgcacacgtcaaggtcgtcaggaacgacgagatctctctcgatgatcttgatgtatgtccttcctttttctttctttcttgcccgcgtaatagtctttgcgacttctgtatccttcgtagtcttctttctcctctgtgtgtttgtgtgtgttcttgaacagcatcctgacgatctctccttctcctttactttgctttgctttgctctgctctgctttcctctgctctactttcctctgctctgctctgctttcctctgctctactttcctctgctctgctctgctttcctctgctctgctctgctttccctcgtccaactcccacaggcatacctccaagccggacaactcaaaaatatcgtcatctctcccggaccaggccatcccagacacgaatccggcatcagccgacaagccatcctttgggcctttggaaaggtatgtatcctgctttagctgtgtgtgcatgtatcgtcatcatgtctctgatctctgcccttctttactctgctctgctcttcctcccccccgcctttccccaggtccctctgctcggaatctgtatgggtctcgaatgcttggtcgacgtcctcggaggagaagtgagctctccctttccttaatcctttctctctcctcctccctctccctctctcctttac

SEQ ID NO: 2781 - DNA, 395 bp, Xanthophyllomyces dendrorhous
ggttacccacgacggacggggcctcttccgatcgctcccccagaacctaaagtccgtccggtaccactccctcgccacaaaggtcctcaacctcccggccgaactccaggtcacatccaccaccacccagtccggcgtcgtcatgggcgtccgacaccgggtctacaccgtagaggccgtccagtaccacccagagtccgtcctgagcgagggcggaatggaactcgtcaaaaactttctcgacatgcacggcggcaaatggtcagactgcccagagtttggcattagatcagacatcgacggcgtagacacccccaagctcgttaaacaggttgaccaacagacccatggcgaagacgtcaaggtcgaacccactcctgccagcacccccgcct

SEQ ID NO: 2782 - DNA, 3349 bp, Xanthophyllomyces dendrorhous
cacccagatccacgcccaacgtctgttggacgtcgactcggcaagctcccatctgtccaccacgcccgcacagctaaagacccatctgtccctcgagctcgccccaccgttgatcccgctcgtcccccggttgctccagtcagctcccctgccagccatcctggccgaggtcaaacgagcgtcgccctccaagggtgacatcgccccagacaccaacgcgccctcccaggcgctcctctacgcccacgccggcgcgagcgtgatctcggtgctgaccgagccgacctggttcaaaggctccctcgtcgacatgctcgcagtcaggaccgcgctgggcgagttgccaaaccggccggccgtgctccgcaaggactttgtcctctcgacctaccagatcgacgaagccagattctacggcgcagacaccgtcctcctcatcgtcgccatgctcaccccacagctcctcgccgagctctacgcccactccgtcgccctcgggatggaacccctggtcgaggtcaacaacgcggccgagctcgaacgggcgctcgagctaggcgcaaaagtgctcggcgtcaacaaccgaaaccttcacaactttgaggtcgacatgagcacgaccagccggatgaacgacgtcctcaaacgcaccagccgccaggacaagcccatcatgatcgccctcagcgggatcgcaggtagacaggacgtgctcggttacctcgacgagggcgttcagggtctcttggtcggtgagtctctgatgagagcaaaagacccaaagcttttcattcagcagcttctcgatcttcccaccgaggtccatccctcctcctcctcctcctcttcctcttcctcttcctcttcctcttcgcccacccccacaccaagcgcaccgctagtcaagatctgtgggattcgatcgacagcagacgcccagatcgccatctctgccggagcagacatgttgggaatgatctttgtggaaaactcgaaacgtcaggtctccgttcagaccgcttaccagatcgcccagctcgtccggttcgctcggtacgccaacccgccggcgacttcctcctcatccaccacgccttccccgtacaagcccaaaggttggtttacacaccacgccgacgcgctgtctgcctcacgcaaacccgtcctcgtcggtgtcttccaagaccagccgctcgcccacattctctctgtcgtctctgaagtcgggctcgacctcgtccaactacacggccacgagccggccgaatgggcgtcgttcatccctgtacccgtgatccgagtacaccatgtccagacaacttcttcgtcgccgtcgccatcaacaacaacaacaacaacaacaacaacaacatcatcatcatcatcatcatcatcatcatcatcaccgaataaaccgatcatctcgccagccgacgtcacgaggaccggtctcaacagacacatcctcctcgatgccgggctttccggcggtggaacgggcgagacgttcgattggtctgtcgccagagatctggtcgagagcgggagggaaaccggaggaagcgccctgcccatcatcctcgccggcggcctgacggaggagaacgtcgagcaggccgtcaaggccgtcagaccctggtgtgtggatgtgagtagcggggtcgagttgaaagagaccggcgcggtcggtaaggactgggcgaggtgtaaggcgtttgtcgatagggctaaacgtgcttgatctaggagggggttcacagagagagagagagagaaagggaggagagagagaaaaaaggaacttattggcgccaacatagaaattgatatcaacatgccatcttgccagctatcttgattacgagtacatccttctgcttgcatccatctacttgcacccatctacttgcacccatctacttgcacccatctacttgcacccatctacttgcacccatctacttgcacccatctgcttagacacactttatgagaaacaaaccaaacggaccagtaagatagagtaaataacaagcgcactctcgacgacttccttacgtcatccgcctcgcttagcctttcccctccccccgcagaagccggtgttcatctcggccaccatctctttcgtttaccccacactcacttgcatctccatccacacatacatacagtacatacatacatacatacattcatcccatacaatggcactcactcttcagtcctcaatcaagctatcatcaggttaccatatcccaaggcttggtcttggtgtctaccaaaacaagaaggattgtgtgagctcttgtgtggccgctctaaagaccggctatcggttcgtcctttcccttcccttcccctccctccgggtttcttctcgctttcttctctccctccggtctcgccctctgtcttgtttctctcgctatagtcgtcgaccaccaccgtgtcgaccacctggcagagaacgagcagacggtagggtagaatacatcctgtgcccgtcagacgctcactcttgttctcggtcctcccatgtggtaaccatctggttttcttctttcacgctcgctctttctgtctttcttgtctccgatccttgtctgaacgatcggcattggcctaccacgaaacgatccgacaaacagacatatcggtaggttccttctcttctctctatccttcgtgcttcttctatcaagagaaggaaaaggaaacgaaaaaaaaacatgtgatggaaacacggcgctaaagcaaagaaaaataataatatttggttttgaacccgggactctttcctactttggcaataacgatcatgttgtacccgggtttctcttttccctttcctttccctaaccaccccttttctcatgagcagacacagctctgatctaccgaaatcacacagaggtgggcacaggtgtccaggagagtgggatacctagggacgagatcttcatcagtacgctcttctcctttcgttcccttttcctctttctctttccttttcgttttctttttgcgctgttccagcagctcggagggacgttgctgatgggcgttctgttttctcttctcttttttttttctgtcggtcctacgcatcggatcagcctccaagatcgtctcgaaagatcaggggtacgaacagacgttagccaaagtcgaccagagtctgaacgaactaggtgtctgtcagtctttcctttcctttccttttgctgttcgtaccggagatcacggtggtggtggtggcggtgttgatgatgccagctagctagggagatttatgattgacgtttgattcttttatattaaatttatctctctctctctccctctc

SEQ ID NO: 2783 - DNA, 611 bp, Xanthophyllomyces dendrorhous
tctctctctctctccctctctctcttttccttcgaacgcggcttgggcgcactaaagcatatattgacctgtttctaatccatgatcctgtatgttcctactgtctttctactcgtcccctctcatccctccttgagcgcgcgctcacacacgcacacacgttcgatcatgctcacaccttcgttcatccatctagctcggcgggtcccaaaaacgactagacacctaccgagcgttgatcaaatccgtctcggacggtaaagtccggagcatcggggtgagtaactacgggatcgagcacctcgaagagctcaaggctgccaacctggggatcgcgccggcggtgaaccagctggagatccatccgtactgccagctcaaggagatcgtcaagtactgcaaggaaaactcgatcgaggtcgaggcttactgtccgttgggccgggcagagtacttccacgacgccgtgatcgcgggaatcgctcagaagcttggcaagacagaagcccaggtgatgatcaggtggtctctccaaaaagggttcgtctttgtttcgcttccaagtttcacacatacacacacacggaagaggaggaggtgtgtgtgtgtgg

SEQ ID NO: 2784 - DNA, 10472 bp, Xanthophyllomyces dendrorhous
atcttatactggtgccacctggttgtaactcgttatatcatcatgtacttttttttaaaaaaaattctctcactctctcgcgccttttctttttctttttgatttctctctttcccttagaccccggctttgcactagtcatgacaggagggaaacgaacgggccatgaagagatatgtgtgtatatatatatgtgtacgcttcgtcctcggatctttgagaacaagaagaagcagcagcagcaaaagagaacgagacgcaagagaagaaacaacattcgacccctgctccgatacgttccaaggcagaagaaagaaaagcagccgatgcaaaggtaggtccgcccctttccctttctcctttcccctttgcctttccctttcccttctctctctctctcactttctatctaaaagatgacgtcctcgtctccgtcgttctctagcaagctccctccgccagagatctcggccgccttgggcgtcgcccctgccgctcctacggcctcttcttcctctcgcgtccgtttctcctcggcaacgagatcggcagcggcctgtttctccttcttctttccctgtacctttttcaatcggaagaaatcctctcggtcggcttcgtccaactcactggataggtccgaccacccatcgttcagaccgaggatccataccggaccaaccagatagcgagtcagccctcggctttctcaacaaagaggaaaaaaggaagaaggggaaaaaaaaagaaaagaaaagaaaagaagaagagcatgcacggacctgacgataaagttgacggtgtcttctaatctcggaatgacgatatgctcgatcgcgttcacccgtcggtttgtcgatcggatgacttcgtccaagatggtgaatgccgtctggacgggacgaacgccaagagatagagtcgtacatagtaagccgtcgtgcacgacgaagaagaagaacagcaaagaggacctggaacccttccgataatcagcaagcgtaaccgaattcgtacctgtagactcgccaactcgaccaacgtctctacagccttcacatacgtctctctgcatttctggacctgctgtcctccccgacccaaacccgtcaggttgaaatctacagagttccaagacccgtcttgctgtcagtcacacacacacacacacacacacacatatgcacacacgcaggatgttgcctcttccatacgaaacaaaagacaaaccgtttccgcccgatttcttctcggcctcgaacgtcggtaggaccacaccagacacgttttctgactttgaaaccacagtgaacgaagccgtcctcacagactcttggacctgatggcagattggttgagcttgacatgtacacacaacaagaagcagaaagtggtagaaacatgagatgaacgaacttgataggagatatcaccggtcgcgtaggttacttctgccaaagagaacgatgcaagctgaaggactcttcccatccgacgtttagcctgaggtgattgacaaagcaagagaagtttagttgatggcagacaaagaacatggccgttcacagaagtctgatttgccaagatggagagtgaagtcttttgcccaagggcttcgccgtgcgatgactatcactatcgagatatccttcatcgtttcctctccaccagtatgaacagattcgttctcctgaaccgtgattaaatcggcccgttcttatccctgactggcctcacacatcgagccaagctgagacactgacctcgtccaccttcttgagaatcattctgaatcgggtcatcagggcatctcgcttcttggccaagagcgaatgtccggtctgagcgcctttgagctgctgcttcgtgttggtcaacgccatccgggttgggctgatacgaaaacgttccctcgtctatatcaacaaagatatactcttcatcggacgcaaacacgcccacacagagagcaagagaacttacaaaggtctggacatggcgagtactttgaatttctactgtcggtcgagatggaagagatgaatcaaggtaaagatgagagacgctggtgagagcgagatcggctcggccgtggttacgccatcagcaatggtcgatggttatgagtaaccacgcgctctcgagcccaccgtatggtgtcttttccctctcaagcaagcagagatcgtggttatcggatgtttgtacttgtttgagaagaaagaggtagtgggtttcaaaattaggtatgggatgtctgatcttaggaaatgttcttgagcaaagagaagaaccagactcttcttccactaagagcgcgcagaatgaatgaagcaggctctacgcaaacgtcgctctatgcgctagtctgaccggccattcacatagagcgacgaaggatctgccccttcaaaaacagaacaagctgataacctcagcgaacacattcccttcactttatgttcttatagggctgagagtatgtatgttgttgtagaagcaatacgagacaatccacgtgacatcaaatacgtgtggctgtgcgacacagcttgccttcatcacgacgtatcgccatttcatccatcgtttcagatatcctcccttcctcttcaactttactatcgttatcccaaccaggttggacaaggaaagagcgaggaaagaaagcagagaaggagcataggagcaaggtcaacatgtccggtaattcttacgctccagatcaaaatgctctcgcttcaattgctatcgtctccaacaattctttcaacagcgacgatcctaggcaggtcagattgacctgttctgtctgctcggccagtgcaggctatttctcgtctgccggattggccgttcacaatcgcctagttcatgttctcaaacttaagttccttcgaccgccggacaagaacggtcattcgaccggtcagtactactcagacttgcatccgtagaaacccgggatttaaagatcacacaatgccaaatcaagtctgctcactgatagatatccgtctcgttcgtttagtccagacgatttaccgaatggacggcgtgtttggctgccctggttgcgatttgttctaccatatggaccctttccttgtccttacacatgctatcaacgctcatgggtataggtaccccgccgctccggtcaattctgagcaatcggcttctgcctctacgtcgacactctctgtacctcagaaaccaccagcgccattagcaccaccagcgctccagatcaaccagaatcaacctggcagccaatctgagaactcgagaccaagcagccggatagaaacctcggcgccaggggagacactgatagcacatacgaacggacggaactctcaactcgatcttcatcactatcgtcaacagcaatataatcatcgacagcaatatcagcaaaactacgcaaacaatcaacaaactcagaactcattttcagctcagaacacccctactaatactcttcctatcacacatctagcccctgcaacaacggctataattcaagcctattataattcgtcaaattcctatctggcccatcagcctaattcaaatgaaaggaccaatgtgaatccaggttcggtcggcaggcaggaacccagaagagaggtcatgtccgtgaaccctgcagcatcatcagctctgtcactacctcttgcggatcattctgctgctgcttcccagtttcaatcggtaacagtagtaccagaatcacaaccaaatcggcctgaatatggtattggttggaaacacaatctatacactagacaacctctacagcccatgcctcaacataccataccttttgcacggacgtattctaatgtgtcaaatactgagacgtcggacactacaattgcctcgagtagtgtgccacgttcagttcctcctacgaaccatagtcgttcgtcaacagtcgtgtggccacagcagcaacagcaacagcagcaacagcagcagcagtaccaaccatcactaccatcaccacagcagcaagagcagcgacaaattccacatcaatcagcatacccatcttcccagattcagtcatccgtccggatcttgccaagcgttcaatctgtcggcccgtctatatcgggactatcaaccgttttaactcctggagagcaaatctctcctaactcgacacaatccgatacaaacaatcatactgatcgttccgacccctccttcgctcctcgacccttatcgcaacgccatactaccactttcaatcaatctcagatgcccactatgcctctctctcgacagtccccatcgctagaaggaagaggtgattcaatcaagcgagctcagacgatatctccgtccctgacagatgagcaaaggcacacgatcgctcgattatccgaccacccgaaccattccctctcttctcctgtctacccgcagtcaaaacgatcgaactcgacgaccactaatgctccagcgaccagaaaccaaaatggagaggaaaatagaaggccagcgcaaattggacatgtattacctcccaaaccgacgttgcctcctctggaaaactcgcccaaggtatcctcaggttcttctcatccggccaactttgctccttcgccgtctgggatttctctaaccctggctcctacagctgcttctgggtcggttatcatgtcgactgaaagcaacgttaataaagccgcgcgcgaatcggaggaaagtctgcttgcacgtgggctttatcctgtgtatttgtcggcgaaaccacagacagaaatgtttaacggaacagaaaacaggtccaacagagctgatgggcaggttccgtcggtcgttctggggaaaagagaaagaaaagacgacaacccagccacagcccacgctgtctctcgtcaacgtatttctccgccccaaggaggaagttcaaccggctcacaacataacactgcaccgacaacacagagccttccctcaaagccaatcttggacgttcttccccattctacccttccatttcgacctttgtctgcccctctttctaatgaggattcaacgttaaatcaacttcaagtaccacagacaaagtcagatgatcaaacgccatccatcagcttggtcttccttacgttgatacatgtcctccctgtgttgtacagcgacacgcatatgcctacctatctatttcaacaagtaccacctctgatctccttgctgagagcctatcacaacgcgctgaataaccagattcaagaagctatcttagcagaggcgagaggagaaatgccagagggatggagccagaaagaacggaagaagctctggaatttaaaagagaagtgtaaactcgatccacgcttcaagagaccaggggaatatgaaatcatgttcaagtactgggtatgtccttccgtcgttttctagatacggaagtttatcaactttcatcagactaaagatgggacttgtttctccattcaatcttgtcatcatatgcatctgaaatcaccgtacagcaccaaatgacaatgatgctcgtaaagccgcatcaggtttcggcgatcgttgatcaattgaatgcgcactttcctcaacacctagagaatagcaagactcgaccggttcggcacgtgttggaacaaatgctgaagcaggtggttcaattcgttcagtcatacaaaggacctccaggaaagtcagtactttcttaccttacagaaccccatctagtcctttggcgatctgccttgttcaatatttctgacatgtagaccgtttcgtgatgttcttccgacatcgggatgccgtttgacgcgcgtggggtcctcttcttcagcttatcttctgcactttacaacgctagaattactgtgccagcttcctcgatcaacaaacatccggcgacgttgacttttcctttgtggactgaaaactcctgggcgattgttcactggtatgctatttttgttctgactaaatctgttggtccgtcaaacatgcttctgatatgctagtatatacaatcttgaatggcggttaaacccagggctcaacgagttcacgaaggctggcagaccatgcggactctgtttcctgatgaacccgtccaagctacctctcatactgatctttcttcttatacttccacatctgcttggacctttttctcggcatcatcgagggttctgaccgaaccacgccccacagttggacagaccccgccgatttcgatggaagagacacttcgacgaacgagaaaattactggatggccttgagatgagtttacccgtcgataaagacagagctcaagctcaaaacccgacacaacagggaaaagaaggaaggcagggtgttgtgtaaaatatatgtttttcaaaatgtttagctttctgaggtttgaatgaaggtcatctgcaacagcaatggtcaaatatatcacagctgaatgcacagtatacagctacgttccttgctgatcacgttgtgatcttgatgaacacgaagaagtgtagaaaggaacgaagacaacaagcagaagatgattaggatgctatatcgtttgttgcgactaaaaacattcaacccaactagccttgatttgaattcatcaaccctaacattgataagattcatcatcaaacatcggcaggacgattatttgatcattagttctgataacgctactaccatctcaatcatggtatgttgcatttaattaaaccatcataagtataccggctaacgttgagtctgagcggcactttgtatagtcagccacggtcgatatccctgctcaggttaaagagaaactgaagaaacttcggttttccaaatcaaactcgaatgctgccatctcgtgttcgtccatcttctcaattctgatgaaaatatccttctcactacatattctgatcaacccacacatacatacatttggaaacagtcaagatcaacaaatctgaactcgtcgttgaggaagacgagtcatttgattcattcgacacgatcgaagagcttgctgaagagttaccagggaacaacccaagatatgttgttgtgtcatatcgacttgtacggtctcatcctcttctctctctattgctcaggctttctgttgttgatttttgatatccaactgatcataactctgactgtcctcttctttgatttttttctctttcaaacagacacacaaagacggacgtttgtcaacacctctgttcatgatcaattggtctcccactggagcagcgcctgatgcaaagactcttcacgccagcgcactctccttgtttcagcagaccgctgatgtttctaaggttcgcttctatatattctttctttctctccttgtctgataaaatcggagcttggcgctgatagataacgaacttgggataaacggtaggttgttgaggttagagagggtaccgaaacgctaaccacagagttcctagaaggaatcctactcggttgagacgagagggacaagtcttttatgttttgtcacgtgtttcgaataatctagttcaagaatgagacgcgatgagatggatgtacctgatacaacgtgtgcgatgcgctaaggatgatgatatgatagagagcagaactttcgttatgatacgagaggtcaatcgagaggaagacagaatgaagtcaatttcgaagaagaggaagatattgagttacttggcaggagtgcccaaggcgcccatcaatctatctaggtcaccgaggtaaacactcaacaatgccttcttttcttggacagtccttactccatcgctctttgattcagccatattccctcgtccattcatctctccccatcttgcatctgatcgaacacctctaggagatcgagctgcgctcggaggtctagattgtctaattcgcgaacttttagacggcgatcgggagggtgaagggaaagaagaggacgaggaggagggaagcgacaagtcaggcgaaagatgagggttggatagaagatatggtgaagtggaaggtgtcatgtacggagacagactaccatcggaagctattgaaggggaaaccgttgaattggacatagtaggcgatggaagaggaagcatggtaaatgacggtgtctgtgatgaagataagaatactggatgaaccgagagaggttcttcgactggcttaggatgatccgtcgaggggagtggaatagaatcaaagttgaagggtgattgggatgcgctagctttatgggaagatgcttcggcaggaacctggacacgacgagttgaactctgaggttgatgcgatctagtcagagaaggtattgtagttgaatcagagccgttgtcaagagaagcaggggcggctctccgatgagccgggatgtcttttggaggaagcatgagaccagaagagcgagtgcgctctctatttttcttgttttcttcgaggttgagcctgtcatgagaaataatcgctcgaggagaactgaacagatcttctttctcttctggtcctcctttcctggctggaggaaggactctatctgttctatgagattgaggagtagacctagccgatagtttatttaaagttatccttgatgcagacgtcctccgatcatcctctcctttagccatattcttatatcgtgaaggcgtttcgtgtccatttgaagttctcgacggactctgaatctgaatcacaggccgatgatctgcaacggaattagccggagtaacagccggtaggtcttgtacacacgtcgaagaaagcagagtagatgcagccggtggagtagtaagcctcctattgatcggacttggagacgtcgaaggtgaaggcaagagactggtgttgtttgaggaagcaggagctccggttacttttaagataccgagagatgattgatctgtagggagataagcgtctaaggtttgtatagcatacgctgcacgtttggaagctctgtctgatgaaattctagaagaagatgtcgattgagcatgtagaacaggtctaccccgtgttttttctactgttgaatttgagatattttcttgatcaggacgagccacagtcgccgaagaggaagtagcaaagtctgattcgcttctctcggaccgtctcgcaggaactcttacgagcttggaagtaccgggcgtgtcaggggtagatgctcgtctaggtgacggaaaagaagtagagatccctaaaccatgcgaagcgagattcgaggtcgttgtttgtttatatgagacaggcatttccgaggacgacggtgtggtggttatcaaagcgggtggcttcagatcggtcattcgtgcagtccggcgaggggatggacttgcagagcgttgtgatatatgtttggcgatcgagacaggggtttgatgaagataagcatgttgagatggtggggacccaagcgaactaggcgtagatggacgacgagcatgagagttggaagtcggatgaggtgagtgcttgtcaactctagttcgaatttgagtagatggagtctcgacctgatacatcctggatgaattcggcgtactgggtacatatccttccgcatggaatctatcttcatctgcagtggtattggcaacgttggtgagcctactagaaggacggagctgtctaggcgaggctagcaagattggtagatcctccagattaattcctcctctcaattctatcggatggtctactccgctcgctcctatcatctgaccctgggctctagcctgtccttcagggaggaggtaaaagaagaggaactctaaacttttcacccggacatctttaggaacggtctttcctttgagcatgcgcatgaggcattcgagcccgccggcttgctcgaatgttcgagtgtttcgggacgaatcgactagagcagcgaatagagtgtccagcaaagttgaggcgagtagggaagataaagaaagatcagtttgtgctgagccggacagagaggtcgcaaaggaggggacatgtcgggttagtagcagaagatcgaggatcatctagtcatatagagagaacaagataattagacagaaggatagtcaggaaataatacacgcaagggacggaaaacgtacctccatggttgaccttctgcccccaatgaggttcttgctaggttgatgcaataaacaaaccccttgaacaacttgaaaaattcctatgagttcagatagcgtcggctgaaagtcaacaggtttagctattcacaattcgattgaacagcgaaaaaagacgaagaagcatcgacgggtaagtgaacgatttgtctatgaaaccaaagtgagaggagcacaaacccgagctaacgacttgagagtgaaattgagggagtaacctagatgccagaggaatcaatatgctcgccactgtagtttaccagacaatgcaacatattcgatgtgtttaagaagaaaggaaagagagagagagagagtgtgtgtgtgtgtgtgt

SEQ ID NO: 2785 - DNA, 11735 bp, Xanthophyllomyces dendrorhous
tggggggggggggggcagatgaattagagtcaggactattgagcgcacaagtatctttcttcactggcaagcagcaacaaaccatttccgtctactccgtcctgaagctcgataaaaacctgttttatcctgtctctttcctctgtctcgtaaggaacctctcctagcttcgggagacacagcgtagctaggaggccatctaactttgtgagcgctctcctccggcgattggaagatgaccgagctgaagaaagctggaaaaggaacagagtgtgaggaattgtcagtcttgtgaattttgaagaatcacaattttaaggaggaaaacgatctcacatcttcaagaattggggctaagaaaaccggaatatcgctcatcttattctccagacctgtctgtccaggtgtacggaacgaagaggaaaacacaacaagcaaagagagagggtaagaggaagaaggtgatcttgtacgatagaaatcagtcacgtcgccccgtcgcccggaaacacctcgaaggtgacgcgttttgggctacgcgttggtctctaaaaggattacgcaaggaacgaaatcataagcggtgctatcacatgactttggccgagataacacggttacacttccttctaagcacccgtcgtgccctggttcgcccctccttcccctgtgtgcctgtccatccgtccttctcctcttctgaacaccatccatcctcccctcctcccctctcctctcctcttccttccatcctccatccctcttctctgcgcgcgcgcgcttacatatttctccgctgctctaatggatcccaacattgatcagattgctccacagtatgccgatccagaggcggtcgacacgccccggacgaataatcgaaaggtcgcatagttcgttttttccctttctctcttctctgcctctttcccttttcttcttctcctcccctttacatcctcttggataattgagtggatgaaaaaggctgatctgctatctctcttgttcgttatacgaatgtccatcattccatctgcgcgcgtcttcctcgctgggtccatctcttggtgcgggctgatctgtacccttagtttctacgaccgtacgtccctatcgttctgttctctttctatgtgtcgcttcttgttctctgctccatacagagcatcataagagatcaagattgggagttttacaaagtagtcaagagcgaagcgcatcaatgcgcttcgctcaaaatctgctcgtttgatgcccgctcgcgtccgatcaacgagtcagcgttcagaaagagcagcgatggactggatcctcaagaggcttcctgaacgtctgcttgagcgggtcaggcttctttgatactggcgcgctatgaagcatatcattaaggaatgatattggagtggtccgttggctttggttgattgatcctcagatcagaacgagggagagcagtggagacacattttgattcatctctcacatcgtatatactcttctcctgcctgttctatcctcaacgaagagcaatcgcctctatgcgcattgcctatcccattcatcatatcataaaacatatccacgatcgtatccatatatcgaaactctggaatctaatatcctagttggttttcaaacagacgacgtcggaaacttcaactatggactcgggcacgtgatgaagcctcatcgaatgcggatgacccataacctgctcatcaactacggcctgctccaacacatggatgtcttcgtacgtctaagcctgttcgggcgtacatcacagtcacccgaatacgtgttgaccattgtctctacgtggttctggtcttctgacgatctaatccatatgctcgattggtattatgattcttacggtgcatcgtatcggcttctaccatcttatgactatcatcgatatcgctgtacattggaacttgaatagagaccaactcgagcgactcacgaacagcttactagatttcataccgacgagtatatcgatttcctcgaaagggtaaccccagaaacggttgaggagcttaccgcttccggaagtcggtgtatgttctaattctttcctcagatgagcctaacaccttgtgtgcttgattgtagagtcagcagatgacatagatccaacacttttgttctgatagtcattgtaggagaggattgtcctgcgttcgaaggtctctacgagttttgcacgatctctgctggaggatccatcggttcgtccatcaccttcgtcctttcttctatctttctaccccatgagactcacattttctcttctgctgttcatataatgaaccgaatagggggagcccaacgattaaactccggagcggccgagacgtgcatcaattgggcgggaggtcttcatcatgcgaaaaagagagaggcctctgggttctgttatgtaaacgatattgtgctcgccatccttgagctcctgaggtttgttttttttcttctctatatttgaaccaatggagattaatctcgatttggtgaatctatgatatcaattataatatagatatcatcctcgagtgttgtacatcgatatcgatgtgcatcatggagacggcgtcgaagaggcattctactccaccgatagggtcatgacctgtagttttcatcaatttggagacttcttccctggaacaggtgacgttcgcgtatgtttcgttctcttccttctcctctcttatgtttacctctgacatctcggagccttccttttgtttggatttttgaaccgcaggatatcggattagctagaggaaagaactacgcagttaatattccgctccgaggaggtatcacagatgaagcctatcagagcatattcgagcctgtacgtcccacgtcgtctcgtgtcgtcatttctttctaacaatttcttaattgcttggtgtgtttgtcgatgccgctactggcgatggtattcggtttcgacaatttaataggtgatacaacatatcatggaatggtaccgtccaggagcggtcatccttcaatgtggagcggatagtttagcaggtgacaagttaggaggattcaacctgtctatgaaaggtttcttcatctcttcttctcattctacatttccttatgtatgaatatcggataccgtcggagcatatcctgatgttctcttgtttccccacaggccacgcgaattgtgtcaaatttttgtcaacattcggagttcctttaatgctggtcggtggaggtggttataccaccaaagtaagttctctcttttctttacttctctgttgaatcaagaagtgaaaagagagttgggttgaatattggaattttgatatgtgattgatttcaatagaacgttgcccggacatggacgtatgagaccggtgtaatccttgggaaagagctcgatgagaatctgcccttcaatgattagtgagtctagtttctgaccttcagcaaccagattcgtgttgtatacaggattcggattttttgatagtctgtaaccatgccttcctttgtgtaaacagtttggagtactatggtccgagatacaagctagaagttctggataacaatatggaaaaccagaactctagagagtatcttgataacatcaagtgagggctcccttgtctctcaatctatctgtttgcatttaagtggaaaactgatgatgttggattttctctcgtctaaatcacacgattagatcgagagtgatagacactcttcgaaacatgccgttcgcgccgagttcaggcatgcacgaagttcctagaatgtcggttgtcaaggcgattgggattgtgggcgaggacgatggtgattcaggtgacgagagtgatatcgacgggcagattaatcgtgagttttctaagcatctcaggaagagtgatcgtgaacaaaacgagtattaatggatgttggtgtttgattgatctccgaattagagcgtttacgtcaaattcacgaggccaatcgagagatggaacgagcaggcgagtacgaatctgatgctgattcgtctcgtatcgatatggacgaggatgatttcgatcgcgccggttcgtctgcccgaaatcgaacgaacaacgtatcgggttccagccgacgggcacacgatctctctcgtacttcttcctcgacgtcttcttcagcacacaacggttcttccaatcaccatcatgatcaccatcacgtcagcaacaacggtggcagtggtagcagctatccttaccagcaaggccatctgagtcatcaatcccatcagcaaccttcgtctcattcatatacgcattctcactcagcaaatcttccatcgtcccattcaatctatcctccgagctcgactttatcatcaagtcgccagaatggtggcaagtcactctattacctgccttctaccaaaggcgaccgagcggccatgggcctcccaacatacgatctgacaggcgcaggtgtagggtcatacaatgggggtggtcctagcggccattctgaagggatgggggctggaattggacaccctttaggttctgtaccggggggaggaagtacttttagtggtgcaggaccgagcacaggaagtggccacccaggacaccaaagaaaacgaagctttttctcaacctcgggggtcttgcctggtgccacgggatatttaggtctcaacggaggaactggctcgacaggaggcgaaagcggtggaggttcagtaggtggttcgagtgatcaggtcagcggtagagctgctggtgtcccggccggtggttggggatattagcatggctgtccgcaatcatctaccatcttcaacatctggactttcctcttagtcttctctccctgttcactttgtctattcaagattttctcttctttttggctcgtatgcatcggcttataatttttcatctcgttttttttccttctcttgcccatctttttcctttgaattttttcgttcccctcatatccgactcttcccaggaatcattctacatggattgttcgatcatttgggaaagggggttatccatcgctacatcaacgagaacagaataacgaacaggatcagataaagaaatgaatatggggatagaaatcacgagacacgtgattgcatagctattgtcatcccgccacattcctatcaagttttggatttctttcagtccacttcctaccggagaagcctctatcccttcttccctccgctatcccttaccttgttctttttaaatacgtaggaataatccgtctagaaatatgggtggaatggctcgtcataacggtcgaggtgctttgctcacctcgaacttgcctcagttgcaaaatttgatcaagagagatcctgccggatacaaggaggagttcttggctcagtggtaagtggacggtcgccgacatggttgtatccattgtaacaccgcgtgtctctcatgtctttgggtcaaaccaggtcacttaatcgaccttatgtttcatcgaatcaacaggaaccactatgaatccatgagacggttgttcgaattaaaccccgatgaggagggaggcagatttagagaggtccttgggtttatcgctcaggtaagtttttctctgttcttgttcagcaggctcagccatttcctcttactctttcgattttgttgaacatacaatctaggtctcccaatgctatcctgctgaaactaaggagtttccgagtcatctgtcttcgctcttattagaccaccatgcgacgctctcgcctgataccaggaagagcatcatccagaacttgatcatgttgcgaaacaaagatgtcattcaatccattgagttagtctttcatgtgttgtatggcttaccacacatattcaaacgggacaatttctaatacggtcattcttctacctcttcggaacagcctccttcgaaccctcttcccgcttttgtctattcttacttcgtctcagcttcgatcgtctattcgaaagaccattctgaccgatattcgaacggccaacgccaagacaaaaaaccataaactgaaccgaatggttcaggctttgctctttggaatggttgagagaggtatgggtggggatgccgagggatcccgggtcaaaggaaagggaaagaagatccagcaggatgcaaaagggggggaggccatgtgggcggtcgtcttggtcaaggagctttggcgaaaaggcgtttggtatgcgacgtccagctctgtgtgttaaggatcgtgaataagatactcgactaaccgcgccatactcctttcattgggttttcacatgacaaataggaatgaccctaagtcggtagctattgtcgctttggcgtgcaaccaccctaacaccaaggtccaatctgccgccattcatttcttcctcggaagcgagaacgaggaggaagactcagaagacgaagtcgacgaagggcctgatcttcgaaagcttcaacatcaggctattatcaacaagaagaccaagtctagggataaagcccttcgagcggcagtcaagacgaagggtcaaaagcgaagggagaacgcagccaatgcgggtgtaacccctaacttcccagccttgcaactcttgaacgatccccagagtttcggcgaaaaactttatgatggcatgagcaagcacggttcgtcattttcttgttacttctcaatactttgttcttgctctaaatcttcaggtttcttttctttgtctctactcttcagacaaggtctacgcgctcgagcacaaggtgctgatcatgcagcttctcagtcgagtgatgggtgcccacaagctttgcatccttggtttctattcatacatcatcaaataccttacctatcaccagctctccatcacgctcatccttgtctcgctggctcaatctgttcacgacttaactcctcctgatgtccttacacctgtcattcgaaagatcgccaccgagtttgttcaccctggagtaggatctgaagtcgttgccgctggtctgaacggaatcagagaaatttgcagaagacagccgtggtgtatggaggaagatttgttaggtgatttgatcgagtacaggaagagtagggataagggtgttgtcactgccgctcgaggtctattgcagttgttccgagaggtcaaccctggattgctcaagcgaagggagagagtaagtgcttctgttcttcttaaatggttcgatatgtcaaaagctctcagtcagctgacgcctatgtgcattttctttgctcttcgttatcgtttttgtagggaaaagctgctagcatgggtctcacctcggatcaggttcccgagttcggacaccaaaaatcggctccttctggaatcgacggtttggagcttctggaggattatctcaaaaaacaatctgctgaaggcgatggagacgaagccggctctcaagctggatccgatgctggttgggatgattgggaggccgaatctgaggctgagtcagatgattctgggggatggcagaacgttatgtctgattcggaagacgaggttgacatcagtgattcagacgatgatgaagaggagaagactaggcgagagaagaaacgggcgttccgggagaagcgatccagggatctcaatgctcttcaggaggctgaggaagataatgagaacatgcaggacagtgatgccgacgaggaggaggagaaggaaaaagtgtccctggctgctcctgctgagaccaggttttctgcccttgcttcccagaaggtttgtctttacttatattccattacaccttccttttgagcgatcaaaccaagcagaactgattcttgttccacgtcgtgggtctttggttcatgctgagctagattcttactccggccgatttcgctttgctcaatactctccgaatcgccgctgctaccgaagccgctaatgccggtggaggatctgccgcgaagcgaaaacttgccttgcttgaagcaaacaagaagacaaactcgtctggagcacaagatgatgaggtcttcctatccgaaggagatatcttgggacctagaaagcgagcaaaggagaactacgaggagcgaatggctagaattgcggagggtagagaaggcagagaaaagttcggatcggcaaaaggaaagaagaaggcggaagcttatacttcgtctactaacaaggatgtacgtcttcttctttctcatgtcgttctattttttgttcctgagtatgagaaacattcgttaacatgattgagctttttccttttctcgatcatttcatggcatcaacagaaacgaaagaacaagccgctcatgatggcggttcactccagaggagttgtcatgaagaagaagcaatcgcttcgggagaagcaacagaacttgcgaaaacatatcgagaagcagaagagtgcgttttaatttcttctcacactttggtttcacgcttgtcagatagcctgatgggataaatcattgacgacctaattctcttcctttggttctgaaccttcttatccgaattttttctcagagatgaaggtccgttgtttttactcttatgtcacttgtcttccttttctttccaggtccttagttctgaccatcatttttctctttctcttggtattgaccgaaacagcactagaatacaagtccaacaattttagagcgatttgttcttttttcaaagcttcaccgctcttgtgtagttacatctcttttctctcactgcagatctttgcccttccgttgtctttctttctctctattgttcttttctctgtttctagttctggttgttgtcttctgtctatatcatcattcggttccgtcctcgtccgcctctttgttctcagcccgtgtgtcaagccattctcccaactattcctttgctcatgttctttctccttacttcacttctctctgggtttgtgtgatagaggacaagattgggaaaatagtgctaaatagaaggtactggaaaacatttgtatcagatactgatcacggaaggaaatctctctcaatcaaaacaacatacgacatagataagaagaaaacataaggaatacaagttgatcaaacagatgtctggggggtcaagattgatacatatcgtgtctagcagacggcgtgggtctttccgtgtttacccatcaaggaatcttccttgtcgccttttccatgaacggccgatcgatcggtatgagcctgtttctgatcagccgatcgtttgtccatgttttggtcgatcgtcttcttatcgagcgtatcgagatgctcgcatgttgcattgatgtctcgaatgactggaccaagagagagaacgagaatattagaaaagatgagcgagtgaaagaccttcaggacgctttggatgaataaacacatacgtctctctgctcgggctttcgagaagtctgatcgacagacgactcgaagaagtttcatcttatcagctccaggagccatcacgtaagcgggcacgatccagtttcgggatcggagagcatcggcgatggcaaattcgtcgtaatgatatccatccttcaacttgaaggcaacgacagggagagaatctccatgtccaggagtgagtaagtcaaaccggccggattcaacaagcttgtcggcaaaccagtcggcaatgacagtggtgctgttcatgatggctcggaaaccctcctttccattcctgatcaggatatctgtgtgtaaataagaaaccaagtgagcatgaatgtctatcatacgaagacaatgtcactcagagcaaaaaagaaaaagaaaaaggaaacgaacagtattgcgccaggatttgtacagcgctcttggagaaattgagcgtgaaggatgcttgatcggctccaaggtaggcgacgtggaagaccaagtcctcgggtaggtactcgtgagacctccagattgcccatccaacaccagctacgactaggccgtacttgtgtccagagacctaatggagtagattgagatggaagaagcttcagacccgaaaacaaggagagaagaaggatagagagccaagtataagatcactaacgttgatagagacaactcggggaattctgaaatcccagacaaggtcaggcttaacgaagggagcgacaaatcctccactggcagcatcaactgatatgagtgaaatagaacagacaatctgagattagtgacaggttgaccaacgttgcacgaaatgaagaagttctgtaccatgaatcttaacgtccaaaccggtctccttctccttttcgtccaacagtcgagcaagctcagcaacatcttcgtattctccagtgtaggtggttcccaagatggcgactacaccaatagtgttctcatcaacgagcgaaacagcctccttagggtcgatgacgtatcgggctggatttaaaatgaaagaaaaatattagcaaagagaaattgttcgagaccaaaacaagaaacagcttgcgcactcttggtcacattgacaaacttctcctcgatctcaaggtatcgagtagccttctcccaacagactagacggattttgaaaacagattcaatatcatcgtcagtactggattatttaacaagacattgactagcaaaatcaattctcaccctgaacggccgaggacatgaccaggttagggttctctgtggacttgccactacaatgattgaggacaaagaagagtgaacaatctctatcagttcggagacatacgctgagagatattgcataagaggaaagctcacgcagccttccgagcgaccttccatttcctcttcatggcgagaacggcgaggatgatagcctctgaagaaccaacagtcgagactcctactgagtcgggtgagttggcgtcgacgggagcgttaaacattctggcgatcatgttgacgcatcggttatgctgtaaacaagggaagcagcaccatgcgtttagcaaaaatcggacaaaagagaacatgagaaagtaaaaggttcacactaaccaactcgacggtcgaggggtactcttgataatcaatcatgttctttccgagctgttcggtcatcagtctcatcgcctggtcttccatcgaagtcgacacaaacgaggctaggttgagggaaggggttccatccagttcgagctcgtctctgatcagactgtatgcggtgtctggaggtacacgcaaaagaagatgcaagaatttataaatagaaagggcataaatccgatggtcaacatcgaacgttctcattcttctgatgggctaggaatgataatagaacggaccggcgggcatcgactcttcgggcatttcccactgagggatgtctaccgaggtaaacttggatccgtagatgagctgttcatcgtacttgggctccttctgtgtaaaagatctatcagccagagagatctaagaatgaaagtcgaacaacgtcgagggcctaaccttctcctgcttgtggttcacggattcgtctgacctgacttgacccaatagtcccatttttctttgatttgtttagctgagggggttgattgagagatggatgcgagagatggggattcaaatcaagaaagaagaacgagtgaaggagaaaaaatcggaagaaacagcgtatctttatatatagccaacagacagccgaccgggcaaagtatagtcatctaccagcctattccctccgctgccgtcatcatcatcatcttctttcaccatcttaaat

SEQ ID NO: 2786 - DNA, 22140 bp, Xanthophyllomyces dendrorhous
aaataagacgctcttctactattgaatttacttcagctctctcatagcggaggcaataatcaagatctttgaatggagatgtttgcatctgcgataacatacacccgagtgtctgtcagtcctttcatccatggtccaactggctttttctgagagattcggggaaagttgatcaggcaccaaagaggattgatctcttgcgcagtcgggggcaatgtgcaagtgatgatgacatcatttacgactgcgcaaagtcacgtgtatctattgccgtcgaatacacagtttataaccggattggaagggagcgcacagtgatatttgcctcaacttgagagaataaggaagaggaacagatcaaacatacatccaatggacacaagggtttatcatttcggacgtctgttgatgagaatacaatagtcgaagatcttcaaggctgagcgcaaggttaccagaacacagcaaaagagaagcaagacgttgatgttcgctttcctcagcaagtctatatgctctctctccgttcttataacctcctgtgtcgagctaaactgccacagacccggtcaacacacatgtttagttcggagcccaaagacaatgtcatacttcctttcatcataaacatcaatccggttagaccattgatacaaccttcatttctcttattccttccgtcttgaatcattcgacacttgttctttatactgcaacccgagagttagacaagagcagaaagaatagaacaaggaatcgattgataaaagtgaccgtatatgattacgtcatcagatccgaattgtttctatggcaacgccccttggctcaacttctacccttccactcgattcagtctccctccgcttccttcttctgcttctggtacatcatcggttatgtctgccatgctcacggtagaagttcaatatcatttggctttaatcctgccaagatcatcatcgaaatcaaccttggagccattttccactcctcccctccaacatcttccttcgttcgatcacgcacagatcccacgcagctggacatggagagatcctcttcttcctcttcctaacaatcgatcggatggactcgtccacactggagagatcattgcacaaagctcagaatctacggtgctcagccttctcatgtcgtatgtctgttacttctcaacttacctctatacaaagtcccttattttatcaaactatctcaacacactttctctcctttgtcctccctgactatccacagccgaacgcctgctttaccacttgctcatatcaaatcacttcttcaagggcctcagctacctgatgaacttgccagctctttactggatattatcggctttgatgatggaggctgggaacttgttgaaatgcttgtcaaggagagggttcagattggaagactgatcagcgatgaggtatgtgagatccatccatcccaccgtcgaaataaaagtctcctgatatgaaatgaacctccaactttttcaacaacgccaggcctactctaaacctgcatccaatcaaccgatagatcctgactttcttctagctcaaagtctgcgacaaaacgctcagcgaaatcttcccctcgccgctgttagttgatccgccgattaccctttcatttagatcaaaggaagaaaggatcaaagcactgatcccacatggatcatcgttgacttcctatcgcatttcgtcacaggcttcctccgctcaagaagtttacccacatgtctaccaagccgcaaagcatagcggtctagctggcatgagctacggtggcagattcgctttaccaatgggaactatgaggtttgactatgatgtacgtttccctcaaggtcacttcatcgtcagaagatagcgtttggacgctaatcctcacaaccacattgaatatatctcagcttcatgaagaaggtgagcttctcattcctctacgtgcatgttttctcatggtacatccttgcgttttggctagtctaatgatttatttgtacttaatctgcaattgaagtcactgttccaccatcgagacctatacctcccaaaacgaacgagaaactcattcctctgacagaaatggacaatctctgtcgggggtcttttcctgttcgtccatatgtgtttcgtagtcagttgcgcaggaaggagatttagtatcgaatttctatttaccttcatctattcacctacaaatcacgatcaagggttacacctctttaaacagggttcagagcattatatttcccaccgcttacggtacaaatgaaaatatgttggtctgtggtatgtaatttacaattctaccttcattcagcttaactttgttgaatcattatagctttggctgattcgagataatcattcctgtgttcgatagcaccgaccggagctgtatgttgaatatttcaaccgttgttaatcatacatcagagttttgaacgcttttcttcctcattctcagggtaaaacagaggttgccactctttccatccttagagtactctcgcaaaatctccttccgaatctgcccaactcggtcgtcccccggatagccagagatgatttcaaaattatctatgttgcacctatgaaggcacttgcggccgagattgttagaaaactcggaaagagactcggttggttaaaaatcaacgttcgagagttgaccggttcgttcttgtcttcatctttatttacatatttttcctttgaaccgccgtatgaacatcttgaagcgttttgtttgatcgtctggccgcatttttaggtgatatgcagttgacgaaggcagagatagcggaaactcagatcattgtgacgacgcctgagaaatgggacgttgtcacccggaaacccacaggcgagggagaactagccagcgtatgtagcttcttttcgaacagtcctgtctatacatctcatagtgccgaaaaaggatactacttacatgttgagtatcgtcgcttgattctttctgtgttattgcaacgattggtcatggattcgcagaaggtcaaattgttgatcatcgatgaggttcatctgttaaacgaagaacgaggtgccgtcattgagaccattgtcgcccgaactctgagacaagtctgttccttcgtatttgattcgaaattgatcttccacagttcttaatccctcttcttttttcgtctcatggaaaaccaggttgaatctagtcagagtttgattaggattgtcgggttgagtgccacattgcctaattatgttgacgtcggtgactttttgaggtgtgtctttcattctctcgcaatttctatcgcaattcttaccgcaagggatttagtcttgtctagggtttcatgtatgagctcaactaatcctcctcttacttgcgggaacgactgatagagtctcaagatacaaaggttagaaggattagtctagaagtcatgtactttcatacaataacgtttacctgattttttgtttctctttcttccctttcttcctccttgccctcaaaatcaaacaaaaggactcttctattttgactcttcgtttagacctgtcccacttgaacagcatttcttgggtatcagaggcaagaacaacagtccgcaacaaaagaagaatttggatgaagtcgtttttgaaaaagtacgtacgaaagccaaccacatgaaccttctaatttcggatgtataattctcaatacgcgttcatatgattaatcaggtatccgagatggtatcccgtggacatcaagtcatggtttttgttcatgcgcggaaagaaactgttaagtctggaatgactctacatgatcaaatcatgaaagaaggaacagcagcggattatgattgttcggataacccggtttgggaaaagttcaagagagatatcggaacaagcaaaaataaggaaatgagggagctgttcgggtatggaattggtatccagtaggttcttttctcctccttgcttcctcacatctctctgggcagatattcttttgtacaaaaaaagaaagggaataaacggtttataccatatatctgctttacatagtcatgcgggaatgcttcgaaccgatagaaacatggtcgaaaggatgtttgagtcagggtgtcttaaggtaggtttcataccatgtctttctcggttacacgaatgcttgcaaatgatatttctcgacaactgaacacttctcgatttgctgttcttaaggtcctattttgtacatcgactctggcttggggagtgaacttaccggcacatgcggtcgttatcaagggtacgcaggtgtatgattcaggggttgggaaattcgtcaatctctcgttagtttgttcctgtcaaccatttacaactctgcgtctttctacatggcagacaatggggtgaatagatctcgtcaagagatgaagctgatcgattaaatcatcttgatataaaagaattctggatgtcctccaggtgggttccctttctctgtttatgactcaatcacccaaagaaacagctatttaatgacaatgacttcttatgtgatgtacatgttttaaatgaaaacagatttttggaagagccggtcgaccaggtttcgaaacaagtggggttggatatatttgtacgcctcaagaccaactggatcactacttggatgccattctatctcaagtgagagtttttcgtctagtattgcagaaacgagttgtcctccgttgactctgtcgggtttgctcatttggtaataatttagcatcctattgagtctcagtaagtgtttggagtttcttgtttgaatgggttgattaactgatgctcattcattgggttgatgaatgaaatctaggttcgtggccgggatgatagactctatgaatgctgagatcgctcttggcacgataacggatgtcggagaagcaggtttgtttgttctacttcctgcataccgaatattatggttgtgaaagatcgaaaggttcatgagttttggttttaatagttcaatggatgggatacacatatctttttggtatgttatttcttaacgtgattctcaaagtagacctggacaaatgtttattttcttgttcttgcgtcatcacgaatgtttggcgtacttgttctagtccgaatgaaaaggaacccgttcaactacggaatgccccatgacgtgacggccgatgatcctcaactcggtaataaacgacatcaactcgttcaactagcagctaagaagctagtggaggccaaaatgattgaatttgatgagactagtggaaagatgtctgttacagatttaggaagaatcgctgccaagtactgtctgtcccaacccttcccttcattctcttctcctagcgttgagccgaggaaaggaagttcaaaaaactcaatagctcattccttgacttcaatgttcagatattcgagtggcaagtatcgagattttcaatgagaactttaagcccagacagacagaagcggatgtgctgtccatgctcgccatgagtactgaggtttgtcttcactctgcctctatctttctgtcactgagacttttacatgctgattcgactacaacttgcccccaaagtttgatcaaattcaagtgcgcgagaacgagattcccgaattaaagtttatgatggacgaaattattccgtgccaagttaaggtcagcaatcatattctctatctgaatttggattggagttgaagctgatttccatcatctttctctctatttcaacggcagggaggaactgatacaagtcaaggcaaagttaatatcttgctacaaggtcatatttctcaagtatttgtcgaagactttgcccttgtctccgataccgcctttgttgcccaaaatgcaggtcagtcactatccagaatatagctcttctcctcaacttttcctggaagtgagcgcttaagtacacgaattatctctcttctaggccgaatcattcgggcgctgctagaaatcgccatcagtcgaaggtgggcagcgactggtgtcgtgctgctctcgttgagcaaagcagttgaaaaaagaatgtggccttacgatcatcccatgagccaattcaaccttcatcgagatgttctttataatctacagtgagtcctgtcttagctgtctatcgggcagaacaaccagtatgccttatgaaaaattcgatactgacacttctgaaatatctatcaatttctgcagacaacacgcggatgatacgcccgttactgatctggctgcttctaacgcggaggatctaggaaacctcattcgtttaaacaaaatccatggtgcggctttgttgacggccgctaggcagtttccaacactggatatatccttcagtcttcgtgagtgtcgagtagcccttcagttcttcaaacatgtcaattctactttcattgatctatctgtctttgttgtgtgtatgtttcctgattccaggtcctatgagccatgacctgctgagtattagtatcgacctttccaagcgattccaatggaacgaacgtcttcacagaaccgccgaacccttctgggtatgggttgaggatcacgaaggtgtcaatattcttcaagtctcaaacgtccttatccgatcggctacatcctctgttcatctcgatttcatcatccctattcgttcaactgctcgcccgccattcgttacaatccgagcgatatccgatcggtggatgggagtcgaagattcagtgacaattccattcgatcacctggttatgcctaaaccgtcgacggctcatacatctttgctcgatcttccgtatcttccgctcaaatgtctagaaaaccctcagctgcaagccatctattcaaagcaatttcaagtcttaaatggaattcagactcagtgcttctggcctatgtatcatactcaagagagcgtgttggtttgtgcgccttctgcttcaggaaagaccacactgggagagttcgctgtttggttcgttataacctttgccttcagcatttatatttagtactgatacaatacgtatttgtttatgttgtattcgcttggaaactgatatgcaggaatgcacttcggtctgatcatccctgtcggattttgattgttgctgctcggagggatgatgctcgaaaccacgcatctcggctccgtgggacgtttagtcagagtatgaaactcgacatcaaccttctcctacgctcgtccgactttttgtcaagaccctctactcagtcattcattggagtaacccatcctggagctcttctctcattctatgctaacgcatcgcctgacgacttcggaaggagtctgtcgttacttctgttggatgatcttcacttgatggacgaacaatatgaattggcgatatctcgaatgttggtatctactcgagcggcacgagtccgaactatagggctgagtgcgtcgttgaatgatccgttggatataggatcttggttgggagtggatccttctttcattctgagcttcagaccgaaagaccgaggaaccgcattttcgacgacagttcagacgttcacacttcctcattccgctgtactgctaaaggcaatgacaaagcctgcgtttgatgtagttcattcgtatcctggcgaaccgacaattctattcgtaacttctcgggctcaatgcctaactgttgctcgagacctggtcacccaatcgggagctcagatggatctcaatgggttcctcggtacatctccggaagggcttgaaccatacttgcgtcgattaaaggatcgagcgtcggcggatattctgattcgaggaatcgggatctttcatagcggcctcgcgccttctgaccaggcgctcgtgttggaactcttcgcacttcgaattattcaggtcttggtcgtccctcgagaggcttgttggacgttgccagtccgttcgtctattgtagtcgtgatgggcactcaatatcttcagatcaaatcgggtttcgatgcctcttcatcatcgtcggcaggaggagccgaccgacaagtagcccgttacacaaaccaggagttagtcaagatgcaatcgttcgccgttcaacctcctacaacgacaacctcaatttctacgacaggaaaatttgtgttgctctgtcaagcagaacatcgagattcataccttcgtttcctgaccgaaggattgcctctcgagtccttgcttcatctgccttcgtccaacgttcttcgatcggcctttcaggcagagatggccaaggggacaatcaagacgaaacaggatggacttgatttcttgacacacacgtttcttattcatcgaattcgatccaacccgaccttttacggcgcgatgacttcagacgaagaggatgagtatgaaaggttgagcagggttgtcgacaggtgtatggatgaggaaaatatagagacggaggaaaaggttgagtcgaaagtgttagagaaggtaaaggagaatgcaatccgagttgtaccaggctcggcgcctaaagtgtgacatattttgtgttcttgttcgtaactatgtctatgtgtttgtgtgtgcatgttcagaaaataaagcattgtgttgatgtttggtctgtagatatgtacatctacacgggacaggagaatgatgagcaaataagtaatgggagagggagagggaaaagatgagaggggaatttatactcatatcaccttctctcttgatgacagtccaattgattgattgattgattgattaaacgattgattttcggtcatgcgctgactggacaaggtgggactcgagattgttgaagaactcagagggcaaaaatagcctggttataatacaagcagcccagcttacgatgtctgccatggatgctcgagaatcatcaaggaagattcacataagcccgaaaaagcactttatccaagtgatgaaccaacacaaggtctggctgaaggataggaagagcacagaacactatggctacgtggattttcccgacaatctaaactatatcttatctcatcttatctacccatatttgtttgatctatttattttccatgccctatttactttgagtatccttcatgaaccattctccatagccactcttttgcaaaacagaattggtttcgcttctttaggaagatacatatgtatcctgcttctcaacagatgcaagttaacgaggaaataaaaggaatcaatatttcatctgtcctggtgagtactggttttaagctccaacactatcttacggagatcttaacccagcccacttttcttttctcattgaaataaagactcagcgcttagcaaggtttacttgggaatggttcgatgactaagtgtagtatttgatggcaattcttataaaccatggtcttaaattctggtttctcatttccatttcaacttggcgctagggtgctttcatatgagatggtatagaataacatgaccgctttcgtcttgtcttttctccgcttagatttctctgtattgtatcttttcttcgtgataataagtggcactgtgctcaacactagtaccgccagatgatttacgacgaaccttctgcaaatttcaagctcaagattgaacaaatggaaggatttggatagaatatgatatatacgtcatccgttctctatcccttcgtatcgtatctatatggtctgtatcagtcctactcgcaggtgatatatatcggaaggttggcccacttgtttggtcgagatccatatctctttactgaaccaagaaactctagagcctccagcgccggtctcgacctaccttctcgatataagtaggtggtaggagggccgagatcatcaaataggagaaatgtgttaggtgtgaggcgcgatggcaatggggatgatgtgttgggaaaaagctgacatatacaagggcttacgctgatattccttactttacgctttgactctctattccaccagtccatcactcttcccaaactgatctgaatctggtaatcgagtccctttcgtaatgtactccctttttgattaaataggcgttgttttcgtttgtaactttctttgagaaatgttatttctcctaatctcttttgttggtatctcatactctatctgttctctatctgttcttgttccaaggcctgatatttcactcgtttgcagctgtctgtacatgtattggacttgtaaatcgtctttctgctcactaaaccttgaaaacagatttgaaataaaatctctgaatttttcgcaaatcattgaaaatcattgaaaatcatttgaggtgtcaagatcgctgtccttcatctctcttcctcactcacctcccacacacacatctttacacacaaactagtaatcagaagcaaagatgctgctgtctacactccccctgctcttcctctcgaccctatctttggcacaacagaccgctctctcagtcccccaggtgtatctttaccctgctccatctagctcgaaagacactaccgcttcaactccactcactctcaccgacgatcaagcccgatccgtccttgcccatcacctcggagctacaagagggattcacttgccagaaatatgggaagaagttgagggctggagccggatgcttgttggagggatgtttggtggcttggcccatcgggacggtgacgacggtgaaaaggggagggtattgattgttcaaggcgttgaaaaccctcttggttcgtgttcttcctctatatcttcaacttcaagtgcaggctttttttgccatgtgtaaatcgttcaaggtcaatttactaactttatggtgaatactctcttcaaatatcagacatcacttcccaggacccttctttccaattgacctctgactcggcttctcttcgatctctcctcaacccttactttgagaagacgtccgatctcttcaaacacgctagcgaatcaattgagcatgtccacgttcctggattcttactagatttattcgatatcaagcaggatggtatgtccgatctacacatgttgaagagcttacaatctatttaaggaatcgacgttctacaacactaatagaattttcaccacttgatcatctccaacggaaccctatacagaggctactcagactcttcacagagagcttcagatgctttcttcttgggtttttaacgcccttccctcatcacatctgtctgaggagcaagacccatacgatgccatgtcgattggttcgttacagggtgtcaaggcaaattcagaggaatacaagctggcagtgaacgtagtgaagggagcagttgactctgtccgttctttttcacatccttctcgtagtcgagatgtatggctaactgttcttgcttcttttaactgccctcaatcagataacctcgacttctcaacggcctttcatactgatccttactcctccttccgccttggtctcttctgctacttttgataagcgagctcttgctccatccccctcatcaaactcttctttccctggaaataactcttatccggctcccaacctacctgtttactcgacttcattgtgccttgcctcttacgaggcttgtcagaactatacatctagctgtaatggccgaggatcgtgtgtgaaggtgacaagagctggaaagtcttgctacggatgcgcgtgtggcaagtctgaaaacgggactagctacggaggtgtggcttgtgaaaagaaggacatttcctcgtgagtagtttgctttatactgacccagattggatttcgttgttaatcacgattgtttattttcattttgaagaacattcactcttctcctcctcacttccatctttatagttgtcctcatcgctgggtcgattggccttctctccaccgttgggttggatcctttgccgagtgtcttgaccggtggatctatggccggccctaagaggaatgattaagaatgatcaaaagagattttttttgcgtcttgttaagtcgttggccaaaccgagagatcaacttctcatagttcagagacgagctctttcctcatttctcttcttacactattattttacatgtttttttctgcttcgattgttctctttctcctttaatctcaatggcttttagcagatacttgattgaatcttgatacttaaggaaaagttcgaggcttatgattagttgatgcggatcttgttacttgagcgagcaaagaaatattggcaagcgagaggaagctatagatgttacgtacattgaatacaatggtgatgggttttttccttcgcgcgtatgaaatgaaggtcatcttcatcttgacaccttactaacaacctgtctgaaacatggccgctaacttctgggcctcatcccatgcgtgagttcaggaggcttgttctattactcgcacatgggctgaaactttatgtgtttcttcttttcttgatatggatctaggaaacattggttattcgatagggcaacattagatcaagctcgagagattgatcttaagtacgcatcaaagaaacaacttgcttgtctctctatccactttgccaaccgttcgtctacattttccatcttctccttctcgataatatgaacacactctttccagtaaaatgtgacatttcacacactcttctttaattctatttcactctgtttttgaccggggtttacaaatgaaaccaaacagtccttcaacgactagggaaacgcctacagctccggcaaagaccgatagccacttcgatcgtctactttcgtcgtttctatctgaagaatgcatattgtgacacagatccttatcttgtcttagctacgtgttcttatgtagctgcaaaattggaggaaacaccagttcacatcaaaagtgtagtagtcgaggcgaggagcatgttcaacggtttgttcccctcactcctctacttccaacccttgtctcgtcggtcagtttctcccaacaggaacattcattcatcagcgtctctaattcttcttgcgtgacaaaaaaaaacagatctcaagataccgataaagtattttccgtcagacaacgccaaagtagctgagatggagttctacctgcttgaagacttggattttcacttgacagttttccacccttaccgagcgctagctatcatagctggtaaagaaaaatctgacacaggctcattcgatgtgtctgctggacccagtggacagtcggatatagaagttgaaggggtctctcagttgagtagaggcactggaaagggagcattgattgtggagaaagagatctttgaaaatgcctggtgagcttccccattcctgtcttcctcttcctttcccctccttccttctccatctcctctcaatcagatagctctctgactcttttacttcttggcaccgtaacgaaacaggtttatggtgaatgatacctatcgaacagacctatgtttactctacccaccttacatcatcgccatcgcctgcctctacatcgccatgatgcattttcaatcagttaatcccaagaagcctatcgcccaccttcctcaaaatacttctaattatccttctagttcgacctcaacttccaacaacactgctaccatgagtaacacgaccggatcatcaactaacgaatccagaacaaatgggtcgtcgagtagctccttgccatcattatctacttcaggaaaacactctcgtttaccgcctgcacccaagaaccatccacttcccatgaacccgctgctcaatcaatcttcttcctcctcttctacgaccaactacaactcggttgacccaaccggtgtatcgtcaactttatcgacagtagacagacaagacccgacactcgatataataacatacatctctagtataagcgcaaacttttcactggtagctcaagttgttcaggaaatcctctctctatggccactctgggatgcaatggaaggttcgaaggtgtctacgtcttcaggagccggaggcttgatcacggcttcctctgcctccttctctactactgttcccacatccccttcattaaacagcccaacgacattcgctgctgcttcagcttctctagcaacgacaagagatcaaggaaaaccgacgctcaccactactggtcctgggggtgggtcctcttcggggagacaaattgaagaggaacatatacttgaaggtcagatgagcgctctagtcgaaaagatgagaactgaacgtgcaaaagataagtcttcgctagagagtcgatggcctgtcacgggatcaacaacaacaacaacaggcggaggaggtggaacaatgagtgggaaaacagcagtgacagggtcaataggtgtaggtggtcaaggaaacaagcgggtcagagaatgaactcgtttgggttaggagatcattaaactacaatgattgatggagtctccattaagagaattttgagcatttctgctcgattatagcagaatgcaaggactagaaaatacacgtgaaaaaaaagatagacagtcatgataacatacatattcaatacgatctaggttggccgttctatcacaatctgcctttcaactcaactccatatcccaaattcaaacggaagaaaagcaaacaaaaggaaggaaaggatagaaggagaagaagaagaaacgatatagctagtaacaaaagggagcaaatcaagaaacggttgttgagagaacagaacagaacgatgagattacagtatgcttgcagggttcacaggaccctcctgccgagtcaccttttccttctccgtcgattgcatttcatcatctaggcctcgagcataagattgagactgcgaggctagtctgtctgaatcattcgaggcacgaggagcggatggtggtggcggaggtggagatgataaggacgcagtaacggtggcagtggcggcatccccctctatcgcctgtagtaatccattaacgatttcctctacatctccttctccgtttctcacacccgcactagccttgataatctttgcgtacttttccatctctggtccggtcccgagctctgattggagtctaacaaatctggaaaagagctcctttcttcgttttcgtctcatctcaatctcttgattaagcaatgttcgttcgacctcaagtcctgtccctcgatcttctgctgatcctccttcgacgggttctgcgtgaagctcaactaagtcaattgtctcgtccgggttggcggcagagggatttgccaagtatgcgcgctctctcgccagatgagatgatctccaatcattccaaccagccgcatatcttctctccatcctgttctccaactctgcttccaactgtcctaacttttcttttccttctgtcagtctgtcgcccaaggttgactggaggacgccgacttgacgtttagtctcgcctaattcgagattgatactgttcgctagcgaatttgcctgagtgatatcacgttctttcgcttggagctctgcgtcgaatgatttagcgagcgaggcaagaaggagtgagagctcggtcgtcgtttgaccagcgacaagttgggcagtctgtgaatggtaaacctttggtaacaatccggatggatgtactgatgaaactgaatggtgatgcgagtgagattgagagtgattggaagggccagcatgagtagacggattgatgtacccagtataggacatctgaccgctgtacggtccaccaccagatgatgaggatggacctagccggctaccaggctggtaagatccgataacaggagaagatctgaatcgttcatcctcaaggatatagtcttccgctgtcttgccatcacggttggccagctttgggtctgctccgtgatcgagcaggctcttgaccagtcgtttagagcgcgctcgggcagcaagtgttaatgctgtctcgccttcatcatcctggaagttgacaacgtcgccgagttcttttggataatcagcaagcctgccgaggatggtctccatataataccttgccgcgtgagtctttcctttggacagcgcgacgtcagcaatatggtgaaagacggttcgattgttcttatcaatgttcagagttgaccgatggaggagttcgtatagttccggaaactttcggacatcataattgttactgaacatgacacttcgcatgagtgcggtctgttcagagtgattgacccggaagatgtccgccccggctgtcaacaataatttaaccactcgaatccgacccatggcacaggcccagtgaagggcggtatgaccatcatcatctatcggatgatttgggttaaagtccgcaggcgggttcaccaggaatggagggatttgagaagtctctgagataaagtagtccaagatgatatcttcgtatctgtccgctccgaggagctcctgaccagttgcaaacccagacatctcgcttgatggaagcgctcccattgaaagatcctcgcctttaggggttggccgttgccgacggcttgaatgagccggatcgtatccgccacggaactttcgtttcgtgccagaccctccttcacggtaagttccatcgtcgccgtcgtcgtcacttcccaataatgggctgggtgtcctagaagacgagctgccggcgcccgggctgccgacagaagactctccgctcaacggagagccggcaagatccatcgtggtttccctttctctggcagcataagcttcggcatcagcttttgcttgagctttcgctaaggcggcggctttcttttcttctctgtccctcttagctcgttcttttttctcagcggccagagctgaagcagcctcagccttagcttgcgcttgagcctggtgttgagcccgggaaagctgtcggctagagagaggggtttgggaagcagctgagctaacggagccggccttctgaggtgtcgctgagtcgcctttgctcttcctgggttgacggctcggggcagcggtgatgtgtttgggtgcctgaggaggggaatcagcggtgggaatatagtcgatgatgggccgcatgagatcctcaacatcatactgcttagatagagcgagaccacgttcgatagggatccaggttcctatatgacaaagatgttggaagaagttagaacttgtttagagaagtctatatagaataaatagagacaaagaagcgaagcgtaccttggtattttccgtaacctccttggactttctcgtgttcgcccttctggacttcccgctccagaactcgggttcgttgaggtttatcaaatccggccaccttcagaatctgagtggcattcagccaggaatcggatcgtcttctcatgacagccacacctttacacaacctgtcaggaacggaagacgcttgtaagatgttaaacttgatcgtctgggtgttttacaatgaattgatgtaaagctcgtgaaacgtacatctcgagtactctttaggacattgatattgaaaggaatacggaaagagacttctgtcagtactttttttatcagatatctatcggttcggtctgtctgtctctctgacatgaacagggcgaccggctagtcgaatcttttggaacgacgacttacgggacgtttgagtacgtggcctaaagaggattcatcccagaagatgacagaaatgatggtatcaaaaggaagaatcagcacctggttccaaggttatactgctactttgagcaccgtttcagttgatataacgcgtcttgatcttggtatgtatctcatccaggaggagagatcgtgagagtgcgaaaggacactggacgcgtaaaggaggagggctgaccttaaagatctgggtaccatccgtggcgatacctgcaatctgtcctttggccatatgtgatgaacgactgtgtatctgttcttccaacgaggttatgcttatatgagtatttgtgtgttctattgcaaagagagattctgaagaaagtgacgaaagaaggatgtatgcgatggagaggtaaaaaagaggcgagccaaagacgcgcaaggaaaattagtaggtcggctgaagagaaacgttcattagaaatgttgactacaaaccgtattagggaattgataaagccgactacaaaaggtcagactggccgtaaaagactacccaaacgattacagaacagtatagaaggcgattatagaaaatactacgaagaagcttaaaagcaaaaagtcttctcaatattcgctctgcatttgaacaggattgatcatctccttaaggctttctgaagatcatgctgattgctcgtagagtgctccgatcgcccaagacctcgttctctacaagtgctagaccttcgttctcgatccgacacgcttccagttcggctcactcagaaacagtcagcatcttacctcctcggttggactacaaacctttgcttagctcgctcgagtccattcagcggaacgcgacggtcaggaatgcatcaatttcagtcgaacagatcgctcaagcagcttcgctcgctactcgcagggccagtttaatcaacgagtcgaatgtgctcaaacaccaacgttcaatcatcagcaatcgagtcagaaataaacaaccaggcgcggtggacgatgctaaacgactgaaaaaagatatacagaccctgatggctactttggccgacgtcgagagttccctgctcggtctttctttgaggattccgaacgacacccacccagacagtccgctcggtccagaaaaaaatgcaaaagtagtagctactctaggcccggagcccttgccggcagacccaaacagagaccatcttattatcggacggcaattaggggtgatcgactttgaatctgcttcgatcgtgaccggttcgaactggtactttctcagaggcgcggcttctgtcctcgagcaagcccttcagtcatatgcgctctccgtcgctgtcgaccatggtttcaccccggcttcctgtccagacgtcgtccgtgctgatatcgccgctcgctgtggattctctcccagagacagagatggctcctctcaggcataccagataacatcaaccaccccggacgcacagcaattttgtctggcagcaacggcagagattccgctcgccggttcattctttgatcggaactttttctatcctgaacttcctcaacgcgtcgtcggtatcggcaaggcctatcgaccagagacctctggggggaccgacgtcagaggactctacagagttcatcagttttcaaaaatcgaactctttgttgtttcggatgaacagagctcggaacgcgagtttgacaggcttgtctccctacaaaaagatctcgtcgccggtctcggtttgaccgtcaggtgagtctcggtctgtttgttcgcttgtagtcggtcaattcttcgtctcaactcgggcgctggatgtgactcttatggatgaactccctctcttttattctgtgatagagtattagacatgccgtcagaagaactaggcgcatcagcatacagaaagttcgatatggaagcttggatgcctggaaaagctacctggggcgaggtccgtttttagttcttctcgtgtcccgttttccctaacttattctccactgtgtaccttgtttcctttcattttttcttttccaaagatctcttccacttctaattgcacgtcctatcaagcccgtcgattattgatcacatacaacacacctaaacccgcacttccaaccgacccagcggacaaatctacaccatctctgccaccgacgacgttcgctcacactcttaacggcacggccgctgctatccctcgtttgattgtcgctctgctcgagaacggagtagttctctcctctgctgaacgtccagaaggatcactgacggaaacagtcaagaataaacttgacagcagacgaagaccgatggcaaccaggacaaaaggcgcgaggaaagaaacccttgatgaagggatttggatagagaagatcaaactgcccactgttcttcgacggttctggatcggaaaagaacagattggagatgtggatattgaatgggtttaaggaatgatgatatacgatgaatgttgatagatatacattatttgtacgttcttgttgttcgtacggggtactcggcaagtcgcaaccatgtcgatagctcaatccttctttcctttctatctattctgacgatccgagcgtacgtgctgacccgatacagtagatagtgagggtaatagaatcattaggatttccctatcctcatcatgatagaatgtattgctttggtgttattcatagacaagggatcacgtatgccctatctgctcggtgtctgtctatatgtttgcgtcatagaggtatcaaacaccgtgagtggaggcaggacggggaactacttataatctatctcaacctaatctccaatcagacatctcctttctgtcatcgcaatccgatctcatcaaaaaccgatatttaactaacagaaccagcacaccatggcagctctcgttacttctgcgctttcaaaggcaacgacggccgtcaagtcgacacttgtcagtcagccgaaacaacccgacgactggatcaagtggacagaggtagagaaaccggtagagaatgaagaggaaaagatgttagccagacatctttttatcactactactttatcgtgaacaaacttagcttactcggtaattgtgtttgcggccatacagtacaaagctgatagagattacgggtcgtatgcaggctaggaacatcaatctccatggcaaggccttccgagtcactcatgttcgccacctctctccttgtcttaggactgcccataggttactaacataaacaatcccctttctgcttcctaaacaaatattcaccgtaggtgaagtcgctcgcctttgtgaagggttatttaacaatttcatccgatcttccgtcccacttgcaatacggtctcttcgcttcacccggcaagagatttgatgtcatcgggcggtacgctaatgaaccagtacatatactcgatgacaccattaagtctcccagagggttgggaatcaaagtgtttggcgtagagggaaatccgattgagggaacacaaggaacaggctcgatggatttgcattttaacagcgcgccgatgcttggttcgttgctgatctgtcttgtagcaccctggggttaatgctgttggtctatacaaaagaaactgatctctcttccttttgggttaccatagaactcaccgatcttgacacctgtttagaaatcttcgatctgcgagaacggtactgggacgacaatgccgatctccagaaagagttggccaagcgagcggatacgacaaagcagtcggctccagcgtcattacctaacttgccggtgatcgggctacagatgtacacccagggtaagctactgtactcactgactgttctagccatcgaaatgcggactaaaatagatccaagaactgatctctaaatccaaaatgcgcatgataaaccagctgccttccgatttggaccatatgttgcccatttctcgctgaagcccacaaacacgttccaaacgtcgctctccaactctttacagctctcgtctaccgcgtctgctgatgaacactcgattgaacttcgaacatacttcgcaaatcatccggctcaatatgatctcttggctcaattttcatcctcccttgaatcacagcctgtcgaggatgcttctcaggtttgggatgaagcctatgctccttggatcaaacttggagaactcgaatttggggtccaagatagtctttccaatgagaggaggcagtggtgggagaatgagattgccctctctccattcaacgcgcttgaggaccaccgcccgttgggttcggtcaaccgattgagaaagagggtttatgaggcttcgagaacaaggagggcggcggtgaacgggacagaagttaaattccccaagagcgcgacagagatgccaaactaagaacaaactatcaagatcgtcatcctcacttatgccttgagtttcgttgtttaactgcactctggatatttccttcttaatcctatgtatcatctatcgatatgtattaacacagttattt

SEQ ID NO: 2787 - DNA, 31206 bp, Xanthophyllomyces dendrorhous
gtattaacacagttatttactacacgatgttcgaatgaaagatgaaaaaccgcgcgtctgataagatgaaatgacgttttcaattttatctttttaaacttcgttcttacccccaaaaatcaagggtcaacaatgcttttcaccgaattctatcgtcttttccgtttattcttgacgacgaacaggtgattaggaccaagctgaagatgcaagatatcgtctctcgccttcctccggagataggactccgtatcattctgtccttgtctttgcccactctcgcctcgttccaggctgtatgctcgacatggttacatcttgttcaagcgcacgaggatatgatctactctcggttggctgaaatttgtgctatctcgaacggttctggggagaagaattcgctggacaaactatgctcgaggcttgagagcagatattttggaaagatgacctggagagaagtagagaactggaaggctttttgtaagtccttcgaccactctctttatctatgtctgtgtctattgggcatctcttcttgaacaacttatataatgattgataaacgatccatctgaatgactatccttgagtaaggtcataagcagtctagactgaacaagaacaagtcggatcctgccatgtacctatccagaatctatccaaacgaaacacctccgagacacgcctggcggctgaaggttgacttgaaagagcgactgctgctgacaacacatagatctccagggttgaaagttcatgatctcgattcaatggccgagctctttgtaatccaaacggtgaggatcgatttttctttcgctttgatctcaagcttttttttggatttaatctgtttcttcgtgttcaatcgggtttgccggttaaggtgggaccgtatactcatctagaatacgaccccgacgcaggcatcgctgttttcgatgaggatgatgacctagaaatctggaaactacaaaaaccctctcctggacaagatctctcagacttcgctcggggtcaattcgtcaaatggaacaaaattcctgctattcctggaatgagagggtttcatctcaaagacgggtgagttaaacagagcacccctttccatttgacaaaagtgatttgtgaatgctgataaagttttccggatcaaatagaatacttgctgttgtctcccaacagggcaccacgacatactatgacctagtgacttcacccgatcagcctactcttcttcaaactctatcccacgatcgaggtgccattggatatctcgacaaaacaccctccacccttgtgctttgccatgatgatctgactcgatgttactcccctctcaacggttctctacttggcacattccctccgccgcctactgtttttcttgcgcattacactatccgtcgaccagaagcgcgaaggggtttggatgaacttgtgagcacggacgttgtatatacaggaatgatcgaatcggttgatttcgaagagatccgccctgcggcattctatggtgggaaagaatggaaggcatgccacgtagacgggccatatctagtcatactttcagacatgtccagattgtttgtctgtacagactatgaagctgtcttgagagcactggaaggagaggagagggagagaataatgaagagcacttgttgtgtcttcgatatcgaggttggagagataaatctagacgctgacccgggaatggagagatatacgggtgataccaattggttatcagtatgtgatggaagagcggctttcggagcaatgtacgttctttcttctgtacacttgaacaatatcgtattttgttttacaatcgctaactcaccgtgtcaatggccttccaatgcaaacaaacgaaagtgatcacgtcatgatccttcctttgccaccaaaatcttcgaccgcctacgtgaaatctccgcatgcgcttgctctcccaacagctcgagatatggagatttcatgtctctcacttgtcccagacggtttatttaccatatggggatacttgcaacgcacttcctcttcacccggttatcaccggatgatcctcagaaatgccgttagggtcctttggtttgatgggagaggaaaaaagattgaaagtgaagatagagagttagcgctcgagaagtcggctactgagattcagatggaggctgaggggtggactgccagtgacgatgacggtgaagagtggactgatgatgatggtgtagaagagtggactgacgaagaggatggttagagaatgagcgtgctcaactgactttcacccttctccagaattgaagttatgcaaaatggatgcataccgtctggggtcaaagaacgaagaccacacgttggattttaaatgatatcaaattgcaaatagacacgaaagatcaaactcatatatacacagccagaagagaagaacaattcagactaaatatctgacagtctcttccgtttgaggactgttcttgagagatcttttctcaagcgtgatgagctttgataaacttgatggcgtttgccgaactagcacgatgattgacgagacgagaaacaattggaagcaatccgtttaataactccttacgatatcagaagaaagaaacagaggaaggagggacatactctgtagcaggtttgacaccgatagctttgtcaatcaacttccccgtcttcttttcaaagacaaagtgcgagcgtttcgtactatgaatttagaagatttgatttgataggaggagaaacctctcgaattgatgagctgaaattcaaataaatagataaatcggaaaggagacaaacgagttcccgttggaacatccgagcacaccaatcaagtctgcttttggatcagagagcagagagtagttcaacgtgtgcttcgtaatccacttctgttgagccgtcggtttatctttgctctatgatacaaagatgattgacaggacaagagggcatgcgggtgttatgtttcgtgagttcatgacgttcatgatacatacaaacgctcaggacttacaaggccaacgacggtatcttttgtgggttgagcagacgagagagatagaaagagtatggtaagtttcgtcagtaagaagaattggtaagagaaaaagtgacagcagcacgtacatcctaaggctaagaactcatcgtttgaatctctataaagacaggcttggttggtacatccgggagtatcagctcgggggtaggtaaagatgacaaggccagtctcatcattgacttagtggtggtgttgttgttattgttgttgttattgtttcgaatggaaagcaagacggtcaacaggatgaacatgtgcgaggttgcgataggttccctacagaagagaacatgttgacacaacagagacgatatcttactaagggtatggacatcaacatcctcatccttctcgtttctataagaatattccacgccaattcagatgccaagcgtgttgcaaagtattcagcttcgagagaaggttcttgaaagggagagaaggactaacttgaggatgatcgaagacagggtctgcccgagatccagaggacctatcttttctttgtcttctttcttcttctcggctttgtccttaatctcatctttgtttttggtaccagctttatctctggacagagcgctcgttctcttcgctggctcgggatgaacagcgggctctgactctgattttgacttcttggacggagcaggctgcgtttgatccttattgactcctcgttttttggtgccctagaatcaaaataagcagatctcagaccatccatccagcgtatcattttcgaatcgtgagagttaacaggagtaagctcaagccatagatgttttttggatggcgtgcgcttgagaagacttaccgttgtcaaggttgcgtcggaggtttgtgcttggatccctcgcagtcgactggacgttctggtaggttctcgcacgactttcgtagctggctctgaggacatttctttacttcgcttattgaacttttagatgagagggtagagaggagactagatcagaggagacaaaaagaggattatctcaaggacatgttcaatgattcttctatttctgcaatgaatgtttgatcggagttgaccgttgatgtgttagggttgctatgttgtcactcgtagtgcacccacaataaggtggatgagaccgaccaggcaggaccataaaacgaggactacaaagaaggtatatcactattctaacgcgcgaacatttctctgtgaacaactcgaccgaattttccatcactccaggtatcagcatggacactaggttctgtctctgtggtatgtctttctctgggtttatttctgacgtcatatcgtcgtccgcctatagcaaacgactactcgaacgaggactccgtatatgttgatttatagttgttctcctcgtcatatcgcaaataaccgtgactcgttgatgatctttttaaatcagtggaaggtatgatgtgtgaaacctcaaacgtgttttacgacaggacagatggggcgagtcatttgggcctcgcacagctttcgtttcgccacactcattcagccatactcacactcgctcggcccttttactccgaacgcatcattagtttttcttctcctttttttttcttttttttcttagtgaagaacatacggaaagatttctattccacatacatttcaactttgttcaaaactctcacccaccttctcttacacactctctcttatatctgtaaagatgcctatgctgtaagtttccaattcaataccagcacacacggtcattctcgtcgggcatatacgctatggcggtctcttctgccctttctctttcttgctcttttcctttttcttcccttttcttcctgttttcttaccttcatacgttgcttcgtcttcatttgcagtgacgacccgtctcagaagtacaagccgtacccgtctatcaatctgcctaatagacaatggcctagcaaacgaaccaccaaggctcctatgtggctcagtactgatctgagggatggaaaccagtccttggctaaccgtaagtgattcactttccctcttttccctcttttccctcttttccctcttttccttcttttccttctcttctccttagttccttttttttaatagttgtttgctcctttttcgtgcgcatgctctgattctatccaaacgtcacactcatcgttgtatttcgttttctcatcttcctagccatgacgccatcgcagaagatgacattcttcaagatgctcgtcaagattggttacaaagagattgaggttgcctacccggcagcttctgaaattgactggagtttcgtccggaaggtggttgaggataacgaagctggagacgacgtatttattcaggtcagtccacttcttcgccactttcccctgtttctggaagaaagacgtattccagaaggtacttaaccggcgatttccttctcaatcctcttgcgcctactgttaggtccttactcccgctcgagccgacctcatcaagcgaacattcacctcaatcgctggcgccaaaaacgtcattatccacttgtacaacgcaacgtcgcccctgttccgatcggttgtcttccgaaactcgaaagaagagactatcaagctcgcaaccgaccacacctctttgattcgagagctttgtgaagagtacaccagagagcacggaacaaacttcaggtatgaatactccccggagttgtttactcagaccgagcccgactttgctatcgaagtttgcaacgctgtcaaggctgcttggtttgctggaaagagtcaggtttggggtgggaagtctaaggttcccagggaagacagaatcaccttcgtaagtgtttatttctttttatctttctttgttcttgacccgggtctagggtgtctgtgtgtgcgcacatcgaatgctagtcacaacgctcaccattttatgctttgacacccagaacttgcccgccactgtagagatctcgaccccgaacggatatgccgaccagatcgagcatttctgcaacaacgtttctgagcgagagaagattattgtttcccttcacccgcataacgaccgaggtgagaatgattcatgagtctacctctagcttgaaccaccttgtcctgactcgcatatacactcatggttttgataaaataggaaccggaattgctgccgccgagcttggtttgctcgccggagcggaccgcattgaaggatgtgttcttggaaatggagagcgaaccggaaacgtcgacttggttacccttggattgaacctgtatactcagggtatccaccctggaattgacttctctgacttgcccacgattgttgacgtcgttaccgaatgtaacgagattccagttcaccctaggcagccttacgctggtgagctcgtgttcaccgcattctctggaagtcaccaagacgccatcaagaagggtctcgaggccagacaaaaggcaatgagtctgatggaaaacaaggagccaggatgggacatgccatacttgcccattgacccggccgatgtcgggggaacctatgaagccgtcatcagagtcaattctcagtctggaaaaggagggtgagtatagagaggttgttctctactattgttccttttctgcttgctaatcatcgttgtattggcctttcctctcgtctagaattgcctacatcgtcaagtcttcccttggattggaccttcctcgtcgaatgcaggtcgcgttctaccaggttgtccagcgaatctcggaagagaccggtaaggagcttaccgtgccagatatcacttcgaccttccagaaagcgtactctcttctgcaggcgaatcagcctcgattggctcttcgagcgttctctttgatcgattccggttccccgactccgggaagtactccccgaaacggagaggacggagaggaggccccggagaggacaaagtcgatcaccgcaaaggtcaccgtcgatggggtcgccgtcaccctatccggccaaggaaacggaccgctatcctccatgcttaacgccttgagcaccgttcttggaatcgacctctccatcagggagtattctgaacacgctgttggtggtggttcggacaccaaggcggcttcctatgtcgaggtcattggaccggacagtgatccaaaggataagaccaagggtggcttctggggtgttggtgtggattctgatatcactgtgcgttcttgattctattcagatatacaataacatcatcatctgaccaagcattttcctttacctttcttcgtgctacatccaacagggctctggattgaaggccgtcttgagtgctgctagcaatgctatcggtgaccgaaagttggacatcggagctttgcttgaaaaggccacgaagaactagttttcttttgtctctttccttagtgatctatgatgtaacgttaaaagaaaatgatttcctccaacacaaagagagaaagagttttcattgtaccgatgtgacttattgtacttgcgaatgagggatgtttgtaagaaatgagaacacggcaacaaaaagacgggagaggagtcatcgattgcgcaagtgccagtgcttcaactgtgaatgaggaccgcatttggcctttcaccaaaggctgaaaccggctggctgctgcgcttcctcctacttaagccttccacgactcgttcatctctttcatctcaccaacctacccacctcctactaccaccacccatcgccacctcaccttacacgacacatatacataacacacacagcacatatagcacgtcaatatgcttccattcgccttcctgctcacagcagccacggcactctcatccaccgtgtctgccaccccgctttacactcccgcttcggctcctccttcggtcaggtccactagggtgtcaggcgacaaggctcctattcacaggttcgctatcgatcagggcattgagcaggtccaggacgggtacagttagtatctttccttgtttcttttcctttcctcccttcttctgtcgttcttgtgtatgtgtcatttgtcgccacgtttcggaaagaaagttgatatgaagatgagatgtggcggaagtttctcggtgtgatccgataggcctgctccggttggggagagaggtctatgtggcaagatctctcaacttatctttcgaacacatgtcgagcctctcaactatttttcttaatatccttgacaatactcttcctctgtttatgacgttcccgcttatatgtcttgcgtgtgtatttgggtagaagattggctcaggaactaaacaatgctttcttcttactctagtcgttgtccttaagcccgaagcctcctcggaatttctcacgacccacctctccaagatcgcagaggagcatgccgccgatccgttctcacgctcgttctctgacggcgaagagcatggtatcaagaatgtctatggctcggatgtccttcagggatacgctggaaggttctctcctgacctaattgataagatcagagaggagcccatggttgacttcgtcgagttggattctattgtcaccactcaggagaccgagctcggagctccttgggtaggtttttcccttctgtaatcatgagagatctagggcttactagatctgaacatgtccacagggtttggccaggatgtcccaccgagagaagcttcggctctcaacttttaccaagtacgattatgattcgtctgccggagagggtgttgacgtttacgttgtcgataccggtatgtcttctttcctctcacctgtaggatcattgatagtcatatgttttaatgctgatcaatcttgtttcccatatacttttaggtattaacatcaatcacgtagagttcgagggtcgagcctcttggggaaaaacgattcccaagaacgacattgacattgatggaaatggccacggtacccactgtgcaggaactattggctcccgaaagtatggtgtggccaagaaggtcaagattattgcagtcaaggtcttgggaaccaatggatctggaaccatgtctgatgttgtcgatgggtatgtctgctatctccttactttgatttttgtatggtcgttgctgatagacggtctcttctcattgtttgcagtgttatctttgccgctgaggctgccgccaagaaggccaaagctgctgaggctgagttcctcaagagcggttctacctcccacaagggatctgtcgccagtatgagcttgggaggtggaaagagtcccgctttggaccgggctgtgaacaaggccgttgagggtggacttcactttgcggttgctgccggaaacgacaacaaggatgcctgtaactactcccctgctgccgcccagaacgccatcaccgttggtgcctccgagatccatgatgagagggcctactttagtaaccatggatcctgcgtcgatatctttgctccgggactcaacattctctccacctggaacaccaacaacgtctcgaccgctacgttagtgatttcctttctttgccatcgactcctctggtatttaatttgactcgacttgttctctaccctgacagtttgtccggaacctcgatggccactcctggagttgctggcttggctgcctacttgattgctcttgatgccaacaagaagctggcttatcaaccggaggccatggctgctgtttgggaggctgctaagtccctcttgccttcctacctcggtgctttccttcctcgagctgagattgctcctgttccccataagccgatcactccggagcagctcaagaagttgatgattaagcttgctacccgggatgccctcgtcggtgtccttcccgaaggaactcctaacctgattgcgtacaacaactacacactttctggttgaggaatgctaacatttgaagggtctttccctctacgctcttgacatacactcttcatatatccttctccttcgttgtatatgtctctgttttatttttcatactctcgacacgctgtttcaatactctgtctttcctcttttgttttgttctttccatcaagccttgcgctctggtagccccatatttcctctctgtcctttttaacatggataaaatgaagtgtaggttcaagaagtgaaaatctcagcaaagcgaatgacgaacctgggttgttggctatcctacttgataacgcatttcatatatctcgcctactccgagtcttcgatgctctgttattcgttcttgcgcttgtaggctgtttctttgtcgttgagaccaccatctcatacatcatcttaattctctctttcattgtgatctataaacttcttgatggagacagaaccaatcttattgaggatgtatagtcttggcgcgcaaacctgtagatcaacttcatgtcagaacacatgttatgtacaagattcatagagcccaaatcaacctattgaaagaaaagaccagcggtgtaaagaacaatacgatgacacaaccagagaatcattctttggtataacctaatgatattcggtctttcgtctgctttcttgccctgttgtaaaaatcgacctcaagtatatagcacaggttaaccctaatgtcatggttacgtaagtaacattcaatcaatccgtcacgcccactcagccagacatgcgcgtctctgctggccggtctcagcctggccggtttgggaaagcaagagggagagacagaaagagcggcaaagaagagaaagagagttagaggaagagaaagaggaaagctcatcaagtcgttcttcttcttcttctttcttctttctctcaaccacattcccactttgttgttttcattttgttccatccatcctccagttcttcaataatctcatcatggccgccactaccgagtctaagtgtacgtgatttctttagttacttctctcttttaagtgttcatcacgtgcttccaattcgatccatccatccatccatccatccgtccatcaacacgcgtctctacatgttgaaagacgattttctcttcctcgagaacaaaaattctccgccttgcatcccatccctattcttcgttcgttggtcgagaagttcaacagatggatgaacggatggatggatgatgatcaaatgaggatggttcgaatgattgcgtttggaccagatgacctttgcgcgttgtggtttcatgctgtagagggacgcgtccgacgcgtctcgttcacgttctgaacgcttcatatgcatttcaccgttcgaatatgcttgaatcactctgattgactgatcgactgacctacatatccacacacgtgtacatacatacatatcttccagctgtcgccaagaagcccgttcccaagaagggaggagctggaaagaagcctagcgcttacaaccagtatatgaaagtccaactcgcaaagctcgtacgttcttcttccgttctgttctgttctgttctcttcctctccttctgattccaaactgaagatatttcaatgctttaaactgagtagaaggagaagaaccctgagcaacctcatactgagagatttaaattggtcgccaagatgtgggctagcggtacgtaccctctctccctctctttcttgtgctctgatgactgactcccaccctaatatccgttttcttctcctttaatatttaaattcaatcagctcccgagaacccaaaggtatgcagctcgacctttcattccgtcgacttgtagaaacgcgtctaaacttttttttctttgtgcattttgacaggcatccgagagcaaggcctaattgactttctgtccctcttcttttaggtcacctagttgtctagccctctggtacctttgttctccccctgattaacaatcctgtctcgtcttcctcctcattctccagtctcttgtctcttcgttccataccttttctttcataacctacgttctgttttgtatccatgtcctttcccttccttgaatgggtcttgtcaagtcctcgatagtatgagcactctggttcacctcaataaactctttctcatcttcaaacctgtcagataggattgtgtcgatggatgagtaccgtttgtttccttttgtactgagataaaccagagataaagacattgtttctaaagaaaagaattatgaacggagggtaagatcaggaaaaatagatgcaactaaaatatgtagacaaaaaaacgaagtatgaagagggttcgcggcggtaagagacgctataagaatggaatagtgaaaaagagtcggtacaataggaattgttaagacaaggatagcgaaaaagaagagagaatagagacaaagaaggtgagtcaaagataagaagaaagagagagatatatatacaaaatcgtgggccagcgtgatcgtgcggaaggaataaatgatacggaaagaaaaagagccaagaaagaccagaagagaaaaatgatgagtagagaacagacaacgccctagatgactccccagcttccaggaagacctttcaacccgccttcgtccaacccaactcctctcgcccccttcaatagcctaccgacctcgtccctgtctacgagagcaatgtccctcctcttgacgccaatctctaactccaagtccaacctgacaaatgacccatttgtctcacttgttgaagctgagcctgctccatagggcggagtaccaaacgtggatgtaccagagggtgaagaaggaccagggagagtgagaaaccttccagagggcgctactgaggtcgttgtcgtagtgggttcttcaaggcctgcaccctcaacaatttcatccaatgccatcttttctaaccgggttccatcccatgcctccacttcccctcctgttgttgctgcttgtgacttttcagactctcgttcggcctgaacgacgggcgagtcaaccaagacccagccttcgctccctcctaagccaagtcccatgccaaacgaggaagaatccgatttgcgcttatgcgattgagagcctattccttctgtggaagtcgagctatcccacatcgtgccttcatccaagttcaacccaagccatcgttccagaatcgagttcacaccctcagccttgtcatcctctctagacctcttaaacggtgacgatggctggaagacaagcagatctgccggggttgaaggcaccggtcggaccagggtcaacgacagagacttcttctccatcggacttgacaaatcgatcgactgccagggatccagattattgagctcttcggctgactgtggcggctggggctcgggaaggtcacatcgatcgagcaagcttgaatctgtcgcgttcgttctgtcggttaactcgcacacgccatcaatctcttcttcactctcggctttcacagcctgaggcggggtggtcgagccaacgtagaccccaccgtaaccggcagaggtcgaggcggacaagactctacccaaaaagccagggagcgcagtgttctttggcggagctcgcagcgtggtggccagtcctcctgtagaaggaaacgtgaacagggcaaaggagaacaggatgaccatcaatgcgacccctccgacccgtttcccttcaacgacaccaatctgatgggtcgcggccgaccggtcccgctctgagcgcttggcgcccactctgcctagctcgagggatgtttcgctaacgtactggtctgtgagaccagcgctgagcatggggctaagctctcggtttgggtctaagctagccatccgagtcgggggatggatagccgaccgacaggatgggcaagttttaggcgctacattctgaagttgagaccgaagcgaagcaagctcgacctcaagcatcgcttcacgggatgtcgactgatgaagcaaagttcggaggttcgataggtctgcttggaggcgaacaagcatagaggtgtcgagaggtgtcgaggactcgggcgagacgattggctgacaggtggtggactttacatccgccgaagacactaggctctttagccgggcattctctgcctcaagagcctcaacatggatcgccatctcgtcaaactgttctcgttttctgtgcattggaagaacaatagtcgaggtcaagtcagctgactgaaaagagtaaggaaccagatgaatgaaatcatatgtacctttgcctagacaggaacgctgccgcccggtttttaaccagcctggcctccttcttgctaagaccagacacgtccggatgctgaaattctttggtgctcggcagttgctttcttttctttccttttccagtcggtgccccagtagcctggcaatccgattcgtcgaggaaagtagtgccaatctgaggttcgggactgcccgaggtggaggatccactgatgggaacctttcttgcgtaaatgtgaggcacatcgtctgttgagggtgccatacgttgcttcctggtcagctggggatcgaccgacactattggtgtcgatgccatcggtgttagtagccctgactcctgagccgatggaggtgtctgcggcatggacgaatggtgggaggatggagaggttgcagaatcgtattcggtagccgggtaggtggatgaaaattcatgggtcgtgtaaggactgaagagagtggctgtatttgaatttgatgggggtgggtaggaatgaacgagacctggcaaaggagctgttaaacagagaagcaaaggaggcgaagaggaacattcagctggagggaaactacaggaatgaacaagaacggcacgaaccgatgtcccctaattcgatagtttgagcatcaaactcggaggaagggaaagaagagtctccaccttcaaacgcctgatggtagagcagagggtccaactgatgagtccaatctaaactgatatctgccgagtgttcctcctcttctggaggtgatgatgacgacgacgacgacgaggaaaacggtgggaaggtgaatgtctcgttcgtcggtgtggatgaagaagggtctgtaggaaaaacgaggaagtcaaaagacgggtcggccatctttctctaacgttcttcacttccctgatggaagagcaggataagagatggggataaggaacgatggggaagaagaagaagaagaaagacgacgaagaaaataagtgatcaagagcaaaggagagaaaaggcacgaggcacgagaaaaaggcaccaggcaccaccaaatagcaaaagaaggagcgagaaaaaaaaagaacgcgtggcagccgatagagaaaggacggacgaccggttagatagccacagccacaggcttgtgatataattcaaatatacgttggagtcaattcaaatattctccgtccttccacgtcgacacaccgctggaacgtgctcgcacacttacttcatttgcttcttcattcccagtcgcatacatacagagcttacaacggcaacagatgtcgttcgagccacccatcgtttacagaaaggtattccttttgcgagcctcaccattcatggtcgacttctccggctcagatgatcaatgtctctttgttttctcttctatgcttttgcttgttctcattgtatatgtacacaccatgtttagaacgaatacatagagaccgtcagttctcagagagtctgtttggttccaactggcagggcaagaagcttacaacgttagcactgttctcggatcaggatactggaaataaggtccgtcggtccatctcttctccttccttggggcttgtcccagacgatacatatacgcacatacatgataaagacacttattgattttaccaatccatctgaatccctcaggtctctcgcagaggttcgtccatagacgtcacatcgtgctcttcgttcatgaaacatgcccacgctaaagctcatacaccaacccttccagctactattcaaggtcctcagaatatcactctcggaggaaagacaatcatccacccaggagtcattctcagaggagatcttaagagacaaggcatcggcaacaaggctagcgtagtccttgcgctcggcaaatactccttgatcggcgagggctgtgtgattagaccgccaggcaagtgctatagagggtgggtagatcaagttttttcattgttatatttcttcctcttctttcttctccctttctttctttcttatcctcgatgtgtctaatcaagacgaggtactaatcaaacatcactcttcttacctttgaaagcgtattgtgagtccttttccaatgccggctgtctcgtctccagaaaccatccggttgacaggatcgtcttctatcctactcgcgcgcgcgatgcacagtaatttttatcccgttagaataggcgatcacgtccacatagggccaggttcgatcgtggaagccgctcagataggaaactttgtacagattgggaagaattgtatcatcgtgcgcgttctctttctcttttctatcttcccagatcgggttggattgggttgggctgacggacttgaatcatcacagggtaaattcaccatgatcaaagattgtgtcaagatcggtacgtctgccttccttttcattccttctctcttcttcttacaacactcttttttccgtcgagagtttacatatggaactggtctgcgaacaatggcccttttggtttttcttcctgctttcagcggataacacggtaattccggatatgagtgtcattcctccgtttgcgcatatatcaggtgccccaggtgcgcatacatgcttctttcctttctccttctctccttctctcttacgactgctcaactacatcctttcctccctccttttgactcttttcttcaaaaggaaaacatattgaagatttacctgagtcgacagaggaaatcatgatcgtcaagaccaaagctttctacaatcgattcagagctgattcatctttagtgggacatccatctcgggagaggtcgtaggacatagatgtttacaggcgttctggcttttggttcatgattcatatcttcctttctgaaatttcttctctgccctcacatgcttatctttcgtcatcatcgttgttacgcgtatacccattcattcataactatttcttgatataatttttttttctcttggttgaccagaatctattggtacaagatgaatggacaggattagagaatgcaaagagcgacagacaaatgaacggttgcgaggaagagatggtgtcagacagaagaaagagaacaaaaagaaagaaaacaaaaaggaaggaaggaaggtctattcatatttcatatctcaataccctcctctcccaccacctctaccccctctcccaccattgttgctattgaaacctccgtaccctccatatccgcctctattttgagcgggtggcccacccgggcctccatttccggctccataaccgccatatccaccgtatgaaccttggttcgagggtccttgttgatacccgtatgattgagggttgggagctggtcgattttcaatcaaaaacatatatgtagagacaggaaagttaagaaattcatcatgatgatgtgagtagtactaatgaagaaagggatacatacgaagacctccggcgctagctccgtatccaccataagagggtgcgggaccaccttgggaaccagctccgtagccaccgtaaccaccgggcccaggtgccggtcgacctccatacgaggctccatgcgaaggaacgccagaagcgtaacctcctcggttgggcccctgttggctgtatccaccccgagcagtctggtagcctcctccattggtagcagaattagagttggagttataaggtgccgagtttccgttgtgacctccattcgagaatcctaaagaaatgatgaagaatgttgatctatcagctttttcgtgctataagcccttgaacaagaagccaaaaggaatggaaacgaacctcctcgatcgttgccgccgtaaccaccccttccaccccctctacctccaccagctccacctcgatagcttggcgcgccggatcctggcccacccaacatgcctccacctctccttcctcccgaatcgtttcctcctcttctgattcgatcatagtcaccctggttcaacgtctttcgcgccatcttcaaacccttgagaagaacacttcgatgaggggatacctgatcggggaagtagtaccatacagaaagcgatcggtcgtcgtagatgtctcctagttcggtggacggtagtggggtatagaacgtagagccgggcacacacgcttcgtcagctaaaacaaaaccagtgattccacctgataacgcagcgtttatcggtacgggctgtagtaagaagagtagaatgggaaacaggtcaaacaatcagggggataagcaaagaaagacagagaaaaggctacatacatcggttgttttggactttgtatagagcttacagaacgaatcatacaatcggtgatcgtccgaaacgaacaacacatcatgccccgatgtgttccttctgatatcttcctctgataactttggatatccctctgccatggctgtcaacaatctatcttggtcaatgaatggtaggagggcgacaccttgccattgcatctttttaccgttcatgtcgatatcaaactcggtgggatagaagtcaaggataggtgatgattcgtccgtcatcagcggatggaaaacctctggaatatggattttactattattgttgtgacgaattttcgcccaattgatttttcaataccatacaccgctcaagagaagagtgagaacgtacaagaaagaagttatcttacctagcagcagggaaaacacccatgagttgttcgtaaggcttgaaaggtgcaccaagagtgaatttgatgtccatcgtgccgacctcttcgaaatcagccgcaaagggggcgaaatgtgatggataataccactgccacgaaggggtctgaatccagaaaaaaagaggagaagagcgagatgaggaaggcgtaaactcaaaggcgtagataatcaaaaacgtgaggactaaccccttgatagtagtaatgtagcacccaagagagaccctcgatgtaatgaacggtgagcctgaagtgaaaagtatgagtagctattggtcatcagaactgaaaaagggacaaagcactcgaatatggaacgatgacaaacttctttcggaactctttgtcgctgagttctatcccaaacttttctctatagtatctctcttggtatccaggttcccagagcctaaataacagaatcaatccatatgagtattaaagtctagaagcgaaaaccacgaaaaaagaaacaacaaaacgcacttgaccgtgtcttcagcatcaaccgttccgtcggcgtttaccttccttcccttgggcttctcaactggctgatccatatgcggcacactcgtcaactcggccacaggaggcgcctcatccccatcttcttctgcctcctctacatcagcatccactagattctcgtcctcatccgcttttctctttgttcctctcgattcggcatcggacgaggcagccggatcatcctgaacgacagacatggtttcttcgatcgtttccgcaatctcatcctgagccccaccgctaagctcagctttgagcatttcagccgctgacatgttggccatccggatgtcccgtcggttttttaccagatcattgttcgatccaccgattgctttcgctgccttcgctttctcagcttcgctagcggaaacagtggtgaaacctggtcgggctggtaaagatggatgagcagcagatgagggagccgattgaagattgatcacttggacaagctcatcaccattgattagcacaccaggtcgggtcgtttctacttgaggtggatcgcgacctccatttgctcgacggtactcgtcaaccttccgacgtttgttgttcgattcttgtcgctcctccactgtaccagaacaacaaataatccagcgcctcagatcagcggcatgaagagaggagcaattatcatacaaaagaatagactggacatactttctcgtcttcttcggaaaatcgcgccctcttcttttgccagaccctccaagatgacctgcaccttatcgagctccagatttccatggttcgtcacatatccacctaatctaccaagttctgatttccagattcttaacagcgtatcaatcgcgccctccctgatctccagactaggaagatgaggcaagaaatcatttccaacgaagaagatgaggaagatccaatcatccatagctcgttcgagatcgaatgggaacggctggttaggaatgttgagttcgggctcaaggtactctcgcaagattgagatatctaggaaaatgaatggcttggtctctgatagaggcttgccagtatcttttggaggagcatcatctgcgcgggaaaaagaagagccaaagtcgcggagatgaatttcaagtcggctttttagcaaaagataagaacagaggaaggctgaggaaagataacgaactagtacactgagcggccatatgacccatttcaccacatttcctgcatccctgtccgccattgggctggaaaaacacatcctctcggagtaccttgaaatgcggctcatgtgtagctagcgcaagcatgatcaaatcggcatcctatagtatcacgagaaagaggtaagggattcagctcagaccacatatcacaaaacgaccatgcgagatcctaaaaacaatcttggcttacaagtccgtagatacagtgctgagtgttggggtcgtgttccacatgcgatcgctgtcgtcgaataaagtccataattttatgctctccttctccaggaacggaggcatcagagatgatgacttggatctgtttttgttacatagaaatagcaagtcaatttatttgtagcatctctgaacatgccgtcaaacttggaggaaagcaaacaagtgaaccgacattcttccaagcggcgtcagtgttcatcttctgcacaacccaatatctcagcgaggcagccaagagatccataaaaggtgttccaggagtgatggcattcgagtcccaacttttcttgttcttggtttcctcggatacgggatgtcccatagctatggtttgcatttgataatggcacacacattttagtgggcgggctttgacatgattttagaatgaagctattataaacgaaccagcatacatggcgatcgactcgatacgctcttgctccttgtcggcagcctcttgggcagctctgaatcgtcgtgatcgttgttggttcatctttgctcgaggggccactccatctgaaggttgggcgcatggaatgaatgcgtgaagtgtgagattgacagctctatggaacaagcaagagctaactctaaactgagaaaagacgaaccgatagccatgaagagcagctttcgaggtcggaccatgttgacgactctctcggtataagcaaacacctcaagcatcatatcctcttcagtttcgggggcaggctgattgaaaggtcgcgtatgttcgtgaatataggaatacgtaggtgtaccgcagaaactacggaatttgaacttaccttgccttcaggatgagtacacgggtgaacaataccgttcatctgtagtggcaaataagaggtgcttcaaagtcagcatatgatcgtgacggtaaaggaggaagctgatcggagaaatcttcgtcacgaacatctaggtatagattatcaaactcgactccgtttggattgggcttggtgatatctacagggatcttgataatcttatctgcgtcttcatctgaggggatttcaacaggatcctcctcaacaacgcgctcgatgattttaggatactttctgtggatcggaaggaagcagtatcaagattagtagggataagacgaaaggacggcgacacgcgtaagggtgcttactttgaaagccatcggaagagggcgggaactccctatggttcaataaacggtcacaatgagaaaaggaacgacaggacagttaacgaagagtatttgtcagggaaatcggtaatcgaaagtctacataccatgttgttgaagggagaaagtgtggtggtggtggtggaggtggtggaagattgagcagccgaaaatgcttcaaaaaatgaatgagtaaaagatattaaccctaaccgtttccaaataactgccatcaagacttcatttacacccctgcaacatttttcctctagctcgaatttctttcattcccagttgtcctttgtccggcccaaccttctcttcgttcccttttagagttcgttcaccatgggaaaggataacgtccttcaggatacgcccaaacgaatgtttgtctttcagctcttctgtactcctgcctgaccgcctacacctagttttgtctctcttgctctctccgctcacgttcaacacctcatattgccttttctgatcgacctttctagtaagagtcttcagttctctgtattttctccccaagacatcgtacggctctctgagtttgaggtcactacccgggatctctacaccgttgcggaggatggaacaaaggcgccggccaggcaaggccttctagacagacggctggtaagctgagcctcgttctctgggttatggcttcatatggtcatgatcagacgttgacctcatattcatacgatgtttctatgtatcatccagggtgtgtccgacaaagaatctcactgtgaaacatgccatcaaaaaatggcagattgtgtcggtatgtcttgcctctttcctcctcagcttctctcaaatgttacgttttgaacacggatcattcgggttctgatctttgagaacacttttgaaacacctaatcattaatctcataggtcattacgcctacgtcaagcttgtactccccgtgtatcatatcggatacttcaagcaagtcgtgacgatgcttcaggatgtttgcaaggtaaattatcttctgttgacctctgcctcattcaacataccctgatcgccaggccactcttctacaatcagacctgcgcccacgttctcttagatgagaacgatcgccgaacgttcctcaaacggttccggaagcctaatcttgaaaatctacaacgacaatctgttgcaaaggccgtcaacaccgcctgccgaaaagttgtccactgtccgtattgtggatcgatcaacggaactgtcaaaaagattggacccctcaagattgttcatgagaagtttagggcaaagaaggttcaaggcgagcaggaagagtttcaaaagagtttcacaaatgcggtttccttccagccagagctcagagcccatgtgaggaaagcgcaggaagatttgaacccgcttagagtgcttgaactctttaaaaggatctcggcagaagttagtctacatccttattctttttacgagagtactatatgccatgggcgaagaaaagctgaatgtatgtcaccgtgtttgtcgataaggactgcgagctgctagggctacatcccgattttggacgaccggaagagtatatctggcagtacatctctgtccctccagtctgtattcgaccttcggttgcacaagatggagccacgtccgtatagttccttctctctttcatattgcaggtttacctggctgaatatggttgtatatgtcttaacagcaacgaggacgaccttactgtgaaactcggtgaaatcgtcttcgcaaatcaactcatcaagacaggtcttgctaagggagtcactaccgtcaacttgatcgtgcgtgattttccttactataatccgaccggtctgatcaataacgcaacactcttgacttatttctgcttgcttgtgaaattatgaattttaggagtactgggatttcctccaactgtctatcgcaatgtacattaactccgaaatgcctggaattccacctatggctgttcgtccctttcctttctttacattgcttttgatcgactgtgatggacaagctcctgacagcgcgtttgtttggggatgtgttcatatgtgaactttctcatatagaaccataagccgattcgagggttctgtcagcgactcaaaggaaagcaaggccgtttccgaggtaacttgtctggaaagcgagtcgatttctctggaagaaccgttatctcacccgatccgaatttgaggatagatgaggtttgtctcttgctctcaccaaaatacccttctgatgtagcatgccctgactagacgtgtgcttttttggatcaaatgtttgccgtttatggttatagctggccgtgcctgagaagattgcaaaaaagttgacgtacccagaaaaagtgaccgatcataacattgcctccctccgtcaggctatcaagaatggtcatgatgtctggccaggtgcaaactttatccaagatgggtctagccctcaaggcttgaaacgattcttggcatatgttagaagcagagacgagacagcagagagactccgggtgggagatattgttgagagacatttgagggatggagagtgagtcaggatttctgcttctttggagaacgttggtgctaatgtattgtttcttctcagtttggtattattcaatcggcagccgagtttgcacaaactatccatcatgtgtcatcgggtgagattttcaagcttccttcagctgattccaaacgttcaagagcaactgattggtcatatacatcgacctgttgttccctttaggtcaaagttcgaccttggaagacattacgattcaatgaatgtgtctgcaatccctacaagtgagtcggtatttgactgaaaacgttcaaatagagtttcgctgactcctccatacttctttccgccttcagcgctgatttcgatggagatgagatgaatctgcgtatgtacatgaattcgatgacccaaacttggtctaaaggcgctgacatactttctcttatttcgtctactttttcttctcagacgtccctcaaacggaggaatctcgaaccgaggcccttgagctgatgagtaccaagaaaaacattgtgacccctcgaaacggagaacctatcattgctgccattcaagatttcattacggcttcgtaccttctctcccggaaggacaagttttacgaccgacaacaattcacccaaatctgctcttaccttcaggacgccgagcttcagattgacttgcctcctccgaccgtttggaaacctgtccgactttggacaggaaaacaagtgttcaaccttctaatgagacccaacaaacaatcgaatgtgcttgtcaacctcgaggcaaagtgtaggacgttagaaccaccggcgaaagattccggtttcccattggatatgtctcccaatgatggatacttggtcattgtgaatagtgagatcatgtgtggtgtgatggataagagtacggttggagatggtaagaaaaactcagtgtttggagtcatcttgagggattatggatcagacgaggcggcggtagcgatgaacaggttggccaagttgtgtgctcgatggctaggttcgttcatattcctcatttatataattgcatcaagttcgaactaacttcggcttgcacccaacattcaactctatctacctcatcagccaacattggtttctcccttggtatcaacgacgtcattcctgggcctaacctatctgcccaaaaggatatcatcattcagaaagcctacgatgtctgcgcggacctcatcgatcaagccaaaaaaggtcttctcaagaatgctccgggaagtgatcaggctggaacgctcgagataaaggtctccggagagctatctggtgtgcgagcggcctgtggagaactctgcatggctgaattgagtaggcacaacgctcccgccactatggctacctgcggttctaagggtaagtcattctttgtgtatttgcgtgtagacacaagacacacaaggaacaagaatgttgatctgcttgtcggtctgggttgatcattgtcaggttccaagttgaacgtctctcaaatggtggccgtcgtcggacagcagattatttctggatcccgagtacccgatggtttccaagaccgtttcctaccgcatttcaagaagaaggcaagagagcccccagccaagggtttcgtagccaactcgtttttctcagggttgacaccgacagaatttctggcccacgctatttctggtcgagagggtttggtcgatacagctgttaagacggctgagactggatacatgcagcgtcgtttgatgaaggttagtagaattactcaacccatcgttgccattgatatctaggacgagaaaggatcactgatcatcatgttctgatcttctcgttcgtaggctttggaggatctatcaactcgatacgataactctgtccgaaattctgttggactagttgttcagtttaagtatggagatgatggacttgaccctgcctgcctggagggtgagtctagtccggtcgcttttactcgatcgtggtctcatgctagggcaagttttttcaacataaattctcaccgtcttgtcataaagcaatcacaacaagacatcttacacgtatttgctcctgctatttctcaggctatcgccaagaagggcgggaagtctcttcttccatgggaggttcaggccatcgtcgacagggctcttagaggatcagactttgttgacaactgcgagcctcagtacatcaagaccatctatgactttgtcagcgaaaagatcatcgatggaatggttgagcttcgagaaaagtacggaatgttcggggctgaggaatacgatgaagattatgccagggttgatatgtctatgggtgccgatggttagttgtttctcaccgaccatcagctacttgtgcgcgaagttcctttcgttgatgatgctaagtcttcttgatgtttctcacagatcaacacaaagctgccgtggacaatttgactaggatcaccgagcagcaggtccagacatttatggacatttgctacgtccgatatcttcgtgcaaagattgaacctggtaagagttcttcatattcgactgtctacattgtgaactgctgtccaatgctgactacgatcaaattgattaccccgattaggatctactgttggagctgttggtgctcagtctataggagagccaggaacgcagatggtgagtcgtggttcattttttcgctgcgttgatgactcaaactgatatcatcttcgatctcgacggttttgtagaccttgaaaacgttagtattttcccttcacgccatttaaactctgaatgacaccagtcctgacgcgtttgctcaattaatcatgaatttcggcgcatagtttccatttcgccggtgtggctgctatgagtatcactcttggagtgcctcgaatcaaggagattatcaatgctgccaaactcatctcgacgcctatcatcgccgcccagctgtcgaaccctgatcaggaatctgcagctcgtatcgtcaaaggaagactggagaagacatatcttaaagacgttcgtttccacccgatttcaaatcatgtttcatcatgactgtatcgcttctcagatgaacatgcttaccaaactcccttcggtttactttgatgattactacagatcacaaaagttatcgaggaagcctacgggtctctatactcttatatcggcatccatatcgacatggaagtagtgcacaaactaggcgtgagtagagtattacgctcgatccaggatagaaatgccttacaaactgacatgcggtttctgtcttccgttttccatttcagttggagcttactctggacgagatcaaatgggccattgttggtcaccgaaagctcaagatcaagcaagatgtacgctcacatgctttgaggattgttgattttgcgcactaaccgttctttcttttgtatgaactgtgtttttgtcattatatctgatctcgttcacagaaaatcaacatcatccctcataacaatcgaattcgaatctatgtcgatgacgaagaagacagatacttccgattgcgccagatcaagcgagagcttcccgatattgtcgtcaaggtttgttctagtgatgcctaacgacgaaagacgaggatagaggctgattcagaatgatttcattctcacaacagggcatcccgactgtcaaccgagctgttatcagtaagcaggagaaggatcaaagtaaaaacattctcttcgtagagggttacggcttgcgggatgtcatgaataccgaaggtcggttcttagcttgcttggattttactcgctcttcctggttgatcacgattaacacattgaatcggtatctgtttgtctatcatcaggtgtgatcggtactcaaactacaaccaatcatgtgagttctactctcagttggacaatgtatcttcaaatgaaaccactagatactgaccgcttggattgacatgtatcagatcatggagatgtctgctgttctaggaatcgaggcagctcgagccacgattatcaagcagatcgatcacacaatgagctctcacggtcttggagtcgaccctcggcataccggtttgctgggtgatgtcatgacctataaggtttgtcgctttactcgccttgtccgatctgtgtgatgcttgggagctaacccgccagttatctgttcacaattcttttattctgcacagggagaggttcttggcatcactcgattcggtgtttccaagatgaaggactctgtgcttatgttggcttctttcgaaaagacgactgatcacttggtacgttccctctgtctatctccctcaaatttatgttgattcttaccacctccttctcctatacggcgtcttcagttcgacgctgcactctatgcaaagaaggatgccatccagggtgtctctgagtcaatcatcatgggtcaacctgctgagcagctcggaacgtcgatgttcgtatcacatttctcctgtttttttttggtagaggctcgttcttttggattcaactgatttaaatttgatggtattgatggaaacaactaggcctgcactcatcgttcctgcaccggtattaccaccattgaagcttcgagagttcgacggaacgttccctcaaaaagcgagaaagaaaaagacatcatctactcgatagagcttttgttcgctactttccacatatcattcccctctccttccctcgcctgacgttcttcattcttttggcagtcgactctatattctttgtggtcttgagaccggtcattcttagtttcgttcttcctctttacgattcttcatgtatttttcttaatcaaacgtcttttcggctcctcaaaggagctggtcagaaacgcgactcaacactacgagtcatgctgatgattgagcttaaacacattcatcgctccaacctgcatttcatcccaaatcaggtctcggagcagccaacgaaccataaagcacagtgagcgctttgagttttccacccatccactcctcctcgatctctatcgattctgccgggtctgcgagagcggataattcctccaaagatgtatttttggggaggtaatatgccttgtttgtggaaaaaaaatgcaagaagtatacgaattagaagagacaaacgaaacgaggcagagaggacgaaatgaatggaaatgggaaagataaaaagggagggggggggaccaacgacatcttgagtaattcctctggctaactcgaacagttctctcccgtgcaacggctttaacgcgcttaacggataaattggagggtccctgtctccttctcccaccacctctgttgcttctttcaacgttatctcggcttcgacttccgtcggcgatggctggtctatcgtaggtttacatcctggaggaacgggtccggaaccagtcatagaaaggtattcaattccaccccatggcggagaaagaaagacgacgtctattccgttcaacggtttgctctttgaagacgaggggttggatgaagacgacgaggaagaaagggatcgggcgaaggttacgaaatcgcagaggatgaactcgatccgatctgctactccgtaatgaagagcgttatgcctagcgagagataacctgagcggcgaagtgtccaaggcgatgactttgtacgtgcgcgcagaaaagagagaggaagaacagcgaaatattagcgctgaagaagagcaggaaatgagatgaatgattgagacaaacctctttcacaagtttgggcgaaagctatcgagtttccgcctactccgcagaatgcgtctagtacggctatccggttcagtttacatcgacgggatgaggaggcaaaacaacacaaaacatgccagctaggttagatacactatagactggaagaaatcgagaagtcgtagaatatacatactcccacatcgaagacgttcagcaatctgaattgctatccgttctggagtgacagagtaccagcccttattcatataaatccgtatataggcaagtttattggtcaaccagatatccacaagattgaaaagagatttgaggctcacctcatgatccataagcagcggcagttcattgtagagcgcaaacagtcttgtcctctgtgcataatctgttatggatttgtactataacatttgagctgatagcaggtatgtattaccacgatcacgcatgacaactcacatttcttcaaatcctttggcacctttttctctttggtataccgaacgaccatgccttggcaatcccaaggatggtgaagcggcatgccattcgaccctgcttcttgctcattccatgctttccttcgtttgaccaccggtccggatccggagtcaccaggttgatcgagggtagagctgtgtaccggagacagcggccttttagccggaacggaagctgaggtagaggcgatcgatgcagaagctattagagctgatgacttgatggactgcttgagctctgccggcagagatgcaaacaaggaagatttctgccgatatttgaccattgtgaggtttagttggtatgtgtttgtgtatgcgtatgcgtg
